(19) United States
(12) Patent Application Publication
(10) Pub. No.: US 2024/0374759 A1
(43) Pub. Date: Nov. 14, 2024

(54) METHODS AND COMPOSITIONS FOR MODULATING A GENOME

(71) Applicant: Flagship Pioneering Innovations VI, LLC, Cambridge, MA (US)

(72) Inventors: Robert Charles Altshuler, Newton, MA (US); Anne Helen Bothmer, Cambridge, MA (US); Robert James Citorik, Somerville, MA (US); Cecilia Giovanna Silvia Cotta-Ramusino, Cambridge, MA (US); Kyusik Kim, Worcester, MA (US); Randi Michelle Kotlar, Arlington, MA (US); Sandeep Kumar, Newton, MA (US); Ananya Ray, Melrose, MA (US); Nathaniel Roquet, Philadelphia, PA (US); Jacob Rosenblum Rubens, Cambridge, MA (US); William Edward Salomon, West Roxbury, MA (US); Barrett Ethan Steinberg, Somerville, MA (US); Zi Jun Wang, Arlington, MA (US); Ersin Akinci, Somerville, MA (US)

(21) Appl. No.: 18/690,134

(22) PCT Filed: Sep. 7, 2022
(86) PCT No.: PCT/US2022/076024

§ 371 Date: Mar. 7, 2024

Related U.S. Application Data
(60) Provisional application No. 63/241,931, filed on Sep. 8, 2021.

(51) Int. Cl. A61K 48/00; C12N 9/22; C12N 15/11

(52) U.S. Cl. CPC A61K 48/005; C12N 9/22; C12N 15/111; C12N 2310/20

(57) ABSTRACT

Methods and compositions for modulating a target genome are disclosed.

### RELATED APPLICATIONS

[0001] This application is a U.S. National Phase Application under 35 U.S.C. § 371 of International Application No. PCT/US2022/076024, filed Sep. 7, 2022, which claims priority to U.S. Ser. No. 63/241,931 filed Sep. 8, 2021, the entire contents of each of which is incorporated herein by reference.

### SEQUENCE LISTING

[0002] The instant application contains a Sequence Listing which has been submitted electronically in XML format and is hereby incorporated by reference in its entirety. Said XML copy, created on Nov. 16, 2022, is named V2065-7020WO_SL.xml and is 11,405,833 bytes in size.

### BACKGROUND

[0003] Integration of a nucleic acid of interest into a genome occurs at low frequency and with little site specificity, in the absence of a specialized protein to promote the insertion event. Some existing approaches, like CRISPR/Cas9, are more suited for small edits that rely on host repair pathways, and are less effective at integrating longer sequences. Other existing approaches, like Cre/loxP, require a first step of inserting a loxP site into the genome and then a second step of inserting a sequence of interest into the loxP site. There is a need in the art for improved compositions (e.g., proteins and nucleic acids) and methods for inserting, altering, or deleting sequences of interest in a genome.

### SUMMARY OF THE INVENTION

[0004] This disclosure relates to novel compositions, systems and methods for altering a genome at one or more locations in a host cell, tissue or subject, in vivo or in vitro. In particular, the invention features compositions, systems and methods for inserting, altering, or deleting sequences of interest in a host genome. For example, the disclosure provides systems that are capable of modulating (e.g., inserting, altering, or deleting sequences of interest) gene activity and methods of treating disease by administering one or more such systems to alter a genomic sequence at a nucleotide to correct a pathogenic mutation causing the disease.

[0005] Features of the compositions or methods can include one or more of the following enumerated embodiments.

1. A gene modifying polypeptide comprising:
[0006] a DNA binding domain (DBD) that binds to a target nucleic acid sequence and a polymerase (Pol) domain of Table 1 or 23, or a sequence having at least 70%, 75%, 80%, 85%, 90%, 95%, 97%, 98%, or 99% identity thereto;
[0007] wherein the DBD is heterologous to the Pol domain; and
[0008] a linker disposed between the Pol domain and the DBD.
   2. A gene modifying polypeptide comprising:
[0009] a Cas domain (e.g., a Cas nickase domain, e.g., a Cas9 nickase domain);
[0010] a polymerase (Pol) domain of Table 1 or 23, or a sequence having at least 70%, 75%, 80%, 85%, 90%, 95%, 97%, 98%, or 99% identity thereto, wherein the Pol domain is C-terminal of the Cas domain; and
[0011] a linker disposed between the Pol domain and the Cas domain.
   3. The gene modifying polypeptide of embodiment 1 or 2, wherein the linker has a sequence from Table 6, or a sequence having at least 70%, 75%, 80%, 85%, 90%, 95%, 97%, 98%, or 99% identity thereto.
   4. The gene modifying polypeptide of preceding embodiments, wherein the Pol domain has a sequence with at least 90% identity to the Pol domain of Table 1 or 23.
   5. The gene modifying polypeptide of any of the preceding embodiments, wherein the Pol domain has a sequence with at least 95% identity to the Pol domain of Table 1 or 23.
   6. The gene modifying polypeptide of any of the preceding embodiments, wherein the Pol domain has a sequence with at least 98% identity to the Pol domain of Table 1 or 23.
   7. The gene modifying polypeptide of any of the preceding embodiments, wherein the Pol domain has a sequence with at least 99% identity to the Pol domain of Table 1 or 23.
   8. The gene modifying polypeptide of any of the preceding embodiments, wherein the Pol domain has a sequence with 100% identity to the Pol domain of Table 1 or 23.
   9. The gene modifying polypeptide of any of the preceding embodiments, wherein the linker has a sequence with at least 90% identity to the linker sequence from Table 6.
   10. The gene modifying polypeptide of any of the preceding embodiments, wherein the linker has a sequence with at least 95% identity to the linker sequence from Table 6.
   11. The gene modifying polypeptide of any of the preceding embodiments, wherein the linker has a sequence with at least 97% identity to the linker sequence from Table 6.
   12. The gene modifying polypeptide of any of the preceding embodiments, wherein the linker has a sequence with 100% identity to the linker sequence from Table 6.
   13. The gene modifying polypeptide of any of the preceding embodiments, wherein the Cas domain comprises a sequence of Table 4, or a sequence having at least 70%, 75%, 80%, 85%, 90%, 95%, 98%, or 99% identity thereto.
   14. The gene modifying polypeptide of any of the preceding embodiments, wherein the Cas domain is a Cas nickase domain.
   15. The gene modifying polypeptide of any of the preceding embodiments, wherein the Cas domain is a Cas9 nickase domain.
   16. The gene modifying polypeptide of any of the preceding embodiments, wherein the Cas domain comprises an N863A mutation.
   17. The gene modifying polypeptide of any of the preceding embodiments, which comprises an NLS, e.g., wherein the gene modifying polypeptide comprises two NLSs.
   18. The gene modifying polypeptide of any of the preceding embodiments, which comprises an NLS N-terminal of the Cas9 domain.
   19. The gene modifying polypeptide of any of the preceding embodiments, which comprises an NLS C-terminal of the Pol domain.
   20. The gene modifying polypeptide of any of the preceding embodiments, which comprises a first NLS which is N-terminal of the Cas9 domain and a second NLS which is C-terminal of the Pol domain.
   21. A nucleic acid (e.g., DNA or RNA, e.g., mRNA) encoding the gene modifying polypeptide of any of the preceding embodiments.
   22. A cell comprising the gene modifying polypeptide of any of embodiments 1-20 or the nucleic acid of embodiment 21.
   23. A system comprising:
[0012] i) the gene modifying polypeptide of any of embodiments 1-20, and
[0013] ii) a template nucleic acid (e.g., a template RNA) that comprises:
   [0014] a) a gRNA spacer that is complementary to a portion a target nucleic acid sequence;
   [0015] b) a gRNA scaffold that binds the Cas domain of the gene modifying polypeptide;
   [0016] c) a heterologous object sequence; and
   [0017] d) a primer binding site sequence (PBS sequence).
      24. The system of embodiment 23, wherein the template nucleic acid comprises RNA.
      25. The system of embodiment 23 or 24, wherein the template nucleic acid comprises DNA.
      26. The system of any of embodiments 23-25, wherein the gRNA spacer and the gRNA scaffold comprise RNA.
      27. The system of any of embodiments 23-26, wherein the heterologous object sequence comprises DNA and PBS sequence comprise RNA.
      28. The system of any of embodiments 23-26, wherein the heterologous object sequence and PBS sequence comprise DNA.
      29. A method for modifying a target nucleic acid in a cell (e.g., a human cell), the method comprising contacting the cell with the system of any of embodiments 23-28, or nucleic acid encoding the same, thereby modifying the target nucleic acid.
      30. A method for treating a subject having a disease or condition associated with a genetic defect, the method comprising:
[0018] administering to the subject a system, polypeptide, template RNA or DNA encoding the same of any of the preceding embodiments, thereby treating the subject having a disease or condition associated with a genetic defect.
   31. The method of embodiment 30 wherein the disease or condition associated with a genetic defect is an indication listed in any of Tables 12-15 and/or wherein the genetic defect is a defect in a gene listed in any of Tables 12-15.
   32. The method of embodiment 30 or 31, wherein the subject is a human patient.

[0019] In one aspect, the disclosure relates to a system for modifying a gene comprising (a) a nucleic acid encoding a gene modifying polypeptide capable of target primed reverse transcription, the polypeptide comprising (i) a polymerase (Pol) domain and (ii) a Cas9 nickase that binds DNA and has endonuclease activity, and (b) a template RNA, DNA, or a hybrid having both ribonucleotide and deoxyribonucleotide residues in the same strand comprising (i) a gRNA spacer that is complementary to a first portion of the target gene, (ii) a gRNA scaffold that binds the polypeptide, (iii) a heterologous object sequence comprising a mutation region to modify the gene, and (iv) a primer binding site (PBS) sequence comprising at least 3, 4, 5, 6, 7, or 8 bases of 100% homology to a target DNA strand at the 3′ end of the template RNA.

[0020] The gRNA spacer may comprise at least 15 bases of 100% homology to the target DNA at the 5′ end of the template RNA. The template RNA may further comprise a PBS sequence comprising at least 5 bases of at least 80% homology to the target DNA strand. The template RNA may comprise one or more chemical modifications.

[0021] The domains of the gene modifying polypeptide may be joined by a peptide linker. The polypeptide may comprise one or more peptide linkers. The gene modifying polypeptide may further comprise a nuclear localization signal. The polypeptide may comprise more than one nuclear localization signal, e.g., multiple adjacent nuclear localization signals or one or more nuclear localization signals in different regions of the polypeptide, e.g., one or more nuclear localization signals in the N-terminus of the polypeptide and one or more nuclear localization signals in the C-terminus of the polypeptide. The nucleic acid encoding the gene modifying polypeptide may encode one or more intein domains.

[0022] Introduction of the system into a target cell may result in insertion of at least 1, 2, 3, 4, 5, 10, 15, 20, 25, 30, 35, 40, 45, 50, 60, 70, 80, 90, 100, 150, 200, 250, 300, 350, 400, 500, or 1000 base pairs of exogenous DNA. Introduction of the system into a target cell may result in deletion, wherein the deletion is less than 2, 3, 4, 5, 10, 50, or 100 base pairs of genomic DNA, upstream or downstream of the insertion. Introduction of the system into a target cell may result in substitution, e.g., substitution of 1, 2, or 3 nucleotides, e.g., consecutive nucleotides.

[0023] The heterologous object sequence may be at least 5, 10, 25, 50, 100, 150, 200, 250, 300, 400, 500, 600, or 700 base pairs.

[0024] In one aspect, the disclosure relates to a pharmaceutical composition comprising the system described above and a pharmaceutically acceptable excipient or carrier, wherein the pharmaceutically acceptable excipient or carrier is selected from the group consisting of a plasmid vector, a viral vector, a vesicle, and a lipid nanoparticle. In one aspect, the disclosure relates to a pharmaceutical composition comprising the system described above and multiple pharmaceutically acceptable excipients or carriers, wherein the pharmaceutically acceptable excipients or carriers are selected from the group consisting of a plasmid vector, a viral vector, a vesicle, and a lipid nanoparticle, e.g., where the system described above is delivered by two distinct excipients or carriers, e.g., two lipid nanoparticles, two viral vectors, or one lipid nanoparticle and one viral vector. The viral vector may be an adeno-associated virus (AAV).

[0025] In one aspect, the disclosure relates to a host cell (e.g., a mammalian cell, e.g., a human cell) comprising the system described above.

[0026] In one aspect, the disclosure relates to a method of correcting a mutation in the human gene in a cell, tissue or subject, the method comprising administering the system described above to the cell, tissue or subject. The system may be introduced in vivo, in vitro, ex vivo, or in situ. The nucleic acid of (a) may be integrated into the genome of the host cell. In some embodiments, the nucleic acid of (a) is not integrated into the genome of the host cell. In some embodiments, the heterologous object sequence is inserted at only one target site in the host cell genome. The heterologous object sequence may be inserted at two or more target sites in the host cell genome, e.g., at the same corresponding site in two homologous chromosomes or at two different sites on the same or different chromosomes. The heterologous object sequence may encode a mammalian polypeptide, or a fragment or a variant thereof. The components of the system may be delivered on 1, 2, 3, 4, or more distinct nucleic acid molecules. The system may be introduced into a host cell by electroporation or by using at least one vehicle selected from a plasmid vector, a viral vector, a vesicle, and a lipid nanoparticle.

### BRIEF DESCRIPTION OF THE DRAWINGS

[0027] FIG. 1 depicts a gene modifying system as described herein. The left hand diagram shows the gene modifying polypeptide, which comprises a Cas nickase domain (e.g., spCas9 N863A) and a Pol domain which are linked by a linker. The right hand diagram shows the template nucleic acid which comprises, from 5′ to 3′, a gRNA spacer, a gRNA scaffold, a heterologous object sequence, and a primer binding site sequence (PBS sequence). The heterologous object sequence can comprise a mutation region that comprises one or more sequence differences relative to the target site. The heterologous object sequence can also comprise a pre-edit homology region and a post-edit homology region, which flank the mutation region. Without wishing to be bound by theory, it is thought that the gRNA spacer of the template nucleic acid binds to the second strand of a target site in the genome, and the gRNA scaffold of the template nucleic acid binds to the gene modifying polypeptide, e.g., localizing the gene modifying polypeptide to the target site in the genome. It is thought that the Cas domain of the gene modifying polypeptide nicks the target site (e.g., the first strand of the target site), e.g., allowing the PBS sequence to bind to a sequence adjacent to the site to be altered on the first strand of the target site. It is thought that the Pol domain of the gene modifying polypeptide uses the first strand of the target site that is bound to the complementary sequence comprising the PBS sequence of the template nucleic acid as a primer and the heterologous object sequence of the template nucleic acid as a template to, e.g., polymerize a sequence complementary to the heterologous object sequence. Without wishing to be bound by theory, it is thought that DNA polymerization can then proceed through the pre-edit homology region, then through the mutation region, and then through the post-edit homology region, thereby producing a DNA strand comprising a mutation specified by the heterologous object sequence.

[0028] FIG. 2 is a diagram showing exemplary truncations of a human DNA polymerase theta.

[0029] FIGS. 3A-3B are a series of graphs showing editing activity by Cas-Pol gene modifying polypeptides for the indicated template nucleic acid molecules in HEK293 cells (FIG. 3A) and U2OS cells (FIG. 3B).

### DETAILED DESCRIPTION

### Definitions

[0030] The term “expression cassette,” as used herein, refers to a nucleic acid construct comprising nucleic acid elements sufficient for the expression of the nucleic acid molecule of the instant invention.

[0031] A “gRNA spacer,” as used herein, refers to a portion of a nucleic acid that has complementarity to a target nucleic acid and can, together with a gRNA scaffold, target a Cas protein to the target nucleic acid.

[0032] A “gRNA scaffold,” as used herein, refers to a portion of a nucleic acid that can bind a Cas protein and can, together with a gRNA spacer, target the Cas protein to the target nucleic acid. In some embodiments, the gRNA scaffold comprises a crRNA sequence, tetraloop, and tracrRNA sequence.

[0033] A “gene modifying polypeptide,” as used herein, refers to a polypeptide comprising a polymerase or retroviral reverse transcriptase, or a polypeptide comprising an amino acid sequence having at least 75%, 80%, 85%, 90%, 95%, 96%, 97%, 98%, or 99% amino acid sequence identity to a polymerase or retroviral reverse transcriptase, which is capable of integrating a nucleic acid sequence (e.g., a sequence provided on a template nucleic acid) into a target DNA molecule (e.g., in a mammalian host cell, such as a genomic DNA molecule in the host cell). In some embodiments, the gene modifying polypeptide is capable of integrating the sequence substantially without relying on host machinery. In some embodiments, the gene modifying polypeptide integrates a sequence into a random position in a genome, and in some embodiments, the gene modifying polypeptide integrates a sequence into a specific target site. In some embodiments, a gene modifying polypeptide includes one or more domains that, collectively, facilitate 1) binding the template nucleic acid, 2) binding the target DNA molecule, and 3) facilitate integration of the at least a portion of the template nucleic acid into the target DNA. Gene modifying polypeptides include both naturally occurring polypeptides as well as engineered variants of the foregoing, e.g., having one or more amino acid substitutions to the naturally occurring sequence. Gene modifying polypeptides also include heterologous constructs, e.g., where one or more of the domains recited above are heterologous to each other, whether through a heterologous fusion (or other conjugate) of otherwise wild-type domains, as well as fusions of modified domains, e.g., by way of replacement or fusion of a heterologous sub-domain or other substituted domain. Exemplary gene modifying polypeptides, and systems comprising them and methods of using them, that can be used in the methods provided herein are described, e.g., in PCT/US2021/020948, which is incorporated herein by reference with respect to gene modifying polypeptides that comprise a retroviral reverse transcriptase domain. In some embodiments, a gene modifying polypeptide integrates a sequence into a gene. In some embodiments, a gene modifying polypeptide integrates a sequence into a sequence outside of a gene. A “gene modifying system,” as used herein, refers to a system comprising a gene modifying polypeptide and a template nucleic acid.

[0034] The term “domain” as used herein refers to a structure of a biomolecule that contributes to a specified function of the biomolecule. A domain may comprise a contiguous region (e.g., a contiguous sequence) or distinct, non-contiguous regions (e.g., non-contiguous sequences) of a biomolecule. Examples of protein domains include, but are not limited to, an endonuclease domain, a DNA binding domain, a polymerase (Pol) domain, a recruitment domain, a reverse transcription domain; an example of a domain of a nucleic acid is a regulatory domain, such as a transcription factor binding domain. In some embodiments, a domain (e.g., a Cas domain) can comprise two or more smaller domains (e.g., a DNA binding domain and an endonuclease domain).

[0035] As used herein, the term “exogenous,” when used with reference to a biomolecule (such as a nucleic acid sequence or polypeptide) means that the biomolecule was introduced into a host genome, cell or organism by the hand of man. For example, a nucleic acid that is as added into an existing genome, cell, tissue or subject using recombinant DNA techniques or other methods is exogenous to the existing nucleic acid sequence, cell, tissue or subject.

[0036] As used herein, “first strand” and “second strand,” as used to describe the individual DNA strands of target DNA, distinguish the two DNA strands based upon which strand a Pol domain initiates polymerization, e.g., based upon where target primed synthesis initiates. The first strand refers to the strand of the target DNA upon which a Pol domain initiates polymerization, e.g., where target primed synthesis initiates. The second strand refers to the other strand of the target DNA. First and second strand designations do not describe the target site DNA strands in other respects; for example, in some embodiments the first and second strands are nicked by a polypeptide described herein, but the designations ‘first’ and ‘second’ strand have no bearing on the order in which such nicks occur.

[0037] A “genomic safe harbor site” (GSH site) is a site in a host genome that is able to accommodate the integration of new genetic material, e.g., such that the inserted genetic element does not cause significant alterations of the host genome posing a risk to the host cell or organism. A GSH site generally meets 1, 2, 3, 4, 5, 6, 7, 8 or 9 of the following criteria: (i) is located >300 kb from a cancer-related gene; (ii) is >300 kb from a miRNA/other functional small RNA; (iii) is >50 kb from a 5′ gene end; (iv) is >50 kb from a replication origin; (v) is >50 kb away from any ultraconservered element; (vi) has low transcriptional activity (i.e. no mRNA+/−25 kb); (vii) is not in a copy number variable region; (viii) is in open chromatin; and/or (ix) is unique, with 1 copy in the human genome. Examples of GSH sites in the human genome that meet some or all of these criteria include (i) the adeno-associated virus site 1 (AAVS1), a naturally occurring site of integration of AAV virus on chromosome 19; (ii) the chemokine (C—C motif) receptor 5 (CCR5) gene, a chemokine receptor gene known as an HIV-1 coreceptor; (iii) the human ortholog of the mouse Rosa26 locus; (iv) the ribosomal DNA (“rDNA”) locus. Additional GSH sites are known and described, e.g., in Pellenz et al. epub Aug. 20, 2018 (https://doi.org/10.1101/396390).

[0038] The term “heterologous,” as used herein to describe a first element in reference to a second element means that the first element and second element do not exist in nature disposed as described. For example, a heterologous polypeptide, nucleic acid molecule, construct or sequence refers to (a) a polypeptide, nucleic acid molecule or portion of a polypeptide or nucleic acid molecule sequence that is not native to a cell in which it is expressed, (b) a polypeptide or nucleic acid molecule or portion of a polypeptide or nucleic acid molecule that has been altered or mutated relative to its native state, or (c) a polypeptide or nucleic acid molecule with an altered expression as compared to the native expression levels under similar conditions. For example, a heterologous regulatory sequence (e.g., promoter, enhancer) may be used to regulate expression of a gene or a nucleic acid molecule in a way that is different than the gene or a nucleic acid molecule is normally expressed in nature. In another example, a heterologous domain of a polypeptide or nucleic acid sequence (e.g., a DNA binding domain of a polypeptide or nucleic acid encoding a DNA binding domain of a polypeptide) may be disposed relative to other domains or may be a different sequence or from a different source, relative to other domains or portions of a polypeptide or its encoding nucleic acid. In certain embodiments, a heterologous nucleic acid molecule may exist in a native host cell genome, but may have an altered expression level or have a different sequence or both. In other embodiments, heterologous nucleic acid molecules may not be endogenous to a host cell or host genome but instead may have been introduced into a host cell by transformation (e.g., transfection, electroporation), wherein the added molecule may integrate into the host genome or can exist as extra-chromosomal genetic material either transiently (e.g., mRNA) or semi-stably for more than one generation (e.g., episomal viral vector, plasmid or other self-replicating vector).

[0039] As used herein, “insertion” of a sequence into a target site refers to the net addition of DNA sequence at the target site, e.g., where there are new nucleotides in the heterologous object sequence with no cognate positions in the unedited target site. In some embodiments, a nucleotide alignment of the PBS sequence and heterologous object sequence to the target nucleic acid sequence would result in an alignment gap in the target nucleic acid sequence.

[0040] As used herein, a “deletion” generated by a heterologous object sequence in a target site refers to the net deletion of DNA sequence at the target site, e.g., where there are nucleotides in the unedited target site with no cognate positions in the heterologous object sequence. In some embodiments, a nucleotide alignment of the PBS sequence and heterologous object sequence to the target nucleic acid sequence would result in an alignment gap in the molecule comprising the PBS sequence and heterologous object sequence.

[0041] The term “inverted terminal repeats” or “ITRs” as used herein refers to AAV viral cis-elements named so because of their symmetry. These elements promote efficient multiplication of an AAV genome. It is hypothesized that the minimal elements for ITR function are a Rep-binding site (RBS; 5′-GCGCGCTCGCTCGCTC-3′ (SEQ ID NO: 4424) for AAV2) and a terminal resolution site (TRS; 5′-AGTTGG-3′ for AAV2) plus a variable palindromic sequence allowing for hairpin formation. According to the present invention, an ITR comprises at least these three elements (RBS, TRS, and sequences allowing the formation of a hairpin). In addition, in the present invention, the term “ITR” refers to ITRs of known natural AAV serotypes (e.g. ITR of a serotype 1, 2, 3, 4, 5, 6, 7, 8, 9, 10 or 11 AAV), to chimeric ITRs formed by the fusion of ITR elements derived from different serotypes, and to functional variants thereof. “Functional variant” refers to a sequence presenting a sequence identity of at least 80%, 85%, 90%, preferably of at least 95% with a known ITR and allowing multiplication of the sequence that includes said ITR in the presence of Rep proteins.

[0042] The term “mutation region,” as used herein, refers to a region in a template nucleic acid having one or more sequence difference relative to the corresponding sequence in a target nucleic acid. The sequence difference may comprise, for example, a substitution, insertion, frameshift, or deletion.

[0043] The term “mutated” when applied to nucleic acid sequences means that nucleotides in a nucleic acid sequence are inserted, deleted, or changed compared to a reference (e.g., native) nucleic acid sequence. A single alteration may be made at a locus (a point mutation), or multiple nucleotides may be inserted, deleted, or changed at a single locus. In addition, one or more alterations may be made at any number of loci within a nucleic acid sequence. A nucleic acid sequence may be mutated by any method known in the art.

[0044] “Nucleic acid molecule” refers to both RNA and DNA molecules including, without limitation, complementary DNA (“cDNA”), genomic DNA (“gDNA”), and messenger RNA (“mRNA”), and also includes synthetic nucleic acid molecules, such as those that are chemically synthesized or recombinantly produced, such as RNA templates, as described herein. The nucleic acid molecule can be double-stranded or single-stranded, circular, or linear. If single-stranded, the nucleic acid molecule can be the sense strand or the antisense strand. Unless otherwise indicated, and as an example for all sequences described herein under the general format “SEQ ID NO:,” “nucleic acid comprising SEQ ID NO:1” refers to a nucleic acid, at least a portion which has either (i) the sequence of SEQ ID NO:1, or (ii) a sequence complimentary to SEQ ID NO:1. The choice between the two is dictated by the context in which SEQ ID NO: 1 is used. For instance, if the nucleic acid is used as a probe, the choice between the two is dictated by the requirement that the probe be complementary to the desired target. Nucleic acid sequences of the present disclosure may be modified chemically or biochemically or may contain non-natural or derivatized nucleotide bases, as will be readily appreciated by those of skill in the art. Such modifications include, for example, labels, methylation, substitution of one or more naturally occurring nucleotides with an analog, inter-nucleotide modifications such as uncharged linkages (for example, methyl phosphonates, phosphotriesters, phosphoramidates, carbamates, etc.), charged linkages (for example, phosphorothioates, phosphorodithioates, etc.), pendant moieties, (for example, polypeptides), intercalators (for example, acridine, psoralen, etc.), chelators, alkylators, and modified linkages (for example, alpha anomeric nucleic acids, etc.). Also included are chemically modified bases (see, for example, Table 9, infra), backbones (see, for example, Table 10, infra), and modified caps (see, for example, Table 11, infra). Also included are synthetic molecules that mimic polynucleotides in their ability to bind to a designated sequence via hydrogen bonding and other chemical interactions. Such molecules are known in the art and include, for example, those in which peptide linkages substitute for phosphate linkages in the backbone of a molecule, e.g., peptide nucleic acids (PNAs). Other modifications can include, for example, analogs in which the ribose ring contains a bridging moiety or other structure such as modifications found in “locked” nucleic acids (LNAs). In various embodiments, the nucleic acids are in operative association with additional genetic elements, such as tissue-specific expression-control sequence(s) (e.g., tissue-specific promoters and tissue-specific microRNA recognition sequences), as well as additional elements, such as inverted repeats (e.g., inverted terminal repeats, such as elements from or derived from viruses, e.g., AAV ITRs) and tandem repeats, inverted repeats/direct repeats, homology regions (segments with various degrees of homology to a target DNA), untranslated regions (UTRs) (5′, 3′, or both 5′ and 3′ UTRs), and various combinations of the foregoing. The nucleic acid elements of the systems provided by the invention can be provided in a variety of topologies, including single-stranded, double-stranded, circular, linear, linear with open ends, linear with closed ends, and particular versions of these, such as doggybone DNA (dbDNA), closed-ended DNA (ceDNA).

[0045] As used herein, a “gene expression unit” is a nucleic acid sequence comprising at least one regulatory nucleic acid sequence operably linked to at least one effector sequence. A first nucleic acid sequence is operably linked with a second nucleic acid sequence when the first nucleic acid sequence is placed in a functional relationship with the second nucleic acid sequence. For instance, a promoter or enhancer is operably linked to a coding sequence if the promoter or enhancer affects the transcription or expression of the coding sequence. Operably linked DNA sequences may be contiguous or non-contiguous. Where necessary to join two protein-coding regions, operably linked sequences may be in the same reading frame.

[0046] The terms “host genome” or “host cell,” as used herein, refer to a cell and/or its genome into which protein and/or genetic material has been introduced. It should be understood that such terms are intended to refer not only to the particular subject cell and/or genome, but to the progeny of such a cell and/or the genome of the progeny of such a cell. Because certain modifications may occur in succeeding generations due to either mutation or environmental influences, such progeny may not, in fact, be identical to the parent cell, but are still included within the scope of the term “host cell” as used herein. A host genome or host cell may be an isolated cell or cell line grown in culture, or genomic material isolated from such a cell or cell line, or may be a host cell or host genome which composing living tissue or an organism. In some instances, a host cell may be an animal cell or a plant cell, e.g., as described herein. In certain instances, a host cell may be a mammalian cell, a human cell, avian cell, reptilian cell, bovine cell, horse cell, pig cell, goat cell, sheep cell, chicken cell, or turkey cell. In certain instances, a host cell may be a corn cell, soy cell, wheat cell, or rice cell.

[0047] As used herein, “operative association” describes a functional relationship between two nucleic acid sequences, such as a 1) promoter and 2) a heterologous object sequence, and means, in such example, the promoter and heterologous object sequence (e.g., a gene of interest) are oriented such that, under suitable conditions, the promoter drives expression of the heterologous object sequence. For instance, a template nucleic acid carrying a promoter and a heterologous object sequence may be single-stranded, e.g., either the (+) or (−) orientation. An “operative association” between the promoter and the heterologous object sequence in this template means that, regardless of whether the template nucleic acid will be transcribed in a particular state, when it is in the suitable state (e.g., is in the (+) orientation, in the presence of required catalytic factors, and NTPs, etc.), it is accurately transcribed. Operative association applies analogously to other pairs of nucleic acids, including other tissue-specific expression control sequences (such as enhancers, repressors and microRNA recognition sequences), IR/DR, ITRs, UTRs, or homology regions and heterologous object sequences or sequences encoding a retroviral RT domain.

[0048] The term “primer binding site sequence” or “PBS sequence,” as used herein, refers to a portion of a template nucleic acid capable of binding to a region comprised in a target nucleic acid sequence. In some instances, a PBS sequence is a nucleic acid sequence comprising at least 3, 4, 5, 6, 7, or 8 bases with 100% identity to the region comprised in the target nucleic acid sequence. In some embodiments the primer region comprises at least 5, 6, 7, 8 bases with 100% identity to the region comprised in the target nucleic acid sequence. Without wishing to be bound by theory, in some embodiments when a template nucleic acid comprises a PBS sequence and a heterologous object sequence, the PBS sequence binds to a region comprised in a target nucleic acid sequence, allowing a Pol domain to use that region as a primer for DNA polymerization, and to use the heterologous object sequence as a template.

[0049] As used herein, a “stem-loop sequence” refers to a nucleic acid sequence (e.g., RNA sequence) with sufficient self-complementarity to form a stem-loop, e.g., having a stem comprising at least two (e.g., 3, 4, 5, 6, 7, 8, 9, or 10) base pairs, and a loop with at least three (e.g., four) base pairs. The stem may comprise mismatches or bulges.

[0050] As used herein, a “tissue-specific expression-control sequence” means nucleic acid elements that increase or decrease the level of a transcript comprising the heterologous object sequence in a target tissue in a tissue-specific manner, e.g., preferentially in on-target tissue(s), relative to off-target tissue(s). In some embodiments, a tissue-specific expression-control sequence preferentially drives or represses transcription, activity, or the half-life of a transcript comprising the heterologous object sequence in the target tissue in a tissue-specific manner, e.g., preferentially in an on-target tissue(s), relative to an off-target tissue(s). Exemplary tissue-specific expression-control sequences include tissue-specific promoters, repressors, enhancers, or combinations thereof, as well as tissue-specific microRNA recognition sequences. Tissue specificity refers to on-target (tissue(s) where expression or activity of the template nucleic acid is desired or tolerable) and off-target (tissue(s) where expression or activity of the template nucleic acid is not desired or is not tolerable). For example, a tissue-specific promoter drives expression preferentially in on-target tissues, relative to off-target tissues. In contrast, a microRNA that binds the tissue-specific microRNA recognition sequences is preferentially expressed in off-target tissues, relative to on-target tissues, thereby reducing expression of a template nucleic acid in off-target tissues. Accordingly, a promoter and a microRNA recognition sequence that are specific for the same tissue, such as the target tissue, have contrasting functions (promote and repress, respectively, with concordant expression levels, i.e., high levels of the microRNA in off-target tissues and low levels in on-target tissues, while promoters drive high expression in on-target tissues and low expression in off-target tissues) with regard to the transcription, activity, or half-life of an associated sequence in that tissue.

Table of Contents

```
1) Introduction
2) Gene modifying systems
  a) Polypeptide components of gene modifying systems
    i) Writing domain
    ii) Endonuclease domains and DNA binding domains
      (1) Gene modifying polypeptides comprising Cas domains
      (2) TAL Effectors and Zinc Finger Nucleases
    iii) Linkers
    iv) Localization sequences for gene modifying systems
    v) Evolved Variants of Gene modifying Polypeptides and Systems
    vi) Inteins
    vii) Additional domains
  b) Template nucleic acids
    i) gRNA spacer and gRNA scaffold
    ii) Heterologous object sequence
    iii) PBS sequence
    iv) Exemplary Template Sequences
  c) gRNAs with inducible activity
  d) Circular RNAs and Ribozymes in Gene modifying Systems
  e) Target Nucleic Acid Site
  f) Second strand nicking
3) Production of Compositions and Systems
4) Applications
  a) Therapeutic Applications
  b) Application to Plants
5) Administration and Delivery
  a) Tissue Specific Activity/Administration
    i) Promoters
    ii) microRNAs
  b) Viral vectors and components thereof
  c) AAV Administration
  d) Lipid Nanoparticles
6) Kits, Articles of Manufacture, and Pharmaceutical Compositions
7) Chemistry, Manufacturing, and Controls (CMC)
```

### Introduction

[0051] This disclosure relates to compositions, systems, and methods for targeting, editing, modifying, or manipulating a DNA sequence (e.g., inserting a heterologous object sequence into a target site of a mammalian genome) at one or more locations in a DNA sequence in a cell, tissue or subject, e.g., in vivo, or in vitro. The heterologous object DNA sequence may include, e.g., a substitution, a deletion, an insertion, e.g., a coding sequence, a regulatory sequence, or a gene expression unit.

[0052] More specifically, the disclosure provides DNA polymerase (Pol) based systems for altering a genomic DNA sequence of interest, e.g., by inserting, deleting, or substituting one or more nucleotides into/from the sequence of interest.

[0053] Fusions of a Cas9-related functionality to a polymerase functionality may be used to drive modifications to genomic DNA. The polymerase functionality may be, e.g., a DNA polymerase that synthesizes DNA from a nucleic acid template. The nucleic acid template may be, for example, DNA or RNA. In the case of a DNA polymerase that can use an RNA template, e.g., an RNA-dependent DNA polymerase, e.g., a reverse transcriptase, the gene modifying polypeptide component may be provided with a template RNA such as described above. One such example is DNA polymerase θ (encoded by POLQ, the polypeptide product of which may be referred to herein as “POLQ” or “Pole”), a eukaryotic DNA polymerase that has been shown to use either DNA or RNA as a template. Chandramouly et al. 2021 (DOI: 10.1126/sciadv.abf1771). A Cas9 functionality fused (optionally through a linker) to POLQ (or a component of POLQ) can therefore be used as a driver for genome modification when administered to an organism or to cells with a template RNA that targets the genomic site desired for modification (via the gRNA spacer), recruits the Cas9 functionality (via the gRNA scaffold), and primes and templates DNA synthesis (via the template RNA).

[0054] The disclosure provides, in part, gene modifying systems comprising a gene modifying polypeptide component and a template nucleic acid (e.g., template RNA) component. In some embodiments, a gene modifying system can be used to introduce an alteration into a target site in a genome. In some embodiments, the gene modifying polypeptide component comprises a writing domain (e.g., a reverse transcriptase domain), a DNA-binding domain, and an endonuclease domain (e.g., nickase domain). In some embodiments, the template nucleic acid (e.g., template RNA) comprises a sequence (e.g., a gRNA spacer) that binds a target site in the genome (e.g., that binds to a second strand of the target site), a sequence (e.g., a gRNA scaffold) that binds the gene modifying polypeptide component, a heterologous object sequence, and a PBS sequence. Without wishing to be bound by theory, it is thought that the template nucleic acid (e.g., template RNA) binds to the second strand of a target site in the genome, and binds to the gene modifying polypeptide component (e.g., localizing the polypeptide component to the target site in the genome). It is thought that the endonuclease (e.g., nickase) of the gene modifying polypeptide component cuts the target site (e.g., the first strand of the target site), e.g., allowing the PBS sequence to bind to a sequence adjacent to the site to be altered on the first strand of the target site. It is thought that the writing domain (e.g., reverse transcriptase domain) of the polypeptide component uses the first strand of the target site that is bound to the complementary sequence comprising the PBS sequence of the template nucleic acid as a primer and the heterologous object sequence of the template nucleic acid as a template to, e.g., polymerize a sequence complementary to the heterologous object sequence. Without wishing to be bound by theory, it is thought that selection of an appropriate heterologous object sequence can result in substitution, deletion, and/or insertion of one or more nucleotides at the target site.

### Gene Modifying Systems

[0055] In some embodiments, a gene modifying system described herein comprises: (A) a gene modifying polypeptide or a nucleic acid encoding the gene modifying polypeptide, wherein the gene modifying polypeptide comprises (i) a reverse transcriptase domain, and either (x) an endonuclease domain that contains DNA binding functionality or (y) an endonuclease domain and separate DNA binding domain; and (B) a template RNA. A gene modifying polypeptide, in some embodiments, acts as a substantially autonomous protein machine capable of integrating a template nucleic acid sequence into a target DNA molecule (e.g., in a mammalian host cell, such as a genomic DNA molecule in the host cell), substantially without relying on host machinery. For example, the gene modifying protein may comprise a DNA-binding domain, a reverse transcriptase domain, and an endonuclease domain. In some embodiments, the DNA-binding function may involve an RNA component that directs the protein to a DNA sequence, e.g., a gRNA spacer. In other embodiments, the gene modifying polypeptide may comprise a reverse transcriptase domain and an endonuclease domain. The RNA template element of a gene modifying system is typically heterologous to the gene modifying polypeptide element and provides an object sequence to be inserted (reverse transcribed) into the host genome. In some embodiments, the gene modifying polypeptide is capable of target primed reverse transcription. In some embodiments, the gene modifying polypeptide is capable of second-strand synthesis.

[0056] In some embodiments the gene modifying system is combined with a second polypeptide. In some embodiments, the second polypeptide may comprise an endonuclease domain. In some embodiments, the second polypeptide may comprise a polymerase domain, e.g., a reverse transcriptase domain. In some embodiments, the second polypeptide may comprise a DNA-dependent DNA polymerase domain. In some embodiments, the second polypeptide aids in completion of the genome edit, e.g., by contributing to second-strand synthesis or DNA repair resolution.

[0057] A functional gene modifying polypeptide can be made up of unrelated DNA binding, reverse transcription, and endonuclease domains. This modular structure allows combining of functional domains, e.g., dCas9 (DNA binding), MMLV reverse transcriptase (reverse transcription), FokI (endonuclease). In some embodiments, multiple functional domains may arise from a single protein, e.g., Cas9 or Cas9 nickase (DNA binding, endonuclease).

[0058] In some embodiments, a gene modifying polypeptide includes one or more domains that, collectively, facilitate 1) binding the template nucleic acid, 2) binding the target DNA molecule, and 3) facilitate integration of the at least a portion of the template nucleic acid into the target DNA. In some embodiments, the gene modifying polypeptide is an engineered polypeptide that comprises one or more amino acid substitutions to a corresponding naturally occurring sequence. In some embodiments, the gene modifying polypeptide comprises two or more domains that are heterologous relative to each other, e.g., through a heterologous fusion (or other conjugate) of otherwise wild-type domains, or well as fusions of modified domains, e.g., by way of replacement or fusion of a heterologous sub-domain or other substituted domain. For instance, in some embodiments, one or more of: the RT domain is heterologous to the DBD; the DBD is heterologous to the endonuclease domain; or the RT domain is heterologous to the endonuclease domain.

[0059] In some embodiments, a template RNA molecule for use in the system comprises, from 5′ to 3′ (1) a gRNA spacer; (2) a gRNA scaffold; (3) heterologous object sequence (4) a primer binding site (PBS) sequence. In some embodiments:
[0060] (1) Is a gRNA spacer of ˜18-22 nt, e.g., is 20 nt
[0061] (2) Is a gRNA scaffold comprising one or more hairpin loops, e.g., 1, 2, of 3 loops for associating the template with a Cas domain, e.g., a nickase Cas9 domain. In some embodiments, the gRNA scaffold comprises the sequence, from 5′ to 3′,

(SEQ ID NO: 4008)
GTTTTAGAGCTAGAAATAGCAAGTTAAAATAAGGCTAGTCCGTTATCAA
CTTGAAAAAGTGGGACCGAGTCGGTCC.

[0062] (3) In some embodiments, the heterologous object sequence is, e.g., 7-74, e.g., 10-20, 20-30, 30-40, 40-50, 50-60, 60-70, or 70-80 nt or, 80-90 nt in length. In some embodiments, the first (most 5′) base of the sequence is not C.
[0063] (4) In some embodiments, the PBS sequence that binds the target priming sequence after nicking occurs is e.g., 3-20 nt, e.g., 7-15 nt, e.g., 12-14 nt. In some embodiments, the PBS sequence has 40-60% GC content.

[0064] In some embodiments, a second gRNA associated with the system may help drive complete integration. In some embodiments, the second gRNA may target a location that is 0-200 nt away from the first-strand nick, e.g., 0-50, 50-100, 100-200 nt away from the first-strand nick. In some embodiments, the second gRNA can only bind its target sequence after the edit is made, e.g., the gRNA binds a sequence present in the heterologous object sequence, but not in the initial target sequence.

[0065] In some embodiments, a gene modifying system described herein is used to make an edit in HEK293, K562, U2OS, or HeLa cells. In some embodiment, a gene modifying system is used to make an edit in primary cells, e.g., primary cortical neurons from E18.5 mice.

[0066] In some embodiments, a gene modifying polypeptide as described herein comprises a reverse transcriptase or RT domain (e.g., as described herein) that comprises a MoMLV RT sequence or variant thereof. In embodiments, the MoMLV RT sequence comprises one or more mutations selected from D200N, L603W, T330P, T306K, W313F, D524G, E562Q, D583N, P51L, S67R, E67K, T197A, H204R, E302K, F309N, L435G, N454K, H594Q, D653N, R110S, and K103L. In embodiments, the MoMLV RT sequence comprises a combination of mutations, such as D200N, L603W, and T330P, optionally further including T306K and/or W313F.

[0067] In some embodiments, an endonuclease domain (e.g., as described herein) comprises nCAS9, e.g., comprising the H840A mutation.

[0068] In some embodiments, the heterologous object sequence (e.g., of a system as described herein) is about 1-50, 50-100, 100-200, 200-300, 300-400, 400-500, 500-600, 600-700, 700-800, 800-900, 900-1000, or more, nucleotides in length.

[0069] In some embodiments, the RT and endonuclease domains are joined by a flexible linker, e.g., comprising the amino acid sequence SGGSSGGSSGSETPGTSESATPESSGGSSGGSS (SEQ ID NO: 4006).

[0070] In some embodiments, the endonuclease domain is N-terminal relative to the RT domain. In some embodiments, the endonuclease domain is C-terminal relative to the RT domain.

[0071] In some embodiments, the system incorporates a heterologous object sequence into a target site by TPRT, e.g., as described herein.

[0072] In some embodiments, a gene modifying polypeptide comprises a DNA binding domain. In some embodiments, a gene modifying polypeptide comprises an RNA binding domain. In some embodiments, the RNA binding domain comprises an RNA binding domain of B-box protein, MS2 coat protein, dCas, or an element of a sequence of a table herein. In some embodiments, the RNA binding domain is capable of binding to a template RNA with greater affinity than a reference RNA binding domain.

[0073] In some embodiments, a gene modifying system is capable of producing an insertion into the target site of at least 45, 50, 55, 60, 65, 70, 75, 80, 85, 90, 95, or 100 nucleotides (and optionally no more than 500, 400, 300, 200, or 100 nucleotides). In some embodiments, a gene modifying system is capable of producing an insertion into the target site of at least 1, 2, 3, 4, 5, 6, 7, 8, 9, 10, 15, 20, 25, 30, 35, 40, 45, 50, 55, 60, 65, 70, 75, 80, 85, 90, 95, or 100 nucleotides (and optionally no more than 500, 400, 300, 200, or 100 nucleotides). In some embodiments, a gene modifying system is capable of producing an insertion into the target site of at least 0.2, 0.3, 0.4, 0.5, 0.6, 0.7, 0.8, 0.9, 1, 1.5, 2, 2.5, 3, 3.5, 4, 4.5, 5, 5.5, 6, 6.5, 7, 7.5, 8, 8.5, 9, 9.5 or 10 kilobases (and optionally no more than 1, 5, 10, or 20 kilobases). In some embodiments, a gene modifying system is capable of producing a deletion of at least 81, 85, 90, 95, 100, 110, 120, 130, 140, 150, 160, 170, 180, 190, or 200 nucleotides (and optionally no more than 500, 400, 300, or 200 nucleotides). In some embodiments, a gene modifying system is capable of producing a deletion of at least 81, 85, 90, 95, 100, 110, 120, 130, 140, 150, 160, 170, 180, 190, or 200 nucleotides (and optionally no more than 500, 400, 300, or 200 nucleotides). In some embodiments, a gene modifying system is capable of producing a deletion of at least 1, 2, 3, 4, 5, 6, 7, 8, 9, 10, 15, 20, 25, 30, 35, 40, 45, 50, 55, 60, 65, 70, 75, 80, 85, 90, 95, 100, 110, 120, 130, 140, 150, 160, 170, 180, 190, or 200 nucleotides (and optionally no more than 500, 400, 300, or 200 nucleotides). In some embodiments, a gene modifying system is capable of producing a deletion of at least 0.2, 0.3, 0.4, 0.5, 0.6, 0.7, 0.8, 0.9, 1, 1.5, 2, 2.5, 3, 3.5, 4, 4.5, 5, 5.5, 6, 6.5, 7, 7.5, 8, 8.5, 9, 9.5 or 10 kilobases (and optionally no more than 1, 5, 10, or 20 kilobases). In some embodiments, a gene modifying system is capable of producing a substitution into the target site of at least 1, 2, 3, 4, 5, 6, 7, 8, 9, 10, 15, 20, 25, 30, 35, 40, 45, 50, 60, 70, 80, 90, or 100 or more nucleotides. In some embodiments, a gene modifying system is capable of producing a substitution in the target site of 1-2, 2-3, 3-4, 4-5, 5-10, 10-15, 15-20, 20-30, 30-40, 40-50, 50-60, 60-70, 70-80, 80-90, or 90-100 nucleotides.

[0074] In some embodiments, the substitution is a transition mutation. In some embodiments, the substitution is a transversion mutation. In some embodiments, the substitution converts an adenine to a thymine, an adenine to a guanine, an adenine to a cytosine, a guanine to a thymine, a guanine to a cytosine, a guanine to an adenine, a thymine to a cytosine, a thymine to an adenine, a thymine to a guanine, a cytosine to an adenine, a cytosine to a guanine, or a cytosine to a thymine.

[0075] In some embodiments, an insertion, deletion, substitution, or combination thereof, increases or decreases expression (e.g. transcription or translation) of a gene. In some embodiments, an insertion, deletion, substitution, or combination thereof, increases or decreases expression (e.g. transcription or translation) of a gene by altering, adding, or deleting sequences in a promoter or enhancer, e.g. sequences that bind transcription factors. In some embodiments, an insertion, deletion, substitution, or combination thereof alters translation of a gene (e.g. alters an amino acid sequence), inserts or deletes a start or stop codon, alters or fixes the translation frame of a gene. In some embodiments, an insertion, deletion, substitution, or combination thereof alters splicing of a gene, e.g. by inserting, deleting, or altering a splice acceptor or donor site. In some embodiments, an insertion, deletion, substitution, or combination thereof alters transcript or protein half-life. In some embodiments, an insertion, deletion, substitution, or combination thereof alters protein localization in the cell (e.g. from the cytoplasm to a mitochondria, from the cytoplasm into the extracellular space (e.g. adds a secretion tag)). In some embodiments, an insertion, deletion, substitution, or combination thereof alters (e.g. improves) protein folding (e.g. to prevent accumulation of misfolded proteins). In some embodiments, an insertion, deletion, substitution, or combination thereof, alters, increases, decreases the activity of a gene, e.g. a protein encoded by the gene.

[0076] Exemplary gene modifying polypeptides, and systems comprising them and methods of using them are described, e.g., in PCT/US2021/020948, which is incorporated herein by reference with respect to retroviral RT domains, including the amino acid and nucleic acid sequences therein.

[0077] Exemplary gene modifying polypeptides and retroviral RT domain sequences are also described, e.g., in International Application No. PCT/US21/20948 filed Mar. 4, 2021, e.g., at Table 30, Table 31, and Table 44 therein; the entire application is incorporated by reference herein with respect to retroviral RTs, e.g., in said sequences and tables. Accordingly, a gene modifying polypeptide described herein may comprise an amino acid sequence according to any of the Tables mentioned in this paragraph, or a domain thereof (e.g., a retroviral RT domain), or a functional fragment or variant of any of the foregoing, or an amino acid sequence having at least 70%, 80%, 85%, 90%, 95%, or 99% identity thereto.

[0078] In some embodiments, a polypeptide for use in any of the systems described herein can be a molecular reconstruction or ancestral reconstruction based upon the aligned polypeptide sequence of multiple homologous proteins. In some embodiments, a reverse transcriptase domain for use in any of the systems described herein can be a molecular reconstruction or an ancestral reconstruction, or can be modified at particular residues, based upon alignments of reverse transcriptase domains from the same or different sources. A skilled artisan can, based on the Accession numbers provided herein, align polypeptides or nucleic acid sequences, e.g., by using routine sequence analysis tools as Basic Local Alignment Search Tool (BLAST) or CD-Search for conserved domain analysis. Molecular reconstructions can be created based upon sequence consensus, e.g. using approaches described in Ivics et al., Cell 1997, 501-510; Wagstaff et al., Molecular Biology and Evolution 2013, 88-99.

### Polypeptide Components of Gene Modifying Systems

[0079] In some embodiments, the gene modifying polypeptide possesses the functions of DNA target site binding, template nucleic acid (e.g., RNA) binding, DNA target site cleavage, and template nucleic acid (e.g., RNA) writing, e.g., reverse transcription. In some embodiments, each function is contained within a distinct domain. In some embodiments, a function may be attributed to two or more domains (e.g., two or more domains, together, exhibit the functionality). In some embodiments, two or more domains may have the same or similar function (e.g., two or more domains each independently have DNA-binding functionality, e.g., for two different DNA sequences). In other embodiments, one or more domains may be capable of enabling one or more functions, e.g., a Cas9 domain enabling both DNA binding and target site cleavage. In some embodiments, the domains are all located within a single polypeptide. In some embodiments, a first domain is in one polypeptide and a second domain is in a second polypeptide. For example, in some embodiments, the sequences may be split between a first polypeptide and a second polypeptide, e.g., wherein the first polypeptide comprises a reverse transcriptase (RT) domain and wherein the second polypeptide comprises a DNA-binding domain and an endonuclease domain, e.g., a nickase domain. As a further example, in some embodiments, the first polypeptide and the second polypeptide each comprise a DNA binding domain (e.g., a first DNA binding domain and a second DNA binding domain). In some embodiments, the first and second polypeptide may be brought together post-translationally via a split-intein to form a single gene modifying polypeptide.

[0080] In some aspects, a gene modifying polypeptide described herein comprises (e.g., a system described herein comprises a gene modifying polypeptide that comprises): 1) a Cas domain (e.g., a Cas nickase domain, e.g., a Cas9 nickase domain); 2) a reverse transcriptase (RT) domain of Table D, or a sequence having at least 70%, 75%, 80%, 85%, 90%, 95%, 97%, 98%, or 99% identity thereto, wherein the RT domain is C-terminal of the Cas domain; and a linker disposed between the RT domain and the Cas domain, wherein the linker has a sequence from the same row of Table D as the RT domain, or a sequence having at least 70%, 75%, 80%, 85%, 90%, 95%, 97%, 98%, or 99% identity thereto.

[0081] In some embodiments, the RT domain has a sequence with 100% identity to the RT domain of Table D and the linker has a sequence with 100% identity to the linker sequence from the same row of Table D as the RT domain. In some embodiments, the Cas domain comprises a sequence of Table 4, or a sequence having at least 70%, 75%, 80%, 85%, 90%, 95%, 98%, or 99% identity thereto. In some embodiments, the gene modifying polypeptide comprises an amino acid sequence according to any of SEQ ID NOs: 1-3332 in the sequence listing, or a sequence having at least 70%, 75%, 80%, 85%, 90%, 95%, 97%, 98%, or 99% identity thereto.

[0082] In some embodiments, the gene modifying polypeptide comprises a GG amino acid sequence between the Cas domain and the linker, an AG amino acid sequence between the RT domain and the second NLS, and/or a GG amino acid sequence between the linker and the RT domain. In some embodiments, the gene modifying polypeptide comprises a sequence of SEQ ID NO: 4000 which comprises the first NLS and the Cas domain, or a sequence having at least 70%, 75%, 80%, 85%, 90%, 95%, 98%, or 99% identity thereto. In some embodiments, the gene modifying polypeptide comprises a sequence of SEQ ID NO: 4001 which comprises the second NLS, or a sequence having at least 70%, 75%, 80%, 85%, 90%, 95%, 98%, or 99% identity thereto.

### Exemplary N-Terminal NLS-Cas9 Domain

(SEQ ID NO: 4000)
MPAAKRVKLDGGDKKYSIGLDIGTNSVGWAVITDEYKVPSKKFKVLGNTDRHSIKKNLIGALLF
DSGETAEATRLKRTARRRYTRRKNRICYLQEIFSNEMAKVDDSFFHRLEESFLVEEDKKHERHP
IFGNIVDEVAYHEKYPTIYHLRKKLVDSTDKADLRLIYLALAHMIKFRGHFLIEGDLNPDNSDV
DKLFIQLVQTYNQLFEENPINASGVDAKAILSARLSKSRRLENLIAQLPGEKKNGLFGNLIALS
LGLTPNFKSNFDLAEDAKLQLSKDTYDDDLDNLLAQIGDQYADLFLAAKNLSDAILLSDILRVN
TEITKAPLSASMIKRYDEHHQDLTLLKALVRQQLPEKYKEIFFDQSKNGYAGYIDGGASQEEFY
KFIKPILEKMDGTEELLVKLNREDLLRKQRTFDNGSIPHQIHLGELHAILRRQEDFYPFLKDNR
EKIEKILTFRIPYYVGPLARGNSRFAWMTRKSEETITPWNFEEVVDKGASAQSFIERMINFDKN
LPNEKVLPKHSLLYEYFTVYNELTKVKYVTEGMRKPAFLSGEQKKAIVDLLFKTNRKVTVKQLK
EDYFKKIECFDSVEISGVEDRFNASLGTYHDLLKIIKDKDFLDNEENEDILEDIVLILTLFEDR
EMIEERLKTYAHLFDDKVMKQLKRRRYTGWGRLSRKLINGIRDKQSGKTILDFLKSDGFANRNF
MQLIHDDSLTFKEDIQKAQVSGQGDSLHEHIANLAGSPAIKKGILQTVKVVDELVKVMGRHKPE
NIVIEMARENQTTQKGQKNSRERMKRIEEGIKELGSQILKEHPVENTQLQNEKLYLYYLQNGRD
MYVDQELDINRLSDYDVDHIVPQSFLKDDSIDNKVLTRSDKARGKSDNVPSEEVVKKMKNYWRQ
LLNAKLITQRKFDNLTKAERGGLSELDKAGFIKRQLVETRQITKHVAQILDSRMNTKYDENDKL
IREVKVITLKSKLVSDFRKDFQFYKVREINNYHHAHDAYLNAVVGTALIKKYPKLESEFVYGDY
KVYDVRKMIAKSEQEIGKATAKYFFYSNIMNFFKTEITLANGEIRKRPLIEINGETGEIVWDKG
RDFATVRKVLSMPQVNIVKKTEVQTGGFSKESILPKRNSDKLIARKKDWDPKKYGGFDSPTVAY
SVLVVAKVEKGKSKKLKSVKELLGITIMERSSFEKNPIDFLEAKGYKEVKKDLIIKLPKYSLFE
LENGRKRMLASAGELQKGNELALPSKYVNFLYLASHYEKLKGSPEDNEQKQLFVEQHKHYLDEI
IEQISEFSKRVILADANLDKVLSAYNKHRDKPIREQAENIIHLFTLTNLGAPAAFKYFDTTIDR
KRYTSTKEVLDATLIHQSITGLYETRIDLSQLGGDGG

### Exemplary C-Terminal Sequence

(SEQ ID NO: 4001)
AGKRTADGSEFEKRTADGSEFESPKKKAKVE

### Writing Domain

[0085] In certain aspects of the present invention, the writing domain of the gene modifying system utilizes a polymerase functionality to drive modifications to genomic DNA. The polymerase functionality may be, e.g., a DNA polymerase that synthesizes DNA from a nucleic acid template. The nucleic acid template may be, for example, DNA or RNA. In the case of a DNA polymerase that can use an RNA template, e.g., an RNA-dependent DNA polymerase, e.g., a reverse transcriptase, the gene modifying polypeptide component may be provided with a template RNA such as described above. One such example is DNA polymerase θ (encoded by POLQ, the polypeptide product of which may be referred to herein as “POLQ” or “Polθ”), a eukaryotic DNA polymerase that has been shown to use either DNA or RNA as a template. Chandramouly et al. 2021 (DOI: 10.1126/sciadv.abf1771). A Cas9 functionality fused (optionally through a linker) to POLQ (or a component of POLQ) can therefore be used as a driver for genome modification when administered to an organism or to cells with a template RNA that targets the genomic site desired for modification (via the gRNA spacer), recruits the Cas9 functionality (via the gRNA scaffold), and primes and templates DNA synthesis (via the template RNA).

[0086] A DNA polymerase that uses DNA as a template may also be incorporated in a fusion with a Cas9 functionality to effect genome modification. In this case, the template nucleic acid is a fusion of an sgRNA and a DNA template, joined end-to-end to one another by a covalent bond or by a linker. A poltheta (or component thereof) can also function in this way, as poltheta can synthesize DNA from a DNA template. It is understood that embodiments referring to template RNAs, as described herein, can include template nucleic acids comprising ribonucleotides, or template nucleic acid comprising ribonucleotides and deoxyribonucleotides (e.g., a template RNA comprising one or more RNA regions coupled to one or more DNA regions.) In some embodiments, a gene modifying polypeptide described herein comprises a polymerase domain having an amino acid sequence according to Table 1, or a sequence having at least 70%, 80%, 85%, 90%, 95%, 97%, 98%, or 99% identity thereto. In some embodiments, a nucleic acid described herein encodes a polymerase domain having an amino acid sequence according to Table 1, or a sequence having at least 70%, 80%, 85%, 90%, 95%, 97%, 98%, or 99% identity thereto.

[0087] It is understood that embodiments referring to reverse transcriptases or reverse transcriptase domains, as described herein, can include a polymerase as listed in Table 1.

TABLE 1
Exemplary Polymerases for use in genome engineering polypeptides.

| | | | | SEQ ID |
|---|---|---|---|---|
| Row | Pol | Sequence | Length | NO |
| 1 | Eta | MATGQDRVVALVDMDCFFVQVEQRQNPHLRNKPCAVVQYKSWKGGGIIAVSYEARAFGVTRSMWADDAKKLCPDLLLAQVRESR | 713 | 4425 |
| | (n) | GKANLTKYREASVEVMEIMSRFAVIERASIDEAYVDLTSAVQERLQKLQGQPISADLLPSTYIEGLPQGPTTAEETVQKEGMRKQGLF | | |
| | | QWLDSLQIDNLTSPDLQLTVGAVIVEEMRAAIERETGFQCSAGISHNKVLAKLACGLNKPNRQTLVSHGSVPQLFSQMPIRKIRSLGG | | |
| | | KLGASVIEILGIEYMGELTQFTESQLQSHFGEKNGSWLYAMCRGIEHDPVKPRQLPKTIGCSKNFPGKTALATREQVQWWLLQLAQ | | |
| | | ELEERLTKDRNDNDRVATQLVVSIRVQGDKRLSSLRRCCALTRYDAHKMSHDAFTVIKNCNTSGIQTEWSPPLTMLFLCATKFSASA | | |
| | | PSSSTDITSFLSSDPSSLPKVPVTSSEAKTQGSGPAVTATKKATTSLESFFQKAAERQKVKEASLSSLTAPTQAPMSNSPSKPSLPF | | |
| | | QTSQSTGTEPFFKQKSLLLKQKQLNNSSVSSPQQNPWSNCKALPNSLPTEYPGCVPVCEGVSKLEESSKATPAEMDLAHNSQSM | | |
| | | HASSASKSVLEVTQKATPNPSLLAAEDQVPCEKCGSLVPVWDMPEHMDYHFALELQKSFLQPHSSNPQVVSAVSHQGKRNPKSPL | | |
| | | ACTNKRPRPEGMQTLESFFKPLTH | | |
| 2 | Iota | MEKLGVEPEEEGGGDDDEEDAEAWAMELADVGAAASSQGVHDQVLPTPNASSRVIVHVDLDCFYAQVEMISNPELKDKPLGVQQ | 740 | 4426 |
| | (I) | KYLVVTCNYEARKLGVKKLMNVRDAKEKCPQLVLVNGEDLTRYREMSYKVTELLEEFSPVVERLGFDENFVDLTEMVEKRLQQLQS | | |
| | | DELSAVTVSGHVYNNQSINLLDVLHIRLLVGSQIAAEMREAMYNQLGLTGCAGVASNKLLAKLVSGVFKPNQQTVLLPESCQHLIHSL | | |
| | | NHIKEIPGIGYKTAKCLEALGINSVRDLQTFSPKILEKELGISVAQRIQKLSFGEDNSPVILSGPPQSFSEEDSFKKCSSEVEAKNKIEEL | | |
| | | LASLLNRVCQDGRKPHTVRLIIRRYSSEKHYGRESRQCPIPSHVIQKLGTGNYDVMTPMVDILMKLFRNMVNVKMPFHLTLLSVCFC | | |
| | | NLKALNTAKKGLIDYYLMPSLSTTSRSGKHSFKMKDTHMEDFPKDKETNRDFLPSGRIESTRTRESPLDTTNFSKEKDINEFPLCSLP | | |
| | | EGVDQEVFKQLPVDIQEEILSGKSREKFQGKGSVSCPLHASRGVLSFFSKKQMQDIPINPRDHLSSSKQVSSVSPCEPGTSGFNSS | | |
| | | SSSYMSSQKDYSYYLDNRLKDERISQGPKEPQGFHFTNSNPAVSAFHSFPNLQSEQLFSRNHTTDSHKQTVATDSHEGLTENREP | | |
| | | DSVDEKITFPSDIDPQVFYELPEAVQKELLAEWKRAGSDFHIGHK | | |
| 3 | Kappa | MDSTKEKCDSYKDDLLLRMGLNDNKAGMEGLDKEKINKIIMEATKGSRFYGNELKKEKQVNQRIENMMQQKAQITSQQLRKAQLQV | 870 | 4427 |
| | (κ) | DRFAMELEQSRNLSNTIVHIDMDAFYAAVEMRDNPELKDKPIAVGSMSMLSTSNYHARRFGVRAAMPGFIAKRLCPQLIIVPPNFDK | | |
| | | YRAVSKEVKEILADYDPNFMAMSLDEAYLNITKHLEERQNWPEDKRRYFIKMGSSVENDNPGKEVNKLSEHERSISPLLFEESPSDV | | |
| | | QPPGDPFQVNFEEQNNPQILQNSVVFGTSAQEVVKEIRFRIEQKTTLTASAGIAPNTMLAKVCSDKNKPNGQYQILPNRQAVMDFIK | | |
| | | DLPIRKVSGIGKVTEKMLKALGIITCTELYQQRALLSLLFSETSWHYFLHISLGLGSTHLTRDGERKSMSVERTFSEINKAEEQYSLCQ | | |
| | | ELCSELAQDLQKERLKGRTVTIKLKNVNFEVKTRASTVSSVVSTAEEIFAIAKELLKTEIDADFPHPLRLRLMGVRISSFPNEEDRKHQ | | |
| | | QRSIIGFLQAGNQALSATECTLEKTDKDKFVKPLEMSHKKSFFDKKRSERKWSHQDTFKCEAVNKQSFQTSQPFQVLKKKMNENLE | | |
| | | ISENSDDCQILTCPVCFRAQGCISLEALNKHVDECLDGPSISENFKMFSCSHVSATKVNKKENVPASSLCEKQDYEAHPKIKEISSVD | | |
| | | CIALVDTIDNSSKAESIDALSNKHSKEECSSLPSKSFNIEHCHQNSSSTVSLENEDVGSFRQEYRQPYLCEVKTGQALVCPVCNVEQ | | |
| | | KTSDLTLFNVHVDVCLNKSFIQELRKDKFNPVNQPKESSRSTGSSSGVQKAVTRTKRPGLMTKYSTSKKIKPNNPKHTLDIFFK | | |
| 4 | REV1 | MRRGGWRKRAENDGWETWGGYMAAKVQKLEEQFRSDAAMQKDGTSSTIFSGVAIYVNGYTDPSAEELRKLMMLHGGQYHVYYS | 1251 | 4428 |
| | | RSKTTHIIATNLPNAKIKELKGEKVIRPEWIVESIKAGRLLSYIPYQLYTKQSSVQKGLSFNPVCRPEDPLPGPSNIAKQLNNRVNHIVK | | |
| | | KIETENEVKVNGMNSWNEEDENNDFSFVDLEQTSPGRKQNGIPHPRGSTAIFNGHTPSSNGALKTQDCLVPMVNSVASRLSPAFS | | |
| | | QEEDKAEKSSTDFRDCTLQQLQQSTRNTDALRNPHRTNSFSLSPLHSNTKINGAHHSTVQGPSSTKSTSSVSTFSKAAPSVPSKPS | | |
| | | DCNFISNFYSHSRLHHISMWKCELTEFVNTLQRQSNGIFPGREKLKKMKTGRSALVVTDTGDMSVLNSPRHQSCIMHVDMDCFFVS | | |
| | | VGIRNRPDLKGKPVAVTSNRGTGRAPLRPGANPQLEWQYYQNKILKGKAADIPDSSLWENPDSAQANGIDSVLSRAEIASCSYEAR | | |
| | | QLGIKNGMFFGHAKQLCPNLQAVPYDFHAYKEVAQTLYETLASYTHNIEAVSCDEALVDITEILAETKLTPDEFANAVRMEIKDQTKC | | |
| | | AASVGIGSNILLARMATRKAKPDGQYHLKPEEVDDFIRGQLVTNLPGVGHSMESKLASLGIKTCGDLQYMTMAKLQKEFGPKTGQM | | |
| | | LYRFCRGLDDRPVRTEKERKSVSAEINYGIRFTQPKEAEAFLLSLSEEIQRRLEATGMKGKRLTLKIMVRKPGAPVETAKFGGHGICD | | |
| | | NIARTVTLDQATDNAKIIGKAMLNMFHTMKLNISDMRGVGIHVNQLVPTNLNPSTCPSRPSVQSSHFPSGSYSVRDVFQVQKAKKST | | |
| | | EEEHKEVFRAAVDLEISSASRTCTFLPPFPAHLPTSPDTNKAESSGKWNGLHTPVSVQSRLNLSIEVPSPSQLDQSVLEALPPDLRE | | |
| | | QVEQVCAVQQAESHGDKKKEPVNGCNTGILPQPVGTVLLQIPEPQESNSDAGINLIALPAFSQVDPEVFAALPAELQRELKAAYDQR | | |
| | | QRQGENSTHQQSASASVPKNPLLHLKAAVKEKKRNKKKKTIGSPKRIQSPLNNKLLNSPAKTLPGACGSPQKLIDGFLKHEGPPAEK | | |
| | | PLEELSASTSGVPGLSSLQSDPAGCVRPPAPNLAGAVEFNDVKTLLREWITTISDPMEEDILQVVKYCTDLIEEKDLEKLDLVIKYMKR | | |
| | | LMQQSVESVWNMAFDFILDNVQVVLQQTYGSTLKVT | | |
| 5 | Beta | MSKRKAPQETLNGGITDMLTELANFEKNVSQAIHKYNAYRKAASVIAKYPHKIKSGAEAKKLPGVGTKIAEKIDEFLATGKLRKLEKIR | 335 | 4429 |
| | (β) | QDDTSSSINFLTRVSGIGPSAARKFVDEGIKTLEDLRKNEDKLNHHQRIGLKYFGDFEKRIPREEMLQMQDIVLNEVKKVDSEYIATV | | |
| | | CGSFRRGAESSGDMDVLLTHPSFTSESTKQPKLLHQVVEQLQKVHFITDTLSKGETKFMGVCQLPSKNDEKEYPHRRIDIRLIPKDQ | | |
| | | YYCGVLYFTGSDIFNKNMRAHALEKGFTINEYTIRPLGVTGVAGEPLPVDSEKDIFDYIQWKYREPKDRSE | | |
| 6 | Lambda | MDPRGILKAFPKRQKIHADASSKVLAKIPRREEGEEAEEWLSSLRAHVVRTGIGRARAELFEKQIVQHGGQLCPAQGPGVTHIVVDE | 575 | 4430 |
| | (λ) | GMDYERALRLLRLPQLPPGAQLVKSAWLSLCLQERRLVDVAGFSIFIPSRYLDHPQPSKAEQDASIPPGTHEALLQTALSPPPPPTR | | |
| | | PVSPPQKAKEAPNTQAQPISDDEASDGEETQVSAADLEALISGHYPTSLEGDCEPSPAPAVLDKWVCAQPSSQKATNHNLHITEKL | | |
| | | EVLAKAYSVQGDKWRALGYAKAINALKSFHKPVTSYQEACSIPGIGKRMAEKIIEILESGHLRKLDHISESVPVLELFSNIWGAGTKTA | | |
| | | QMWYQQGFRSLEDIRSQASLTTQQAIGLKHYSDFLERMPREEATEIEQTVQKAAQAFNSGLLCVACGSYRRGKATCGDVDVLITHP | | |
| | | DGRSHRGIFSRLLDSLRQEGFLTDDLVSQEENGQQQKYLGVCRLPGPGRRHRRLDIIVVPYSEFACALLYFTGSAHFNRSMRALAK | | |
| | | TKGMSLSEHALSTAVVRNTHGCKVGPGRVLPTPTEKDVFRLLGLPYREPAERDW | | |
| 7 | Mu | MLPKRRRARVGSPSGDAASSTPPSTRFPGVAIYLVEPRMGRSRRAFLTGLARSKGFRVLDACSSEATHVVMEETSAEEAVSWQER | 494 | 4431 |
| | (μ) | RMAAAPPGCTPPALLDISWLTESLGAGQPVPVECRHRLEVAGPRKGPLSPAWMPAYACQRPTPLTHHNTGLSEALEILAEAAGFEG | | |
| | | SEGRLLTFCRAASVLKALPSPVTTLSQLQGLPHFGEHSSRVVQELLEHGVCEEVERVRRSERYQTMKLFTQIFGVGVKTADRWYRE | | |
| | | GLRTLDDLREQPQKLTQQQKAGLQHHQDLSTPVLRSDVDALQQVVEEAVGQALPGATVTLTGGFRRGKLQGHDVDFLITHPKEGQ | | |
| | | EAGLLPRVMCRLQDQGLILYHQHQHSCCESPTRLAQQSHMDAFERSFCIFRLPQPPGAAVGGSTRPCPSWKAVRVDLVVAPVSQF | | |
| | | PFALLGWTGSKLFQRELRRFSRKEKGLWLNSHGLFDPEQKTFFQAASEEDIFRHLGLEYLPPEQRNA | | |
| 8 | TdT | MDPPRASHLSPRKKRPRQTGALMASSPQDIKFQDLVVFILEKKMGTTRRAFLMELARRKGFRVENELSDSVTHIVAENNSGSDVLE | 509 | 4432 |
| | | WLQAQKVQVSSQPELLDVSWLIECIRAGKPVEMTGKHQLVVRRDYSDSTNPGPPKTPPIAVQKISQYACQRRTTLNNCNQIFTDAF | | |
| | | DILAENCEFRENEDSCVTFMRAASVLKSLPFTIISMKDTEGIPCLGSKVKGIIEEIIEDGESSEVKAVLNDERYQSFKLFTSVFGVGLKT | | |
| | | SEKWFRMGFRTLSKVRSDKSLKFTRMQKAGFLYYEDLVSCVTRAEAEAVSVLVKEAVWAFLPDAFVTMTGGFRRGKKMGHDVDF | | |
| | | LITSPGSTEDEEQLLQKVMNLWEKKGLLLYYDLVESTFEKLRLPSRKVDALDHFQKCFLIFKLPRQRVDSDQSSWQEGKTWKAIRVD | | |
| | | LVLCPYERRAFALLGWTGSRQFERDLRRYATHERKMILDNHALYDKTKRIFLKAESEEEIFAHLGLDYIEPWERNA | | |
| 9 | Theta | MNLLRRSGKRRRSESGSDSFSGSGGDSSASPQFLSGSVLSPPPGLGRCLKAAAAGECKPTVPDYERDKLLLANWGLPKAVLEKYH | 2590 | 4433 |
| | (θ) | SFGVKKMFEWQAECLLLGQVLEGKNLVYSAPTSAGKTLVAELLILKRVLEMRKKALFILPFVSVAKEKKYYLQSLFQEVGIKVDGYMG | | |
| | | STSPSRHFSSLDIAVCTIERANGLINRLIEENKMDLLGMVVVDELHMLGDSHRGYLLELLLTKICYITRKSASCQADLASSLSNAVQIVG | | |
| | | MSATLPNLELVASWLNAELYHTDFRPVPLLESVKVGNSIYDSSMKLVREFEPMLQVKGDEDHVVSLCYETICDNHSVLLFCPSKKW | | |
| | | CEKLADIIAREFYNLHHQAEGLVKPSECPPVILEQKELLEVMDQLRRLPSGLDSVLQKTVPWGVAFHHAGLTFEERDIIEGAFRQGLI | | |
| | | RVLAATSTLSSGVNLPARRVIIRTPIFGGRPLDILTYKQMVGRAGRKGVDTVGESILICKNSEKSKGIALLQGSLKPVRSCLQRREGEE | | |
| | | VTGSMIRAILEIIVGGVASTSQDMHTYAACTFLAASMKEGKQGIQRNQESVQLGAIEACVMWLLENEFIQSTEASDGTEGKVYHPTH | | |
| | | LGSATLSSSLSPADTLDIFADLQRAMKGFVLENDLHILYLVTPMFEDWTTIDWYRFFCLWEKLPTSMKRVAELVGVEEGFLARCVKG | | |
| | | KVVARTERQHRQMAIHKRFFTSLVLLDLISEVPLREINQKYGCNRGQIQSLQQSAAVYAGMITVFSNRLGWHNMELLLSQFQKRLTF | | |
| | | GIQRELCDLVRVSLLNAQRARVLYASGFHTVADLARANIVEVEVILKNAVPFKSARKAVDEEEEAVEERRNMRTIWVTGRKGLTERE | | |
| | | AAALIVEEARMILQQDLVEMGVQWNPCALLHSSTCSLTHSESEVKEHTFISQTKSSYKKLTSKNKSNTIFSDSYIKHSPNIVQDLNKSR | | |
| | | EHTSSFNCNFQNGNQEHQTCSIFRARKRASLDINKEKPGASQNEGKTSDKKVVQTFSQKTKKAPLNFNSEKMSRSFRSWKRRKHL | | |
| | | KRSRDSSPLKDSGACRIHLQGQTLSNPSLCEDPFTLDEKKTEFRNSGPFAKNVSLSGKEKDNKTSFPLQIKQNCSWNITLTNDNFVE | | |
| | | HIVTGSQSKNVTCQATSVVSEKGRGVAVEAEKINEVLIQNGSKNQNVYMKHHDIHPINQYLRKQSHEQTSTITKQKNIIERQMPCEAV | | |
| | | \|SSYINRDSNVTINCERIKLNTEENKPSHFQALGDDISRTVIPSEVLPSAGAFSKSEGQHENFLNISRLQEKTGTYTTNKTKNNHVSDLG | | |
| | | LVLCDFEDSFYLDTQSEKIIQQMATENAKLGAKDTNLAAGIMQKSLVQQNSMNSFQKECHIPFPAEQHPLGATKIDHLDLKTVGTMK | | |
| | | QSSDSHGVDILTPESPIFHSPILLEENGLFLKKNEVSVTDSQLNSFLQGYQTQETVKPVILLIPQKRTPTGVEGECLPVPETSLNMSDS | | |
| | | LLFDSFSDDYLVKEQLPDMQMKEPLPSEVTSNHFSDSLCLQEDLIKKSNVNENQDTHQQLTCSNDESIIFSEMDSVQMVEALDNVDI | | |
| | | FPVQEKNHTVVSPRALELSDPVLDEHHQGDQDGGDQDERAEKSKLTGTRQNHSFIWSGASFDLSPGLQRILDKVSSPLENEKLKS | | |
| | | MTINFSSLNRKNTELNEEQEVISNLETKQVQGISFSSNNEVKSKIEMLENNANHDETSSLLPRKESNIVDDNGLIPPTPIPTSASKLTFP | | |
| | | GILETPVNPWKTNNVLQPGESYLFGSPSDIKNHDLSPGSRNGFKDNSPISDTSFSLQLSQDGLQLTPASSSSESLSIIDVASDQNLFQ | | |
| | | TFIKEWRCKKRFSISLACEKIRSLTSSKTATIGSRFKQASSPQEIPIRDDGFPIKGCDDTLVVGLAVCWGGRDAYYFSLQKEQKHSEIS | | |
| | | ASLVPPSLDPSLTLKDRMWYLQSCLRKESDKECSVVIYDFIQSYKILLLSCGISLEQSYEDPKVACWLLDPDSQEPTLHSIVTSFLPHE | | |
| | | LPLLEGMETSQGIQSLGLNAGSEHSGRYRASVESILIFNSMNQLNSLLQKENLQDVFRKVEMPSQYCLALLELNGIGFSTAECESQK | | |
| | | HIMQAKLDAIETQAYQLAGHSFSFTSSDDIAEVLFLELKLPPNREMKNQGSKKTLGSTRRGIDNGRKLRLGRQFSTSKDVLNKLKALH | | |
| | | PLPGLILEWRRITNAITKVVFPLQREKCLNPFLGMERIYPVSQSHTATGRITFTEPNIQNVPRDFEIKMPTLVGESPPSQAVGKGLLPM | | |
| | | GRGKYKKGFSVNPRCQAQMEERAADRGMPFSISMRHAFVPFPGGSILAADYSQLELRILAHLSHDRRLIQVLNTGADVFRSIAAEW | | |
| | | KMIEPESVGDDLRQQAKQICYGIIYGMGAKSLGEQMGIKENDAACYIDSFKSRYTGINQFMTETVKNCKRDGFVQTILGRRRYLPGIK | | |
| | | DNNPYRKAHAERQAINTIVQGSAADIVKIATVNIQKQLETFHSTFKSHGHREGMLQSDQTGLSRKRKLQGMFCPIRGGFFILQLHDEL | | |
| | | LYEVAEEDVVQVAQIVKNEMESAVKLSVKLKVKVKIGASWGELKDFDV | | |
| 10 | Nu | MENYEALVGFDLCNTPLSSVAQKIMSAMHSGDLVDSKTWGKSTETMEVINKSSVKYSVQLEDRKTQSPEKKDLKSLRSQTSRGSA | 900 | 4434 |
| | (ν) | KLSPQSFSVRLTDQLSADQKQKSISSLTLSSCLIPQYNQEASVLQKKGHKRKHFLMENINNENKGSINLKRKHITYNNLSEKTSKQMA | | |
| | | LEEDTDDAEGYLNSGNSGALKKHFCDIRHLDDWAKSQLIEMLKQAAALVITVMYTDGSTQLGADQTPVSSVRGIVVLVKRQAEGGH | | |
| | | GCPDAPACGPVLEGFVSDDPCIYIQIEHSAIWDQEQEAHQQFARNVLFQTMKCKCPVICFNAKDFVRIVLQFFGNDGSWKHVADFIG | | |
| | | LDPRIAAWLIDPSDATPSFEDLVEKYCEKSITVKVNSTYGNSSRNIVNQNVRENLKTLYRLTMDLCSKLKDYGLWQLFRTLELPLIPIL | | |
| | | AVMESHAIQVNKEEMEKTSALLGARLKELEQEAHFVAGERFLITSNNQLREILFGKLKLHLLSQRNSLPRTGLQKYPSTSEAVLNALR | | |
| | | DLHPLPKIILEYRQVHKIKSTFVDGLLACMKKGSISSTWNQTGTVTGRLSAKHPNIQGISKHPIQITTPKNFKGKEDKILTISPRAMFVS | | |
| | | SKGHTFLAADFSQIELRILTHLSGDPELLKLFQESERDDVFSTLTSQWKDVPVEQVTHADREQTKKVVYAVVYGAGKERLAACLGVP | | |
| | | IQEAAQFLESFLQKYKKIKDFARAAIAQCHQTGCVVSIMGRRRPLPRIHAHDQQLRAQAERQAVNFVVQGSAADLCKLAMIHVFTAV | | |
| | | AASHTLTARLVAQIHDELLFEVEDPQIPECAALVRRTMESLEQVQALELQLQVPLKVSLSAGRSWGHLVPLQEAWGPPPGPCRTES | | |
| | | PSNSLAAPGSPASTQPPPLHFSPSFCL | | |

TABLE 1a
Properties of polymerases listed in Table 1

| | | | | | | | Catalytic | | | |
|---|---|---|---|---|---|---|---|---|---|---|
| | | | | Gene | UniProt | UniProt | Subunit | Additional | Biological | Template |
| Row | Family | Pol | Host | Symbol | Accession | Name | Mass (kDa) | Subunits | Pathway(s) | Nucleic Acid |
| 1 | Y | Eta (η) | Homo | POLH | Q9Y253 | POLH_HUMAN | 78 | Monomer | TLS | |
| | | | sapiens | | | | | | | |
| 2 | Y | Iota (ι) | Homo | POLI | Q9UNA4 | POLI_HUMAN | 80 | Monomer | TLS | |
| | | | sapiens | | | | | | | |
| 3 | Y | Kappa | Homo | POLK | Q9UBT6 | POLK_HUMAN | 76 | Monomer | TLS | |
| | | (κ) | sapiens | | | | | | | |
| 4 | Y | REV1 | Homo | REV1 | Q9UBZ9 | REV1_HUMAN | 138 | Monomer | TLS | |
| | | | sapiens | | | | | | | |
| 5 | X | Beta (β) | Homo | POLB | P06746 | DPOLB_HUMAN | 39 | Monomer | BER | |
| | | | sapiens | | | | | | | |
| 6 | X | Lambda | Homo | POLL | Q9UGP5 | DPOLL_HUMAN | 66 | Monomer | BER, NHEJ, | |
| | | (λ) | sapiens | | | | | | TLS | |
| 7 | X | Mu (μ) | Homo | POLM | Q9NP87 | DPOLM_HUMAN | 55 | Monomer | NHEJ, V(D)J | |
| | | | sapiens | | | | | | | |
| 8 | X | TdT | Homo | DNTT | P04053 | TDT_HUMAN | 56 | Monomer | V(D)J | Template- |
| | | | sapiens | | | | | | | independent |
| 9 | A | Theta | Homo | POLQ | O75417 | DPOLQ_HUMAN | 290 | Monomer | TLS, MMEJ, | DNA and/or |
| | | (θ) | sapiens | | | | | | RTDR | RNA |
| 10 | A | Nu (ν) | Homo | POLN | Q7Z5Q5 | DPOLN_HUMAN | 100 | Monomer | ICL Repair | |
| | | | sapiens | | | | | | | |

For biological pathways, TLS = translesion synthesis; BER = base-excision repair; NHEJ = non-homologous end joining; V(D)J = V(D)J recombination process; MMEJ = microhomology-mediated end joining; RTDR = RNA-templated DNA repair.

[0088] In certain aspects of the present invention, the writing domain of the gene modifying system possesses reverse transcriptase activity and is also referred to as a reverse transcriptase domain (a RT domain). In some embodiments, the RT domain comprises an RT catalytic portion and RNA-binding region (e.g., a region that binds the template RNA).

[0089] In some embodiments, a nucleic acid encoding the reverse transcriptase is altered from its natural sequence to have altered codon usage, e.g. improved for human cells. In some embodiments the reverse transcriptase domain is a heterologous reverse transcriptase from a retrovirus. In some embodiments, the RT domain comprising a gene modifying polypeptide has been mutated from its original amino acid sequence, e.g., has at least 1, 2, 3, 4, 5, 6, 7, 8, 9, 10, 20, 30, 40, 50, 60, 70, 80, 90, or 100 substitutions. In some embodiments, the RT domain is derived from the RT of a retrovirus, e.g., HIV-1 RT, Moloney Murine Leukemia Virus (MMLV) RT, avian myeloblastosis virus (AMV) RT, or Rous Sarcoma Virus (RSV) RT.

[0090] In some embodiments, the retroviral reverse transcriptase (RT) domain exhibits enhanced stringency of target-primed reverse transcription (TPRT) initiation, e.g., relative to an endogenous RT domain. In some embodiments, the RT domain initiates TPRT when the 3 nt in the target site immediately upstream of the first strand nick, e.g., the genomic DNA priming the RNA template, have at least 66% or 100% complementarity to the 3 nt of homology in the RNA template. In some embodiments, the RT domain initiates TPRT when there are less than 5 nt mismatched (e.g., less than 1, 2, 3, 4, or 5 nt mismatched) between the template RNA homology and the target DNA priming reverse transcription. In some embodiments, the RT domain is modified such that the stringency for mismatches in priming the TPRT reaction is increased, e.g., wherein the RT domain does not tolerate any mismatches or tolerates fewer mismatches in the priming region relative to a wild-type (e.g., unmodified) RT domain. In some embodiments, the RT domain comprises a HIV-1 RT domain. In embodiments, the HIV-1 RT domain initiates lower levels of synthesis even with three nucleotide mismatches relative to an alternative RT domain (e.g., as described by Jamburuthugoda and Eickbush J Mol Biol 407 (5): 661-672 (2011); incorporated herein by reference in its entirety). In some embodiments, the RT domain forms a dimer (e.g., a heterodimer or homodimer). In some embodiments, the RT domain is monomeric. In some embodiments, an RT domain, naturally functions as a monomer or as a dimer (e.g., heterodimer or homodimer). In some embodiments, an RT domain naturally functions as a monomer, e.g., is derived from a virus wherein it functions as a monomer. In embodiments, the RT domain is selected from an RT domain from murine leukemia virus (MLV; sometimes referred to as MoMLV) (e.g., P03355), porcine endogenous retrovirus (PERV) (e.g., UniProt Q4VFZ2), mouse mammary tumor virus (MMTV) (e.g., UniProt P03365), Mason-Pfizer monkey virus (MPMV) (e.g., UniProt P07572), bovine leukemia virus (BLV) (e.g., UniProt P03361), human T-cell leukemia virus-1 (HTLV-1) (e.g., UniProt P03362), human foamy virus (HFV) (e.g., UniProt P14350), simian foamy virus (SFV) (e.g., UniProt P23074), or bovine foamy/syncytial virus (BFV/BSV) (e.g., UniProt 041894), or a functional fragment or variant thereof (e.g., an amino acid sequence having at least 70%, 80%, 90%, 95%, or 99% identity thereto). In some embodiments, an RT domain is dimeric in its natural functioning. In some embodiments, the RT domain is derived from a virus wherein it functions as a dimer. In embodiments, the RT domain is selected from an RT domain from avian sarcoma/leukemia virus (ASLV) (e.g., UniProt A0A142BKH1), Rous sarcoma virus (RSV) (e.g., UniProt P03354), avian myeloblastosis virus (AMV) (e.g., UniProt Q83133), human immunodeficiency virus type I (HIV-1) (e.g., UniProt P03369), human immunodeficiency virus type II (HIV-2) (e.g., UniProt P15833), simian immunodeficiency virus (SIV) (e.g., UniProt P05896), bovine immunodeficiency virus (BIV) (e.g., UniProt P19560), equine infectious anemia virus (EIAV) (e.g., UniProt P03371), or feline immunodeficiency virus (FIV) (e.g., UniProt P16088) (Herschhorn and Hizi Cell Mol Life Sci 67 (16): 2717-2747 (2010)), or a functional fragment or variant thereof (e.g., an amino acid sequence having at least 70%, 80%, 90%, 95%, or 99% identity thereto). Naturally heterodimeric RT domains may, in some embodiments, also be functional as homodimers. In some embodiments, dimeric RT domains are expressed as fusion proteins, e.g., as homodimeric fusion proteins or heterodimeric fusion proteins. In some embodiments, the RT function of the system is fulfilled by multiple RT domains (e.g., as described herein). In further embodiments, the multiple RT domains are fused or separate, e.g., may be on the same polypeptide or on different polypeptides.

[0091] In some embodiments, a gene modifying system described herein comprises an integrase domain, e.g., wherein the integrase domain may be part of the RT domain. In some embodiments, an RT domain (e.g., as described herein) comprises an integrase domain. In some embodiments, an RT domain (e.g., as described herein) lacks an integrase domain, or comprises an integrase domain that has been inactivated by mutation or deleted. In some embodiment, a gene modifying system described herein comprises an RNase H domain, e.g., wherein the RNase H domain may be part of the RT domain. In some embodiments, the RNase H domain is not part of the RT domain and is covalently linked via a flexible linker. In some embodiments, an RT domain (e.g., as described herein) comprises an RNase H domain, e.g., an endogenous RNAse H domain or a heterologous RNase H domain. In some embodiments, an RT domain (e.g., as described herein) lacks an RNase H domain. In some embodiments, an RT domain (e.g., as described herein) comprises an RNase H domain that has been added, deleted, mutated, or swapped for a heterologous RNase H domain. In some embodiments, the polypeptide comprises an inactivated endogenous RNase H domain. In some embodiments, an endogenous RNase H domain from one of the other domains of the polypeptide is genetically removed such that it is not included in the polypeptide, e.g., the endogenous RNase H domain is partially or completely truncated from the comprising domain. In some embodiments, mutation of an RNase H domain yields a polypeptide exhibiting lower RNase activity, e.g., as determined by the methods described in Kotewicz et al. Nucleic Acids Res 16 (1): 265-277 (1988) (incorporated herein by reference in its entirety), e.g., lower by at least 10%, 20%, 30%, 40%, 50%, 60%, 70%, 80%, or 90% compared to an otherwise similar domain without the mutation. In some embodiments, RNase H activity is abolished.

[0092] In some embodiments, an RT domain is mutated to increase fidelity compared to an otherwise similar domain without the mutation. For instance, in some embodiments, a YADD (SEQ ID NO: 4435) or YMDD (SEQ ID NO: 4436) motif in an RT domain (e.g., in a reverse transcriptase) is replaced with YVDD (SEQ ID NO: 4437). In embodiments, replacement of the YADD (SEQ ID NO: 4435) or YMDD (SEQ ID NO: 4436) or YVDD (SEQ ID NO: 4437) results in higher fidelity in retroviral reverse transcriptase activity (e.g., as described in Jamburuthugoda and Eickbush J Mol Biol 2011; incorporated herein by reference in its entirety).

[0093] In some embodiments, a gene modifying polypeptide described herein comprises an RT domain having an amino acid sequence according to Table 2, or a sequence having at least 70%, 80%, 85%, 90%, 95%, 97%, 98%, or 99% identity thereto. In some embodiments, a nucleic acid described herein encodes an RT domain having an amino acid sequence according to Table 2, or a sequence having at least 70%, 80%, 85%, 90%, 95%, 97%, 98%, or 99% identity thereto.

TABLE 2
Exemplary reverse transcriptase domains from retroviruses

| | | SEQ ID |
|---|---|---|
| RT Name | RT amino acid sequence | NO: |
| AVIRE_ | TAPLEEEYRLFLEAPIQNVTLLEQWKREIPKVWAEINPPGLASTQAPIHVQLLSTALPVRVRQYPITLEAKRSLRETIRKFRAAGILRPVH | 4438 |
| P03360 | SPWNTPLLPVRKSGTSEYRMVQDLREVNKRVETIHPTVPNPYTLLSLLPPDRIWYSVLDLKDAFFCIPLAPESQLIFAFEWADAEEGE | |
| | SGQLTWTRLPQGFKNSPTLFDEALNRDLQGFRLDHPSVSLLQYVDDLLIAADTQAACLSATRDLLMTLAELGYRVSGKKAQLCQEEV | |
| | TYLGFKIHKGSRSLSNSRTQAILQIPVPKTKRQVREFLGTIGYCRLWIPGFAELAQPLYAATRGGNDPLVWGEKEEEAFQSLKLALTQ | |
| | PPALALPSLDKPFQLFVEETSGAAKGVLTQALGPWKRPVAYLSKRLDPVAAGWPRCLRAIAAAALLTREASKLTFGQDIEITSSHNLE | |
| | SLLRSPPDKWLTNARITQYQVLLLDPPRVRFKQTAALNPATLLPETDDTLPIHHCLDTLDSLTSTRPDLTDQPLAQAEATLFTDGSSYI | |
| | RDGKRYAGAAVVTLDSVIWAEPLPIGTSAQKAELIALTKALEWSKDKSVNIYTDSRYAFATLHVHGMIYRERGLLTAGGKAIKNAPEILA | |
| | LLTAVWLPKRVAVMHCKGHQKDDAPTSTGNRRADEVAREVAIRPLSTQATIS | |
| AVIRE | TAPLEEEYRLFLEAPIQNVTLLEQWKREIPKVWAEINPPGLASTQAPIHVQLLSTALPVRVRQYPITLEAKRSLRETIRKFRAAGILRPVH | 4439 |
| _P03360_3mut | SPWNTPLLPVRKSGTSEYRMVQDLREVNKRVETIHPTVPNPYTLLSLLPPDRIWYSVLDLKDAFFCIPLAPESQLIFAFEWADAEEGE | |
| | SGQLTWTRLPQGFKNSPTLFNEALNRDLQGFRLDHPSVSLLQYVDDLLIAADTQAACLSATRDLLMTLAELGYRVSGKKAQLCQEEV | |
| | TYLGFKIHKGSRSLSNSRTQAILQIPVPKTKRQVREFLGTIGYCRLWIPGFAELAQPLYAATRPGNDPLVWGEKEEEAFQSLKLALTQP | |
| | PALALPSLDKPFQLFVEETSGAAKGVLTQALGPWKRPVAYLSKRLDPVAAGWPRCLRAIAAAALLTREASKLTFGQDIEITSSHNLESL | |
| | LRSPPDKWLTNARITQYQVLLLDPPRVRFKQTAALNPATLLPETDDTLPIHHCLDTLDSLTSTRPDLTDQPLAQAEATLFTDGSSYIRD | |
| | GKRYAGAAVVTLDSVIWAEPLPIGTSAQKAELIALTKALEWSKDKSVNIYTDSRYAFATLHVHGMIYRERGWLTAGGKAIKNAPEILAL | |
| | LTAVWLPKRVAVMHCKGHQKDDAPTSTGNRRADEVAREVAIRPLSTQATIS | |
| AVIRE_ | TAPLEEEYRLFLEAPIQNVTLLEQWKREIPKVWAEINPPGLASTQAPIHVQLLSTALPVRVRQYPITLEAKRSLRETIRKFRAAGILRPVH | 4440 |
| P03360_3mutA | SPWNTPLLPVRKSGTSEYRMVQDLREVNKRVETIHPTVPNPYTLLSLLPPDRIWYSVLDLKDAFFCIPLAPESQLIFAFEWADAEEGE | |
| | SGQLTWTRLPQGFKNSPTLFNEALNRDLQGFRLDHPSVSLLQYVDDLLIAADTQAACLSATRDLLMTLAELGYRVSGKKAQLCQEEV | |
| | TYLGFKIHKGSRSLSNSRTQAILQIPVPKTKRQVREFLGKIGYCRLFIPGFAELAQPLYAATRPGNDPLVWGEKEEEAFQSLKLALTQP | |
| | PALALPSLDKPFQLFVEETSGAAKGVLTQALGPWKRPVAYLSKRLDPVAAGWPRCLRAIAAAALLTREASKLTFGQDIEITSSHNLESL | |
| | LRSPPDKWLTNARITQYQVLLLDPPRVRFKQTAALNPATLLPETDDTLPIHHCLDTLDSLTSTRPDLTDQPLAQAEATLFTDGSSYIRD | |
| | GKRYAGAAVVTLDSVIWAEPLPIGTSAQKAELIALTKALEWSKDKSVNIYTDSRYAFATLHVHGMIYRERGWLTAGGKAIKNAPEILAL | |
| | LTAVWLPKRVAVMHCKGHQKDDAPTSTGNRRADEVAREVAIRPLSTQATIS | |
| BAEVM_ | TVSLQDEHRLFDIPVTTSLPDVWLQDFPQAWAETGGLGRAKCQAPIIIDLKPTAVPVSIKQYPMSLEAHMGIRQHIIKFLELGVLRPCR | 4441 |
| P10272 | SPWNTPLLPVKKPGTQDYRPVQDLREINKRTVDIHPTVPNPYNLLSTLKPDYSWYTVLDLKDAFFCLPLAPQSQELFAFEWKDPERGI | |
| | SGQLTWTRLPQGFKNSPTLFDEALHRDLTDFRTQHPEVTLLQYVDDLLLAAPTKKACTQGTRHLLQELGEKGYRASAKKAQICQTKV | |
| | TYLGYILSEGKRWLTPGRIETVARIPPPRNPREVREFLGTAGFCRLWIPGFAELAAPLYALTKESTPFTWQTEHQLAFEALKKALLSAP | |
| | ALGLPDTSKPFTLFLDERQGIAKGVLTQKLGPWKRPVAYLSKKLDPVAAGWPPCLRIMAATAMLVKDSAKLTLGQPLTVITPHTLEAIV | |
| | RQPPDRWITNARLTHYQALLLDTDRVQFGPPVTLNPATLLPVPENQPSPHDCRQVLAETHGTREDLKDQELPDADHTWYTDGSSYL | |
| | DSGTRRAGAAVVDGHNTIWAQSLPPGTSAQKAELIALTKALELSKGKKANIYTDSRYAFATAHTHGSIYERRGLLTSEGKEIKNKAEIIA | |
| | LLKALFLPQEVAIIHCPGHQKGQDPVAVGNRQADRVARQAAMAEVLTLATEPDNTSHIT | |
| BAEVM_ | TVSLQDEHRLFDIPVTTSLPDVWLQDFPQAWAETGGLGRAKCQAPIIIDLKPTAVPVSIKQYPMSLEAHMGIRQHIIKFLELGVLRPCR | 4442 |
| P10272_3mut | SPWNTPLLPVKKPGTQDYRPVQDLREINKRTVDIHPTVPNPYNLLSTLKPDYSWYTVLDLKDAFFCLPLAPQSQELFAFEWKDPERGI | |
| | SGQLTWTRLPQGFKNSPTLFNEALHRDLTDFRTQHPEVTLLQYVDDLLLAAPTKKACTQGTRHLLQELGEKGYRASAKKAQICQTKV | |
| | TYLGYILSEGKRWLTPGRIETVARIPPPRNPREVREFLGTAGFCRLWIPGFAELAAPLYALTKPSTPFTWQTEHQLAFEALKKALLSAP | |
| | ALGLPDTSKPFTLFLDERQGIAKGVLTQKLGPWKRPVAYLSKKLDPVAAGWPPCLRIMAATAMLVKDSAKLTLGQPLTVITPHTLEAIV | |
| | RQPPDRWITNARLTHYQALLLDTDRVQFGPPVTLNPATLLPVPENQPSPHDCRQVLAETHGTREDLKDQELPDADHTWYTDGSSYL | |
| | DSGTRRAGAAVVDGHNTIWAQSLPPGTSAQKAELIALTKALELSKGKKANIYTDSRYAFATAHTHGSIYERRGWLTSEGKEIKNKAEII | |
| | ALLKALFLPQEVAIIHCPGHQKGQDPVAVGNRQADRVARQAAMAEVLTLATEPDNTSHIT | |
| BAEVM_ | TVSLQDEHRLFDIPVTTSLPDVWLQDFPQAWAETGGLGRAKCQAPIIIDLKPTAVPVSIKQYPMSLEAHMGIRQHIIKFLELGVLRPCR | 4443 |
| P10272_3mutA | SPWNTPLLPVKKPGTQDYRPVQDLREINKRTVDIHPTVPNPYNLLSTLKPDYSWYTVLDLKDAFFCLPLAPQSQELFAFEWKDPERGI | |
| | SGQLTWTRLPQGFKNSPTLFNEALHRDLTDFRTQHPEVTLLQYVDDLLLAAPTKKACTQGTRHLLQELGEKGYRASAKKAQICQTKV | |
| | TYLGYILSEGKRWLTPGRIETVARIPPPRNPREVREFLGKAGFCRLFIPGFAELAAPLYALTKPSTPFTWQTEHQLAFEALKKALLSAP | |
| | ALGLPDTSKPFTLFLDERQGIAKGVLTQKLGPWKRPVAYLSKKLDPVAAGWPPCLRIMAATAMLVKDSAKLTLGQPLTVITPHTLEAIV | |
| | RQPPDRWITNARLTHYQALLLDTDRVQFGPPVTLNPATLLPVPENQPSPHDCRQVLAETHGTREDLKDQELPDADHTWYTDGSSYL | |
| | DSGTRRAGAAVVDGHNTIWAQSLPPGTSAQKAELIALTKALELSKGKKANIYTDSRYAFATAHTHGSIYERRGWLTSEGKEIKNKAEII | |
| | ALLKALFLPQEVAIIHCPGHQKGQDPVAVGNRQADRVARQAAMAEVLTLATEPDNTSHIT | |
| BLVAU_ | GVLDAPPSHIGLEHLPPPPEVPQFPLNLERLQALQDLVHRSLEAGYISPWDGPGNNPVFPVRKPNGAWRFVHDLRVTNALTKPIPAL | 4444 |
| P25059 | SPGPPDLTAIPTHLPHIICLDLKDAFFQIPVEDRFRSYFAFTLPTPGGLQPHRRFAWRVLPQGFINSPALFERALQEPLRQVSAAFSQS | |
| | LLVSYMDDILYVSPTEEQRLQCYQTMAAHLRDLGFQVASEKTRQTPSPVPFLGQMVHERMVTYQSLPTLQISSPISLHQLQTVLGDL | |
| | QWVSRGTPTTRRPLQLLYSSLKGIDDPRAIIHLSPEQQQGIAELRQALSHNARSRYNEQEPLLAYVHLTRAGSTLVLFQKGAQFPLAY | |
| | FQTPLTDNQASPWGLLLLLGCQYLQAQALSSYAKTILKYYHNLPKTSLDNWIQSSEDPRVQELLQLWPQISSQGIQPPGPWKTLVTR | |
| | AEVFLTPQFSPEPIPAALCLFSDGAARRGAYCLWKDHLLDFQAVPAPESAQKGELAGLLAGLAAAPPEPLNIWVDSKYLYSLLRTLVL | |
| | GAWLQPDPVPSYALLYKSLLRHPAIFVGHVRSHSSASHPIASLNNYVDQL | |
| BLVAU_ | GVLDAPPSHIGLEHLPPPPEVPQFPLNLERLQALQDLVHRSLEAGYISPWDGPGNNPVFPVRKPNGAWRFVHDLRVTNALTKPIPAL | 4445 |
| P25059_2mut | SPGPPDLTAIPTHLPHIICLDLKDAFFQIPVEDRFRSYFAFTLPTPGGLQPHRRFAWRVLPQGFINSPALFQRALQEPLRQVSAAFSQS | |
| | LLVSYMDDILYVSPTEEQRLQCYQTMAAHLRDLGFQVASEKTRQTPSPVPFLGQMVHERMVTYQSLPTLQISSPISLHQLQTVLGDL | |
| | QWVSRGTPTTRRPLQLLYSSLKPIDDPRAIIHLSPEQQQGIAELRQALSHNARSRYNEQEPLLAYVHLTRAGSTLVLFQKGAQFPLAY | |
| | FQTPLTDNQASPWGLLLLLGCQYLQAQALSSYAKTILKYYHNLPKTSLDNWIQSSEDPRVQELLQLWPQISSQGIQPPGPWKTLVTR | |
| | AEVFLTPQFSPEPIPAALCLFSDGAARRGAYCLWKDHLLDFQAVPAPESAQKGELAGLLAGLAAAPPEPLNIWVDSKYLYSLLRTLVL | |
| | GAWLQPDPVPSYALLYKSLLRHPAIFVGHVRSHSSASHPIASLNNYVDQL | |
| BLVJ_ | GVLDTPPSHIGLEHLPPPPEVPQFPLNLERLQALQDLVHRSLEAGYISPWDGPGNNPVFPVRKPNGAWRFVHDLRATNALTKPIPAL | 4446 |
| P03361 | SPGPPDLTAIPTHPPHIICLDLKDAFFQIPVEDRFRFYLSFTLPSPGGLQPHRRFAWRVLPQGFINSPALFERALQEPLRQVSAAFSQS | |
| | LLVSYMDDILYASPTEEQRSQCYQALAARLRDLGFQVASEKTSQTPSPVPFLGQMVHEQIVTYQSLPTLQISSPISLHQLQAVLGDLQ | |
| | WVSRGTPTTRRPLQLLYSSLKRHHDPRAIIQLSPEQLQGIAELRQALSHNARSRYNEQEPLLAYVHLTRAGSTLVLFQKGAQFPLAYF | |
| | QTPLTDNQASPWGLLLLLGCQYLQTQALSSYAKPILKYYHNLPKTSLDNWIQSSEDPRVQELLQLWPQISSQGIQPPGPWKTLITRAE | |
| | VFLTPQFSPDPIPAALCLFSDGATGRGAYCLWKDHLLDFQAVPAPESAQKGELAGLLAGLAAAPPEPVNIWVDSKYLYSLLRTLVLGA | |
| | WLQPDPVPSYALLYKSLLRHPAIVVGHVRSHSSASHPIASLNNYVDQL | |
| BLVJ_ | GVLDTPPSHIGLEHLPPPPEVPQFPLNLERLQALQDLVHRSLEAGYISPWDGPGNNPVFPVRKPNGAWRFVHDLRATNALTKPIPAL | 4447 |
| P03361_2mut | SPGPPDLTAIPTHPPHIICLDLKDAFFQIPVEDRFRFYLSFTLPSPGGLQPHRRFAWRVLPQGFINSPALFNRALQEPLRQVSAAFSQS | |
| | LLVSYMDDILYASPTEEQRSQCYQALAARLRDLGFQVASEKTSQTPSPVPFLGQMVHEQIVTYQSLPTLQISSPISLHQLQAVLGDLQ | |
| | WVSRGTPTTRRPLQLLYSSLKRHHDPRAIIQLSPEQLQGIAELRQALSHNARSRYNEQEPLLAYVHLTRAGSTLVLFQKGAQFPLAYF | |
| | QTPLTDNQASPWGLLLLLGCQYLQTQALSSYAKPILKYYHNLPKTSLDNWIQSSEDPRVQELLQLWPQISSQGIQPPGPWKTLITRAE | |
| | VFLTPQFSPDPIPAALCLFSDGATGRGAYCLWKDHLLDFQAVPAPESAQKGELAGLLAGLAAAPPEPVNIWVDSKYLYSLLRTWVLG | |
| | AWLQPDPVPSYALLYKSLLRHPAIVVGHVRSHSSASHPIASLNNYVDQL | |
| BLVJ_ | GVLDTPPSHIGLEHLPPPPEVPQFPLNLERLQALQDLVHRSLEAGYISPWDGPGNNPVFPVRKPNGAWRFVHDLRATNALTKPIPAL | 4448 |
| P03361_2mutB | SPGPPDLTAPPTHPPHIICLDLKDAFFQIPVEDRFRFYLSFTLPSPGGLQPHRRFAWRVLPQGFINSPALFQRALQEPLRQVSAAFSQ | |
| | SLLVSYMDDILYASPTEEQRSQCYQALAARLRDLGFQVASEKTSQTPSPVPFLGQMVHEQIVTYQSLPTLQISSPISLHQLQAVLGDL | |
| | QWVSRGTPTTRRPLQLLYSSLKRHHDPRAIIQLSPEQLQGIAELRQALSHNARSRYNEQEPLLAYVHLTRAGSTLVLFQKGAQFPLAY | |
| | FQTPLTDNQASPWGLLLLLGCQYLQTQALSSYAKPILKYYHNLPKTSLDNWIQSSEDPRVQELLQLWPQISSQGIQPPGPWKTLITRA | |
| | EVFLTPQFSPDPIPAALCLFSDGATGRGAYCLWKDHLLDFQAVPAPESAQKGELAGLLAGLAAAPPEPVNIWVDSKYLYSLLRTWVL | |
| | GAWLQPDPVPSYALLYKSLLRHPAIVVGHVRSHSSASHPIASLNNYVDQL | |
| FFV_ | MDLLKPLTVERKGVKIKGYWNSQADITCVPKDLLQGEEPVRQQNVTTIHGTQEGDVYYVNLKIDGRRINTEVIGTTLDYAIITPGDVPW | 4449 |
| O93209 | ILKKPLELTIKLDLEEQQGTLLNNSILSKKGKEELKQLFEKYSALWQSWENQVGHRRIRPHKIATGTVKPTPQKQYHINPKAKPDIQIVIN | |
| | DLLKQGVLIQKESTMNTPVYPVPKPNGRWRMVLDYRAVNKVTPLIAVQNQHSYGILGSLFKGRYKTTIDLSNGFWAHPIVPEDYWITA | |
| | FTWQGKQYCWTVLPQGFLNSPGLFTGDVVDLLQGIPNVEVYVDDVYISHDSEKEHLEYLDILFNRLKEAGYIISLKKSNIANSIVDFLGF | |
| | QITNEGRGLTDTFKEKLENITAPTTLKQLQSILGLLNFARNFIPDFTELIAPLYALIPKSTKNYVPWQIEHSTTLETLITKLNGAEYLQGRK | |
| | GDKTLIMKVNASYTTGYIRYYNEGEKKPISYVSIVFSKTELKFTELEKLLTTVHKGLLKALDLSMGQNIHVYSPIVSMQNIQKTPQTAKK | |
| | ALASRWLSWLSYLEDPRIRFFYDPQMPALKDLPAVDTGKDNKKHPSNFQHIFYTDGSAITSPTKEGHLNAGMGIVYFINKDGNLQKQ | |
| | QEWSISLGNHTAQFAEIAAFEFALKKCLPLGGNILVVTDSNYVAKAYNEELDVWASNGFVNNRKKPLKHISKWKSVADLKRLRPDVVV | |
| | THEPGHQKLDSSPHAYGNNLADQLATQASFKVH | |
| FFV_ | MDLLKPLTVERKGVKIKGYWNSQADITCVPKDLLQGEEPVRQQNVTTIHGTQEGDVYYVNLKIDGRRINTEVIGTTLDYAIITPGDVPW | 4450 |
| O93209_2mut | ILKKPLELTIKLDLEEQQGTLLNNSILSKKGKEELKQLFEKYSALWQSWENQVGHRRIRPHKIATGTVKPTPQKQYHINPKAKPDIQIVIN | |
| | DLLKQGVLIQKESTMNTPVYPVPKPNGRWRMVLDYRAVNKVTPLIAVQNQHSYGILGSLFKGRYKTTIDLSNGFWAHPIVPEDYWITA | |
| | FTWQGKQYCWTVLPQGFLNSPGLFNGDVVDLLQGIPNVEVYVDDVYISHDSEKEHLEYLDILFNRLKEAGYIISLKKSNIANSIVDFLG | |
| | FQITNEGRGLTDTFKEKLENITAPTTLKQLQSILGLLNFARNFIPDFTELIAPLYALIPKSPKNYVPWQIEHSTTLETLITKLNGAEYLQGR | |
| | KGDKTLIMKVNASYTTGYIRYYNEGEKKPISYVSIVFSKTELKFTELEKLLTTVHKGLLKALDLSMGQNIHVYSPIVSMQNIQKTPQTAK | |
| | KALASRWLSWLSYLEDPRIRFFYDPQMPALKDLPAVDTGKDNKKHPSNFQHIFYTDGSAITSPTKEGHLNAGMGIVYFINKDGNLQK | |
| | QQEWSISLGNHTAQFAEIAAFEFALKKCLPLGGNILVVTDSNYVAKAYNEELDVWASNGFVNNRKKPLKHISKWKSVADLKRLRPDV | |
| | VVTHEPGHQKLDSSPHAYGNNLADQLATQASFKVH | |
| FFV_ | MDLLKPLTVERKGVKIKGYWNSQADITCVPKDLLQGEEPVRQQNVTTIHGTQEGDVYYVNLKIDGRRINTEVIGTTLDYAIITPGDVPW | 4451 |
| O93209_2mutA | ILKKPLELTIKLDLEEQQGTLLNNSILSKKGKEELKQLFEKYSALWQSWENQVGHRRIRPHKIATGTVKPTPQKQYHINPKAKPDIQIVIN | |
| | DLLKQGVLIQKESTMNTPVYPVPKPNGRWRMVLDYRAVNKVTPLIAVQNQHSYGILGSLFKGRYKTTIDLSNGFWAHPIVPEDYWITA | |
| | FTWQGKQYCWTVLPQGFLNSPGLFNGDVVDLLQGIPNVEVYVDDVYISHDSEKEHLEYLDILFNRLKEAGYIISLKKSNIANSIVDFLG | |
| | FQITNEGRGLTDTFKEKLENITAPTTLKQLQSILGKLNFARNFIPDFTELIAPLYALIPKSPKNYVPWQIEHSTTLETLITKLNGAEYLQGR | |
| | KGDKTLIMKVNASYTTGYIRYYNEGEKKPISYVSIVFSKTELKFTELEKLLTTVHKGLLKALDLSMGQNIHVYSPIVSMQNIQKTPQTAK | |
| | KALASRWLSWLSYLEDPRIRFFYDPQMPALKDLPAVDTGKDNKKHPSNFQHIFYTDGSAITSPTKEGHLNAGMGIVYFINKDGNLQK | |
| | QQEWSISLGNHTAQFAEIAAFEFALKKCLPLGGNILVVTDSNYVAKAYNEELDVWASNGFVNNRKKPLKHISKWKSVADLKRLRPDV | |
| | VVTHEPGHQKLDSSPHAYGNNLADQLATQASFKVH | |
| FFV_ | VPWILKKPLELTIKLDLEEQQGTLLNNSILSKKGKEELKQLFEKYSALWQSWENQVGHRRIRPHKIATGTVKPTPQKQYHINPKAKPDI | 4452 |
| O93209-Pro | QIVINDLLKQGVLIQKESTMNTPVYPVPKPNGRWRMVLDYRAVNKVTPLIAVQNQHSYGILGSLFKGRYKTTIDLSNGFWAHPIVPED | |
| | YWITAFTWQGKQYCWTVLPQGFLNSPGLFTGDVVDLLQGIPNVEVYVDDVYISHDSEKEHLEYLDILFNRLKEAGYIISLKKSNIANSIV | |
| | DFLGFQITNEGRGLTDTFKEKLENITAPTTLKQLQSILGLLNFARNFIPDFTELIAPLYALIPKSTKNYVPWQIEHSTTLETLITKLNGAEYL | |
| | QGRKGDKTLIMKVNASYTTGYIRYYNEGEKKPISYVSIVFSKTELKFTELEKLLTTVHKGLLKALDLSMGQNIHVYSPIVSMQNIQKTPQ | |
| | TAKKALASRWLSWLSYLEDPRIRFFYDPQMPALKDLPAVDTGKDNKKHPSNFQHIFYTDGSAITSPTKEGHLNAGMGIVYFINKDGNL | |
| | QKQQEWSISLGNHTAQFAEIAAFEFALKKCLPLGGNILVVTDSNYVAKAYNEELDVWASNGFVNNRKKPLKHISKWKSVADLKRLRP | |
| | DVVVTHEPGHQKLDSSPHAYGNNLADQLATQASFKVH | |
| FFV_ | VPWILKKPLELTIKLDLEEQQGTLLNNSILSKKGKEELKQLFEKYSALWQSWENQVGHRRIRPHKIATGTVKPTPQKQYHINPKAKPDI | 4453 |
| O93209- | QIVINDLLKQGVLIQKESTMNTPVYPVPKPNGRWRMVLDYRAVNKVTPLIAVQNQHSYGILGSLFKGRYKTTIDLSNGFWAHPIVPED | |
| Pro_2mut | YWITAFTWQGKQYCWTVLPQGFLNSPGLFNGDVVDLLQGIPNVEVYVDDVYISHDSEKEHLEYLDILFNRLKEAGYIISLKKSNIANSIV | |
| | DFLGFQITNEGRGLTDTFKEKLENITAPTTLKQLQSILGLLNFARNFIPDFTELIAPLYALIPKSPKNYVPWQIEHSTTLETLITKLNGAEYL | |
| | QGRKGDKTLIMKVNASYTTGYIRYYNEGEKKPISYVSIVFSKTELKFTELEKLLTTVHKGLLKALDLSMGQNIHVYSPIVSMQNIQKTPQ | |
| | TAKKALASRWLSWLSYLEDPRIRFFYDPQMPALKDLPAVDTGKDNKKHPSNFQHIFYTDGSAITSPTKEGHLNAGMGIVYFINKDGNL | |
| | QKQQEWSISLGNHTAQFAEIAAFEFALKKCLPLGGNILVVTDSNYVAKAYNEELDVWASNGFVNNRKKPLKHISKWKSVADLKRLRP | |
| | DVVVTHEPGHQKLDSSPHAYGNNLADQLATQASFKVH | |
| FFV_ | VPWILKKPLELTIKLDLEEQQGTLLNNSILSKKGKEELKQLFEKYSALWQSWENQVGHRRIRPHKIATGTVKPTPQKQYHINPKAKPDI | 4454 |
| O93209- | QIVINDLLKQGVLIQKESTMNTPVYPVPKPNGRWRMVLDYRAVNKVTPLIAVQNQHSYGILGSLFKGRYKTTIDLSNGFWAHPIVPED | |
| Pro_2mutA | YWITAFTWQGKQYCWTVLPQGFLNSPGLFNGDVVDLLQGIPNVEVYVDDVYISHDSEKEHLEYLDILFNRLKEAGYIISLKKSNIANSIV | |
| | DFLGFQITNEGRGLTDTFKEKLENITAPTTLKQLQSILGKLNFARNFIPDFTELIAPLYALIPKSPKNYVPWQIEHSTTLETLITKLNGAEY | |
| | LQGRKGDKTLIMKVNASYTTGYIRYYNEGEKKPISYVSIVFSKTELKFTELEKLLTTVHKGLLKALDLSMGQNIHVYSPIVSMQNIQKTP | |
| | QTAKKALASRWLSWLSYLEDPRIRFFYDPQMPALKDLPAVDTGKDNKKHPSNFQHIFYTDGSAITSPTKEGHLNAGMGIVYFINKDG | |
| | NLQKQQEWSISLGNHTAQFAEIAAFEFALKKCLPLGGNILVVTDSNYVAKAYNEELDVWASNGFVNNRKKPLKHISKWKSVADLKRL | |
| | RPDVVVTHEPGHQKLDSSPHAYGNNLADQLATQASFKVH | |
| FLV_ | TLQLEEEYRLFEPESTQKQEMDIWLKNFPQAWAETGGMGTAHCQAPVLIQLKATATPISIRQYPMPHEAYQGIKPHIRRMLDQGILKP | 4455 |
| P10273 | CQSPWNTPLLPVKKPGTEDYRPVQDLREVNKRVEDIHPTVPNPYNLLSTLPPSHPWYTVLDLKDAFFCLRLHSESQLLFAFEWRDPE | |
| | IGLSGQLTWTRLPQGFKNSPTLFDEALHSDLADFRVRYPALVLLQYVDDLLLAAATRTECLEGTKALLETLGNKGYRASAKKAQICLQ | |
| | EVTYLGYSLKDGQRWLTKARKEAILSIPVPKNSRQVREFLGTAGYCRLWIPGFAELAAPLYPLTRPGTLFQWGTEQQLAFEDIKKALL | |
| | SSPALGLPDITKPFELFIDENSGFAKGVLVQKLGPWKRPVAYLSKKLDTVASGWPPCLRMVAAIAILVKDAGKLTLGQPLTILTSHPVE | |
| | ALVRQPPNKWLSNARMTHYQAMLLDAERVHFGPTVSLNPATLLPLPSGGNHHDCLQILAETHGTRPDLTDQPLPDADLTWYTDGSS | |
| | FIRNGEREAGAAVTTESEVIWAAPLPPGTSAQRAELIALTQALKMAEGKKLTVYTDSRYAFATTHVHGEIYRRRGLLTSEGKEIKNKNE | |
| | ILALLEALFLPKRLSIIHCPGHQKGDSPQAKGNRLADDTAKKAATETHSSLTVLP | |
| FLV_ | TLQLEEEYRLFEPESTQKQEMDIWLKNFPQAWAETGGMGTAHCQAPVLIQLKATATPISIRQYPMPHEAYQGIKPHIRRMLDQGILKP | 4456 |
| P10273_3mut | CQSPWNTPLLPVKKPGTEDYRPVQDLREVNKRVEDIHPTVPNPYNLLSTLPPSHPWYTVLDLKDAFFCLRLHSESQLLFAFEWRDPE | |
| | IGLSGQLTWTRLPQGFKNSPTLFNEALHSDLADFRVRYPALVLLQYVDDLLLAAATRTECLEGTKALLETLGNKGYRASAKKAQICLQ | |
| | EVTYLGYSLKDGQRWLTKARKEAILSIPVPKNSRQVREFLGTAGYCRLWIPGFAELAAPLYPLTRPGTLFQWGTEQQLAFEDIKKALL | |
| | SSPALGLPDITKPFELFIDENSGFAKGVLVQKLGPWKRPVAYLSKKLDTVASGWPPCLRMVAAIAILVKDAGKLTLGQPLTILTSHPVE | |
| | ALVRQPPNKWLSNARMTHYQAMLLDAERVHFGPTVSLNPATLLPLPSGGNHHDCLQILAETHGTRPDLTDQPLPDADLTWYTDGSS | |
| | FIRNGEREAGAAVTTESEVIWAAPLPPGTSAQRAELIALTQALKMAEGKKLTVYTDSRYAFATTHVHGEIYRRRGWLTSEGKEIKNKN | |
| | EILALLEALFLPKRLSIIHCPGHQKGDSPQAKGNRLADDTAKKAATETHSSLTVLP | |
| FLV_ | TLQLEEEYRLFEPESTQKQEMDIWLKNFPQAWAETGGMGTAHCQAPVLIQLKATATPISIRQYPMPHEAYQGIKPHIRRMLDQGILKP | 4457 |
| P10273_3mutA | CQSPWNTPLLPVKKPGTEDYRPVQDLREVNKRVEDIHPTVPNPYNLLSTLPPSHPWYTVLDLKDAFFCLRLHSESQLLFAFEWRDPE | |
| | IGLSGQLTWTRLPQGFKNSPTLFNEALHSDLADFRVRYPALVLLQYVDDLLLAAATRTECLEGTKALLETLGNKGYRASAKKAQICLQ | |
| | EVTYLGYSLKDGQRWLTKARKEAILSIPVPKNSRQVREFLGKAGYCRLFIPGFAELAAPLYPLTRPGTLFQWGTEQQLAFEDIKKALLS | |
| | SPALGLPDITKPFELFIDENSGFAKGVLVQKLGPWKRPVAYLSKKLDTVASGWPPCLRMVAAIAILVKDAGKLTLGQPLTILTSHPVEA | |
| | LVRQPPNKWLSNARMTHYQAMLLDAERVHFGPTVSLNPATLLPLPSGGNHHDCLQILAETHGTRPDLTDQPLPDADLTWYTDGSSF | |
| | IRNGEREAGAAVTTESEVIWAAPLPPGTSAQRAELIALTQALKMAEGKKLTVYTDSRYAFATTHVHGEIYRRRGWLTSEGKEIKNKNEI | |
| | LALLEALFLPKRLSIIHCPGHQKGDSPQAKGNRLADDTAKKAATETHSSLTVLP | |
| FOAMV_ | MNPLQLLQPLPAEIKGTKLLAHWNSGATITCIPESFLEDEQPIKKTLIKTIHGEKQQNVYYVTFKVKGRKVEAEVIASPYEYILLSPTDVP | 4458 |
| P14350 | WLTQQPLQLTILVPLQEYQEKILSKTALPEDQKQQLKTLFVKYDNLWQHWENQVGHRKIRPHNIATGDYPPRPQKQYPINPKAKPSIQ | |
| | IVIDDLLKQGVLTPQNSTMNTPVYPVPKPDGRWRMVLDYREVNKTIPLTAAQNQHSAGILATIVRQKYKTTLDLANGFWAHPITPESY | |
| | WLTAFTWQGKQYCWTRLPQGFLNSPALFTADVVDLLKEIPNVQVYVDDIYLSHDDPKEHVQQLEKVFQILLQAGYVVSLKKSEIGQK | |
| | TVEFLGFNITKEGRGLTDTFKTKLLNITPPKDLKQLQSILGLLNFARNFIPNFAELVQPLYNLIASAKGKYIEWSEENTKQLNMVIEALNT | |
| | ASNLEERLPEQRLVIKVNTSPSAGYVRYYNETGKKPIMYLNYVFSKAELKFSMLEKLLTTMHKALIKAMDLAMGQEILVYSPIVSMTKIQ | |
| | KTPLPERKALPIRWITWMTYLEDPRIQFHYDKTLPELKHIPDVYTSSQSPVKHPSQYEGVFYTDGSAIKSPDPTKSNNAGMGIVHATY | |
| | KPEYQVLNQWSIPLGNHTAQMAEIAAVEFACKKALKIPGPVLVITDSFYVAESANKELPYWKSNGFVNNKKKPLKHISKWKSIAECLS | |
| | MKPDITIQHEKGISLQIPVFILKGNALADKLATQGSYVVN | |
| FOAMV_ | MNPLQLLQPLPAEIKGTKLLAHWNSGATITCIPESFLEDEQPIKKTLIKTIHGEKQQNVYYVTFKVKGRKVEAEVIASPYEYILLSPTDVP | 4459 |
| P14350_2mut | WLTQQPLQLTILVPLQEYQEKILSKTALPEDQKQQLKTLFVKYDNLWQHWENQVGHRKIRPHNIATGDYPPRPQKQYPINPKAKPSIQ | |
| | IVIDDLLKQGVLTPQNSTMNTPVYPVPKPDGRWRMVLDYREVNKTIPLTAAQNQHSAGILATIVRQKYKTTLDLANGFWAHPITPESY | |
| | WLTAFTWQGKQYCWTRLPQGFLNSPALFNADVVDLLKEIPNVQVYVDDIYLSHDDPKEHVQQLEKVFQILLQAGYVVSLKKSEIGQK | |
| | TVEFLGFNITKEGRGLTDTFKTKLLNITPPKDLKQLQSILGLLNFARNFIPNFAELVQPLYNLIAPAKGKYIEWSEENTKQLNMVIEALNT | |
| | ASNLEERLPEQRLVIKVNTSPSAGYVRYYNETGKKPIMYLNYVFSKAELKFSMLEKLLTTMHKALIKAMDLAMGQEILVYSPIVSMTKIQ | |
| | KTPLPERKALPIRWITWMTYLEDPRIQFHYDKTLPELKHIPDVYTSSQSPVKHPSQYEGVFYTDGSAIKSPDPTKSNNAGMGIVHATY | |
| | KPEYQVLNQWSIPLGNHTAQMAEIAAVEFACKKALKIPGPVLVITDSFYVAESANKELPYWKSNGFVNNKKKPLKHISKWKSIAECLS | |
| | MKPDITIQHEKGISLQIPVFILKGNALADKLATQGSYVVN | |
| FOAMV_ | MNPLQLLQPLPAEIKGTKLLAHWNSGATITCIPESFLEDEQPIKKTLIKTIHGEKQQNVYYVTFKVKGRKVEAEVIASPYEYILLSPTDVP | 4460 |
| P14350_2mutA | WLTQQPLQLTILVPLQEYQEKILSKTALPEDQKQQLKTLFVKYDNLWQHWENQVGHRKIRPHNIATGDYPPRPQKQYPINPKAKPSIQ | |
| | IVIDDLLKQGVLTPQNSTMNTPVYPVPKPDGRWRMVLDYREVNKTIPLTAAQNQHSAGILATIVRQKYKTTLDLANGFWAHPITPESY | |
| | WLTAFTWQGKQYCWTRLPQGFLNSPALFNADVVDLLKEIPNVQVYVDDIYLSHDDPKEHVQQLEKVFQILLQAGYVVSLKKSEIGQK | |
| | TVEFLGFNITKEGRGLTDTFKTKLLNITPPKDLKQLQSILGKLNFARNFIPNFAELVQPLYNLIAPAKGKYIEWSEENTKQLNMVIEALNT | |
| | ASNLEERLPEQRLVIKVNTSPSAGYVRYYNETGKKPIMYLNYVFSKAELKFSMLEKLLTTMHKALIKAMDLAMGQEILVYSPIVSMTKIQ | |
| | KTPLPERKALPIRWITWMTYLEDPRIQFHYDKTLPELKHIPDVYTSSQSPVKHPSQYEGVFYTDGSAIKSPDPTKSNNAGMGIVHATY | |
| | KPEYQVLNQWSIPLGNHTAQMAEIAAVEFACKKALKIPGPVLVITDSFYVAESANKELPYWKSNGFVNNKKKPLKHISKWKSIAECLS | |
| | MKPDITIQHEKGISLQIPVFILKGNALADKLATQGSYVVN | |
| FOAMV_ | VPWLTQQPLQLTILVPLQEYQEKILSKTALPEDQKQQLKTLFVKYDNLWQHWENQVGHRKIRPHNIATGDYPPRPQKQYPINPKAKP | 4461 |
| P14350-Pro | SIQIVIDDLLKQGVLTPQNSTMNTPVYPVPKPDGRWRMVLDYREVNKTIPLTAAQNQHSAGILATIVRQKYKTTLDLANGFWAHPITPE | |
| | SYWLTAFTWQGKQYCWTRLPQGFLNSPALFTADVVDLLKEIPNVQVYVDDIYLSHDDPKEHVQQLEKVFQILLQAGYVVSLKKSEIG | |
| | QKTVEFLGFNITKEGRGLTDTFKTKLLNITPPKDLKQLQSILGLLNFARNFIPNFAELVQPLYNLIASAKGKYIEWSEENTKQLNMVIEAL | |
| | NTASNLEERLPEQRLVIKVNTSPSAGYVRYYNETGKKPIMYLNYVFSKAELKFSMLEKLLTTMHKALIKAMDLAMGQEILVYSPIVSMT | |
| | KIQKTPLPERKALPIRWITWMTYLEDPRIQFHYDKTLPELKHIPDVYTSSQSPVKHPSQYEGVFYTDGSAIKSPDPTKSNNAGMGIVHA | |
| | TYKPEYQVLNQWSIPLGNHTAQMAEIAAVEFACKKALKIPGPVLVITDSFYVAESANKELPYWKSNGFVNNKKKPLKHISKWKSIAECL | |
| | SMKPDITIQHEKGISLQIPVFILKGNALADKLATQGSYVVN | |
| FOAMV_ | VPWLTQQPLQLTILVPLQEYQEKILSKTALPEDQKQQLKTLFVKYDNLWQHWENQVGHRKIRPHNIATGDYPPRPQKQYPINPKAKP | 4462 |
| P14350- | SIQIVIDDLLKQGVLTPQNSTMNTPVYPVPKPDGRWRMVLDYREVNKTIPLTAAQNQHSAGILATIVRQKYKTTLDLANGFWAHPITPE | |
| Pro_2mut | SYWLTAFTWQGKQYCWTRLPQGFLNSPALFNADVVDLLKEIPNVQVYVDDIYLSHDDPKEHVQQLEKVFQILLQAGYVVSLKKSEIG | |
| | QKTVEFLGFNITKEGRGLTDTFKTKLLNITPPKDLKQLQSILGLLNFARNFIPNFAELVQPLYNLIAPAKGKYIEWSEENTKQLNMVIEAL | |
| | NTASNLEERLPEQRLVIKVNTSPSAGYVRYYNETGKKPIMYLNYVFSKAELKFSMLEKLLTTMHKALIKAMDLAMGQEILVYSPIVSMT | |
| | KIQKTPLPERKALPIRWITWMTYLEDPRIQFHYDKTLPELKHIPDVYTSSQSPVKHPSQYEGVFYTDGSAIKSPDPTKSNNAGMGIVHA | |
| | TYKPEYQVLNQWSIPLGNHTAQMAEIAAVEFACKKALKIPGPVLVITDSFYVAESANKELPYWKSNGFVNNKKKPLKHISKWKSIAECL | |
| | SMKPDITIQHEKGISLQIPVFILKGNALADKLATQGSYVVN | |
| FOAMV_ | VPWLTQQPLQLTILVPLQEYQEKILSKTALPEDQKQQLKTLFVKYDNLWQHWENQVGHRKIRPHNIATGDYPPRPQKQYPINPKAKP | 4463 |
| P14350- | SIQIVIDDLLKQGVLTPQNSTMNTPVYPVPKPDGRWRMVLDYREVNKTIPLTAAQNQHSAGILATIVRQKYKTTLDLANGFWAHPITPE | |
| Pro_2mutA | SYWLTAFTWQGKQYCWTRLPQGFLNSPALFNADVVDLLKEIPNVQVYVDDIYLSHDDPKEHVQQLEKVFQILLQAGYVVSLKKSEIG | |
| | QKTVEFLGFNITKEGRGLTDTFKTKLLNITPPKDLKQLQSILGKLNFARNFIPNFAELVQPLYNLIAPAKGKYIEWSEENTKQLNMVIEAL | |
| | NTASNLEERLPEQRLVIKVNTSPSAGYVRYYNETGKKPIMYLNYVFSKAELKFSMLEKLLTTMHKALIKAMDLAMGQEILVYSPIVSMT | |
| | KIQKTPLPERKALPIRWITWMTYLEDPRIQFHYDKTLPELKHIPDVYTSSQSPVKHPSQYEGVFYTDGSAIKSPDPTKSNNAGMGIVHA | |
| | TYKPEYQVLNQWSIPLGNHTAQMAEIAAVEFACKKALKIPGPVLVITDSFYVAESANKELPYWKSNGFVNNKKKPLKHISKWKSIAECL | |
| | SMKPDITIQHEKGISLQIPVFILKGNALADKLATQGSYVVN | |
| GALV_ | VLNLEEEYRLHEKPVPSSIDPSWLQLFPTVWAERAGMGLANQVPPVVVELRSGASPVAVRQYPMSKEAREGIRPHIQKFLDLGVLVP | 4464 |
| P21414 | CRSPWNTPLLPVKKPGTNDYRPVQDLREINKRVQDIHPTVPNPYNLLSSLPPSYTWYSVLDLKDAFFCLRLHPNSQPLFAFEWKDPE | |
| | KGNTGQLTWTRLPQGFKNSPTLFDEALHRDLAPFRALNPQVVLLQYVDDLLVAAPTYEDCKKGTQKLLQELSKLGYRVSAKKAQLC | |
| | QREVTYLGYLLKEGKRWLTPARKATVMKIPVPTTPRQVREFLGTAGFCRLWIPGFASLAAPLYPLTKESIPFIWTEEHQQAFDHIKKAL | |
| | LSAPALALPDLTKPFTLYIDERAGVARGVLTQTLGPWRRPVAYLSKKLDPVASGWPTCLKAVAAVALLLKDADKLTLGQNVTVIASHS | |
| | LESIVRQPPDRWMTNARMTHYQSLLLNERVSFAPPAVLNPATLLPVESEATPVHRCSEILAEETGTRRDLEDQPLPGVPTWYTDGSS | |
| | FITEGKRRAGAPIVDGKRTVWASSLPEGTSAQKAELVALTQALRLAEGKNINIYTDSRYAFATAHIHGAIYKQRGLLTSAGKDIKNKEEI | |
| | LALLEAIHLPRRVAIIHCPGHQRGSNPVATGNRRADEAAKQAALSTRVLAGTTKP | |
| GALV_ | VLNLEEEYRLHEKPVPSSIDPSWLQLFPTVWAERAGMGLANQVPPVVVELRSGASPVAVRQYPMSKEAREGIRPHIQKFLDLGVLVP | 4465 |
| P21414_3mut | CRSPWNTPLLPVKKPGTNDYRPVQDLREINKRVQDIHPTVPNPYNLLSSLPPSYTWYSVLDLKDAFFCLRLHPNSQPLFAFEWKDPE | |
| | KGNTGQLTWTRLPQGFKNSPTLFNEALHRDLAPFRALNPQVVLLQYVDDLLVAAPTYEDCKKGTQKLLQELSKLGYRVSAKKAQLC | |
| | QREVTYLGYLLKEGKRWLTPARKATVMKIPVPTTPRQVREFLGTAGFCRLWIPGFASLAAPLYPLTKPSIPFIWTEEHQQAFDHIKKAL | |
| | LSAPALALPDLTKPFTLYIDERAGVARGVLTQTLGPWRRPVAYLSKKLDPVASGWPTCLKAVAAVALLLKDADKLTLGQNVTVIASHS | |
| | LESIVRQPPDRWMTNARMTHYQSLLLNERVSFAPPAVLNPATLLPVESEATPVHRCSEILAEETGTRRDLEDQPLPGVPTWYTDGSS | |
| | FITEGKRRAGAPIVDGKRTVWASSLPEGTSAQKAELVALTQALRLAEGKNINIYTDSRYAFATAHIHGAIYKQRGWLTSAGKDIKNKEE | |
| | ILALLEAIHLPRRVAIIHCPGHQRGSNPVATGNRRADEAAKQAALSTRVLAGTTKP | |
| GALV_ | VLNLEEEYRLHEKPVPSSIDPSWLQLFPTVWAERAGMGLANQVPPVVVELRSGASPVAVRQYPMSKEAREGIRPHIQKFLDLGVLVP | 4466 |
| P21414_3mutA | CRSPWNTPLLPVKKPGTNDYRPVQDLREINKRVQDIHPTVPNPYNLLSSLPPSYTWYSVLDLKDAFFCLRLHPNSQPLFAFEWKDPE | |
| | KGNTGQLTWTRLPQGFKNSPTLFNEALHRDLAPFRALNPQVVLLQYVDDLLVAAPTYEDCKKGTQKLLQELSKLGYRVSAKKAQLC | |
| | QREVTYLGYLLKEGKRWLTPARKATVMKIPVPTTPRQVREFLGKAGFCRLFIPGFASLAAPLYPLTKPSIPFIWTEEHQQAFDHIKKAL | |
| | LSAPALALPDLTKPFTLYIDERAGVARGVLTQTLGPWRRPVAYLSKKLDPVASGWPTCLKAVAAVALLLKDADKLTLGQNVTVIASHS | |
| | LESIVRQPPDRWMTNARMTHYQSLLLNERVSFAPPAVLNPATLLPVESEATPVHRCSEILAEETGTRRDLEDQPLPGVPTWYTDGSS | |
| | FITEGKRRAGAPIVDGKRTVWASSLPEGTSAQKAELVALTQALRLAEGKNINIYTDSRYAFATAHIHGAIYKQRGWLTSAGKDIKNKEE | |
| | ILALLEAIHLPRRVAIIHCPGHQRGSNPVATGNRRADEAAKQAALSTRVLAGTTKP | |
| HTL1A_ | AVLGLEHLPRPPQISQFPLNPERLQALQHLVRKALEAGHIEPYTGPGNNPVFPVKKANGTWRFIHDLRATNSLTIDLSSSSPGPPDLS | 4467 |
| P03362 | SLPTTLAHLQTIDLRDAFFQIPLPKQFQPYFAFTVPQQCNYGPGTRYAWKVLPQGFKNSPTLFEMQLAHILQPIRQAFPQCTILQYMD | |
| | DILLASPSHEDLLLLSEATMASLISHGLPVSENKTQQTPGTIKFLGQIISPNHLTYDAVPTVPIRSRWALPELQALLGEIQWVSKGTPTLR | |
| | QPLHSLYCALQRHTDPRDQIYLNPSQVQSLVQLRQALSQNCRSRLVQTLPLLGAIMLTLTGTTTVVFQSKEQWPLVWLHAPLPHTSQ | |
| | CPWGQLLASAVLLLDKYTLQSYGLLCQTIHHNISTQTFNQFIQTSDHPSVPILLHHSHRFKNLGAQTGELWNTFLKTAAPLAPVKALMP | |
| | VFTLSPVIINTAPCLFSDGSTSRAAYILWDKQILSQRSFPLPPPHKSAQRAELLGLLHGLSSARSWRCLNIFLDSKYLYHYLRTLALGTF | |
| | QGRSSQAPFQALLPRLLSRKVVYLHHVRSHTNLPDPISRLNALTDALLITPVLQL | |
| HTL1A_ | AVLGLEHLPRPPQISQFPLNPERLQALQHLVRKALEAGHIEPYTGPGNNPVFPVKKANGTWRFIHDLRATNSLTIDLSSSSPGPPDLS | 4468 |
| P03362_2mut | SLPTTLAHLQTIDLRDAFFQIPLPKQFQPYFAFTVPQQCNYGPGTRYAWKVLPQGFKNSPTLFQMQLAHILQPIRQAFPQCTILQYMD | |
| | DILLASPSHEDLLLLSEATMASLISHGLPVSENKTQQTPGTIKFLGQIISPNHLTYDAVPTVPIRSRWALPELQALLGEIQWVSKGTPTLR | |
| | QPLHSLYCALQPHTDPRDQIYLNPSQVQSLVQLRQALSQNCRSRLVQTLPLLGAIMLTLTGTTTVVFQSKEQWPLVWLHAPLPHTSQ | |
| | CPWGQLLASAVLLLDKYTLQSYGLLCQTIHHNISTQTFNQFIQTSDHPSVPILLHHSHRFKNLGAQTGELWNTFLKTAAPLAPVKALMP | |
| | VFTLSPVIINTAPCLFSDGSTSRAAYILWDKQILSQRSFPLPPPHKSAQRAELLGLLHGLSSARSWRCLNIFLDSKYLYHYLRTLALGTF | |
| | QGRSSQAPFQALLPRLLSRKVVYLHHVRSHTNLPDPISRLNALTDALLITPVLQL | |
| HTL1A_ | AVLGLEHLPRPPQISQFPLNPERLQALQHLVRKALEAGHIEPYTGPGNNPVFPVKKANGTWRFIHDLRATNSLTIDLSSSSPGPPDLS | 4469 |
| P03362_2mutB | SPPTTLAHLQTIDLRDAFFQIPLPKQFQPYFAFTVPQQCNYGPGTRYAWKVLPQGFKNSPTLFQMQLAHILQPIRQAFPQCTILQYMD | |
| | DILLASPSHEDLLLLSEATMASLISHGLPVSENKTQQTPGTIKFLGQIISPNHLTYDAVPTVPIRSRWALPELQALLGEIQWVSKGTPTLR | |
| | QPLHSLYCALQPHTDPRDQIYLNPSQVQSLVQLRQALSQNCRSRLVQTLPLLGAIMLTLTGTTTVVFQSKEQWPLVWLHAPLPHTSQ | |
| | CPWGQLLASAVLLLDKYTLQSYGLLCQTIHHNISTQTFNQFIQTSDHPSVPILLHHSHRFKNLGAQTGELWNTFLKTAAPLAPVKALMP | |
| | VFTLSPVIINTAPCLFSDGSTSRAAYILWDKQILSQRSFPLPPPHKSAQRAELLGLLHGLSSARSWRCLNIFLDSKYLYHYLRTLALGTF | |
| | QGRSSQAPFQALLPRLLSRKVVYLHHVRSHTNLPDPISRLNALTDALLITPVLQL | |
| HTL1C_ | AVLGLEHLPRPPEISQFPLNPERLQALQHLVRKALEAGHIEPYTGPGNNPVFPVKKANGTWRFIHDLRATNSLTIDLSSSSPGPPDLS | 4470 |
| P14078 | SLPTTLAHLQTIDLKDAFFQIPLPKQFQPYFAFTVPQQCNYGPGTRYAWRVLPQGFKNSPTLFEMQLAHILQPIRQAFPQCTILQYMD | |
| | DILLASPSHADLQLLSEATMASLISHGLPVSENKTQQTPGTIKFLGQIISPNHLTYDAVPKVPIRSRWALPELQALLGEIQWVSKGTPTL | |
| | RQPLHSLYCALQRHTDPRDQIYLNPSQVQSLVQLRQALSQNCRSRLVQTLPLLGAIMLTLTGTTTVVFQSKQQWPLVWLHAPLPHTS | |
| | QCPWGQLLASAVLLLDKYTLQSYGLLCQTIHHNISTQTFNQFIQTSDHPSVPILLHHSHRFKNLGAQTGELWNTFLKTTAPLAPVKAL | |
| | MPVFTLSPVIINTAPCLFSDGSTSQAAYILWDKHILSQRSFPLPPPHKSAQRAELLGLLHGLSSARSWRCLNIFLDSKYLYHYLRTLALG | |
| | TFQGRSSQAPFQALLPRLLSRKVVYLHHVRSHTNLPDPISRLNALTDALLITPVLQL | |
| HTL1C_ | AVLGLEHLPRPPEISQFPLNPERLQALQHLVRKALEAGHIEPYTGPGNNPVFPVKKANGTWRFIHDLRATNSLTIDLSSSSPGPPDLS | 4471 |
| P14078_2mut | SLPTTLAHLQTIDLKDAFFQIPLPKQFQPYFAFTVPQQCNYGPGTRYAWRVLPQGFKNSPTLFQMQLAHILQPIRQAFPQCTILQYMD | |
| | DILLASPSHADLQLLSEATMASLISHGLPVSENKTQQTPGTIKFLGQIISPNHLTYDAVPKVPIRSRWALPELQALLGEIQWVSKGTPTL | |
| | RQPLHSLYCALQPHTDPRDQIYLNPSQVQSLVQLRQALSQNCRSRLVQTLPLLGAIMLTLTGTTTVVFQSKQQWPLVWLHAPLPHTS | |
| | QCPWGQLLASAVLLLDKYTLQSYGLLCQTIHHNISTQTFNQFIQTSDHPSVPILLHHSHRFKNLGAQTGELWNTFLKTTAPLAPVKAL | |
| | MPVFTLSPVIINTAPCLFSDGSTSQAAYILWDKHILSQRSFPLPPPHKSAQRAELLGLLHGLSSARSWRCLNIFLDSKYLYHYLRTLALG | |
| | TFQGRSSQAPFQALLPRLLSRKVVYLHHVRSHTNLPDPISRLNALTDALLITPVLQL | |
| HTL1L_ | GLEHLPRPPEISQFPLNPERLQALQHLVRKALEAGHIEPYTGPGNNPVFPVKKANGTWRFIHDLRATNSLTVDLSSSSPGPPDLSSLP | 4472 |
| P0C211 | TTLAHLQTIDLKDAFFQIPLPKQFQPYFAFTVPQQCNYGPGTRYAWKVLPQGFKNSPTLFEMQLASILQPIRQAFPQCVILQYMDDILL | |
| | ASPSPEDLQQLSEATMASLISHGLPVSQDKTQQTPGTIKFLGQIISPNHITYDAVPTVPIRSRWALPELQALLGEIQWVSKGTPTLRQP | |
| | LHSLYCALQGHTDPRDQIYLNPSQVQSLMQLQQALSQNCRSRLAQTLPLLGAIMLTLTGTTTVVFQSKQQWPLVWLHAPLPHTSQC | |
| | PWGQLLASAVLLLDKYTLQSYGLLCQTIHHNISIQTFNQFIQTSDHPSVPILLHHSHRFKNLGAQTGELWNTFLKTAAPLAPVKALTPVF | |
| | TLSPIIINTAPCLFSDGSTSQAAYILWDKHILSQRSFPLPPPHKSAQQAELLGLLHGLSSARSWHCLNIFLDSKYLYHYLRTLALGTFQG | |
| | KSSQAPFQALLPRLLAHKVIYLHHVRSHTNLPDPISKLNALTDALLITPIL | |
| HTL1L_ | GLEHLPRPPEISQFPLNPERLQALQHLVRKALEAGHIEPYTGPGNNPVFPVKKANGTWRFIHDLRATNSLTVDLSSSSPGPPDLSSLP | 4473 |
| P0C211_2mut | TTLAHLQTIDLKDAFFQIPLPKQFQPYFAFTVPQQCNYGPGTRYAWKVLPQGFKNSPTLFQMQLASILQPIRQAFPQCVILQYMDDILL | |
| | ASPSPEDLQQLSEATMASLISHGLPVSQDKTQQTPGTIKFLGQIISPNHITYDAVPTVPIRSRWALPELQALLGEIQWVSKGTPTLRQP | |
| | LHSLYCALQGHTDPRDQIYLNPSQVQSLMQLQQALSQNCRSRLAQTLPLLGAIMLTLTGTTTVVFQSKQQWPLVWLHAPLPHTSQC | |
| | PWGQLLASAVLLLDKYTLQSYGLLCQTIHHNISIQTFNQFIQTSDHPSVPILLHHSHRFKNLGAQTGELWNTFLKTAAPLAPVKALTPVF | |
| | TLSPIIINTAPCLFSDGSTSQAAYILWDKHILSQRSFPLPPPHKSAQQAELLGLLHGLSSARSWHCLNIFLDSKYLYHYLRTLAWGTFQ | |
| | GKSSQAPFQALLPRLLAHKVIYLHHVRSHTNLPDPISKLNALTDALLITPIL | |
| HTL1L_ | GLEHLPRPPEISQFPLNPERLQALQHLVRKALEAGHIEPYTGPGNNPVFPVKKANGTWRFIHDLRATNSLTVDLSSSSPGPPDLSSPP | 4474 |
| P0C211_2mutB | TTLAHLQTIDLKDAFFQIPLPKQFQPYFAFTVPQQCNYGPGTRYAWKVLPQGFKNSPTLFQMQLASILQPIRQAFPQCVILQYMDDILL | |
| | ASPSPEDLQQLSEATMASLISHGLPVSQDKTQQTPGTIKFLGQIISPNHITYDAVPTVPIRSRWALPELQALLGEIQWVSKGTPTLRQP | |
| | LHSLYCALQGHTDPRDQIYLNPSQVQSLMQLQQALSQNCRSRLAQTLPLLGAIMLTLTGTTTVVFQSKQQWPLVWLHAPLPHTSQC | |
| | PWGQLLASAVLLLDKYTLQSYGLLCQTIHHNISIQTFNQFIQTSDHPSVPILLHHSHRFKNLGAQTGELWNTFLKTAAPLAPVKALTPVF | |
| | TLSPIIINTAPCLFSDGSTSQAAYILWDKHILSQRSFPLPPPHKSAQQAELLGLLHGLSSARSWHCLNIFLDSKYLYHYLRTLAWGTFQ | |
| | GKSSQAPFQALLPRLLAHKVIYLHHVRSHTNLPDPISKLNALTDALLITPIL | |
| HTL32_ | GLEHLPPPPEVSQFPLNPERLQALTDLVSRALEAKHIEPYQGPGNNPIFPVKKPNGKWRFIHDLRATNSVTRDLASPSPGPPDLTSLP | 4475 |
| Q0R5R2 | QGLPHLRTIDLTDAFFQIPLPTIFQPYFAFTLPQPNNYGPGTRYSWRVLPQGFKNSPTLFEQQLSHILTPVRKTFPNSLIIQYMDDILLA | |
| | SPAPGELAALTDKVTNALTKEGLPLSPEKTQATPGPIHFLGQVISQDCITYETLPSINVKSTWSLAELQSMLGELQWVSKGTPVLRSSL | |
| | HQLYLALRGHRDPRDTIKLTSIQVQALRTIQKALTLNCRSRLVNQLPILALIMLRPTGTTAVLFQTKQKWPLVWLHTPHPATSLRPWGQ | |
| | LLANAVIILDKYSLQHYGQVCKSFHHNISNQALTYYLHTSDQSSVAILLQHSHRFHNLGAQPSGPWRSLLQMPQIFQNIDVLRPPFTIS | |
| | PVVINHAPCLFSDGSASKAAFIIWDRQVIHQQVLSLPSTCSAQAGELFGLLAGLQKSQPWVALNIFLDSKFLIGHLRRMALGAFPGPST | |
| | QCELHTQLLPLLQGKTVYVHHVRSHTLLQDPISRLNEATDALMLAPLLPL | |
| HTL32_ | GLEHLPPPPEVSQFPLNPERLQALTDLVSRALEAKHIEPYQGPGNNPIFPVKKPNGKWRFIHDLRATNSVTRDLASPSPGPPDLTSLP | 4476 |
| Q0R5R2_2mut | QGLPHLRTIDLTDAFFQIPLPTIFQPYFAFTLPQPNNYGPGTRYSWRVLPQGFKNSPTLFQQQLSHILTPVRKTFPNSLIIQYMDDILLA | |
| | SPAPGELAALTDKVTNALTKEGLPLSPEKTQATPGPIHFLGQVISQDCITYETLPSINVKSTWSLAELQSMLGELQWVSKGTPVLRSSL | |
| | HQLYLALRGHRDPRDTIKLTSIQVQALRTIQKALTLNCRSRLVNQLPILALIMLRPTGTTAVLFQTKQKWPLVWLHTPHPATSLRPWGQ | |
| | LLANAVIILDKYSLQHYGQVCKSFHHNISNQALTYYLHTSDQSSVAILLQHSHRFHNLGAQPSGPWRSLLQMPQIFQNIDVLRPPFTIS | |
| | PVVINHAPCLFSDGSASKAAFIIWDRQVIHQQVLSLPSTCSAQAGELFGLLAGLQKSQPWVALNIFLDSKFLIGHLRRMAWGAFPGPS | |
| | TQCELHTQLLPLLQGKTVYVHHVRSHTLLQDPISRLNEATDALMLAPLLPL | |
| HTL32_ | GLEHLPPPPEVSQFPLNPERLQALTDLVSRALEAKHIEPYQGPGNNPIFPVKKPNGKWRFIHDLRATNSVTRDLASPSPGPPDLTSPP | 4477 |
| Q0R5R2_2mutB | QGLPHLRTIDLTDAFFQIPLPTIFQPYFAFTLPQPNNYGPGTRYSWRVLPQGFKNSPTLFQQQLSHILTPVRKTFPNSLIIQYMDDILLA | |
| | SPAPGELAALTDKVTNALTKEGLPLSPEKTQATPGPIHFLGQVISQDCITYETLPSINVKSTWSLAELQSMLGELQWVSKGTPVLRSSL | |
| | HQLYLALRGHRDPRDTIKLTSIQVQALRTIQKALTLNCRSRLVNQLPILALIMLRPTGTTAVLFQTKQKWPLVWLHTPHPATSLRPWGQ | |
| | LLANAVIILDKYSLQHYGQVCKSFHHNISNQALTYYLHTSDQSSVAILLQHSHRFHNLGAQPSGPWRSLLQMPQIFQNIDVLRPPFTIS | |
| | PVVINHAPCLFSDGSASKAAFIIWDRQVIHQQVLSLPSTCSAQAGELFGLLAGLQKSQPWVALNIFLDSKFLIGHLRRMAWGAFPGPS | |
| | TQCELHTQLLPLLQGKTVYVHHVRSHTLLQDPISRLNEATDALMLAPLLPL | |
| HTL3P_ | GLEHLPPPPEVSQFPLNPERLQALTDLVSRALEAKHIEPYQGPGNNPIFPVKKPNGKWRFIHDLRATNSLTRDLASPSPGPPDLTSLP | 4478 |
| Q4U0X6 | QDLPHLRTIDLTDAFFQIPLPAVFQPYFAFTLPQPNNHGPGTRYSWRVLPQGFKNSPTLFEQQLSHILAPVRKAFPNSLIIQYMDDILLA | |
| | SPALRELTALTDKVTNALTKEGLPMSLEKTQATPGSIHFLGQVISPDCITYETLPSIHVKSIWSLAELQSMLGELQWVSKGTPVLRSSL | |
| | HQLYLALRGHRDPRDTIELTSTQVQALKTIQKALALNCRSRLVSQLPILALIILRPTGTTAVLFQTKQKWPLVWLHTPHPATSLRPWGQ | |
| | LLANAIITLDKYSLQHYGQICKSFHHNISNQALTYYLHTSDQSSVAILLQHSHRFHNLGAQPSGPWRSLLQVPQIFQNIDVLRPPFIISPV | |
| | VIDHAPCLFSDGATSKAAFILWDKQVIHQQVLPLPSTCSAQAGELFGLLAGLQKSKPWPALNIFLDSKFLIGHLRRMALGAFLGPSTQC | |
| | DLHARLFPLLQGKTVYVHHVRSHTLLQDPISRLNEATDALMLAPLLPL | |
| HTL3P_ | GLEHLPPPPEVSQFPLNPERLQALTDLVSRALEAKHIEPYQGPGNNPIFPVKKPNGKWRFIHDLRATNSLTRDLASPSPGPPDLTSLP | 4479 |
| Q4U0X6_2mut | QDLPHLRTIDLTDAFFQIPLPAVFQPYFAFTLPQPNNHGPGTRYSWRVLPQGFKNSPTLFQQQLSHILAPVRKAFPNSLIIQYMDDILL | |
| | ASPALRELTALTDKVTNALTKEGLPMSLEKTQATPGSIHFLGQVISPDCITYETLPSIHVKSIWSLAELQSMLGELQWVSKGTPVLRSS | |
| | LHQLYLALRGHRDPRDTIELTSTQVQALKTIQKALALNCRSRLVSQLPILALIILRPTGTTAVLFQTKQKWPLVWLHTPHPATSLRPWG | |
| | QLLANAIITLDKYSLQHYGQICKSFHHNISNQALTYYLHTSDQSSVAILLQHSHRFHNLGAQPSGPWRSLLQVPQIFQNIDVLRPPFIISP | |
| | VVIDHAPCLFSDGATSKAAFILWDKQVIHQQVLPLPSTCSAQAGELFGLLAGLQKSKPWPALNIFLDSKFLIGHLRRMAWGAFLGPST | |
| | QCDLHARLFPLLQGKTVYVHHVRSHTLLQDPISRLNEATDALMLAPLLPL | |
| HTL3P_ | GLEHLPPPPEVSQFPLNPERLQALTDLVSRALEAKHIEPYQGPGNNPIFPVKKPNGKWRFIHDLRATNSLTRDLASPSPGPPDLTSPP | 4480 |
| Q4U0X6_2mutB | QDLPHLRTIDLTDAFFQIPLPAVFQPYFAFTLPQPNNHGPGTRYSWRVLPQGFKNSPTLFQQQLSHILAPVRKAFPNSLIIQYMDDILL | |
| | ASPALRELTALTDKVTNALTKEGLPMSLEKTQATPGSIHFLGQVISPDCITYETLPSIHVKSIWSLAELQSMLGELQWVSKGTPVLRSS | |
| | LHQLYLALRGHRDPRDTIELTSTQVQALKTIQKALALNCRSRLVSQLPILALIILRPTGTTAVLFQTKQKWPLVWLHTPHPATSLRPWG | |
| | QLLANAIITLDKYSLQHYGQICKSFHHNISNQALTYYLHTSDQSSVAILLQHSHRFHNLGAQPSGPWRSLLQVPQIFQNIDVLRPPFIISP | |
| | VVIDHAPCLFSDGATSKAAFILWDKQVIHQQVLPLPSTCSAQAGELFGLLAGLQKSKPWPALNIFLDSKFLIGHLRRMAWGAFLGPST | |
| | QCDLHARLFPLLQGKTVYVHHVRSHTLLQDPISRLNEATDALMLAPLLPL | |
| HTLV2_ | HLPPPPQVDQFPLNLPERLQALNDLVSKALEAGHIEPYSGPGNNPVFPVKKPNGKWRFIHDLRATNAITTTLTSPSPGPPDLTSLPTA | 4481 |
| P03363_2mut | LPHLQTIDLTDAFFQIPLPKQYQPYFAFTIPQPCNYGPGTRYAWTVLPQGFKNSPTLFQQQLAAVLNPMRKMFPTSTIVQYMDDILLA | |
| | SPTNEELQQLSQLTLQALTTHGLPISQEKTQQTPGQIRFLGQVISPNHITYESTPTIPIKSQWTLTELQVILGEIQWVSKGTPILRKHLQS | |
| | LYSALHPYRDPRACITLTPQQLHALHAIQQALQHNCRGRLNPALPLLGLISLSTSGTTSVIFQPKQNWPLAWLHTPHPPTSLCPWGHL | |
| | LACTILTLDKYTLQHYGQLCQSFHHNMSKQALCDFLRNSPHPSVGILIHHMGRFHNLGSQPSGPWKTLLHLPTLLQEPRLLRPIFTLS | |
| | PVVLDTAPCLFSDGSPQKAAYVLWDQTILQQDITPLPSHETHSAQKGELLALICGLRAAKPWPSLNIFLDSKYLIKYLHSLAIGAFLGTS | |
| | AHQTLQAALPPLLQGKTIYLHHVRSHTNLPDPISTFNEYTDSLILAPLVPL | |
| JSRV_ | PLGTSDSPVTHADPIDWKSEEPVWVDQWPLTQEKLSAAQQLVQEQLRLGHIEPSTSAWNSPIFVIKKKSGKWRLLQDLRKVNETMM | 4482 |
| P31623 | HMGALQPGLPTPSAIPDKSYIIVIDLKDCFYTIPLAPQDCKRFAFSLPSVNFKEPMQRYQWRVLPQGMTNSPTLCQKFVATAIAPVRQ | |
| | RFPQLYLVHYMDDILLAHTDEHLLYQAFSILKQHLSLNGLVIADEKIQTHFPYNYLGFSLYPRVYNTQLVKLQTDHLKTLNDFQKLLGDI | |
| | NWIRPYLKLPTYTLQPLFDILKGDSDPASPRTLSLEGRTALQSIEEAIRQQQITYCDYQRSWGLYILPTPRAPTGVLYQDKPLRWIYLSA | |
| | TPTKHLLPYYELVAKIIAKGRHEAIQYFGMEPPFICVPYALEQQDWLFQFSDNWSIAFANYPGQITHHYPSDKLLQFASSHAFIFPKIVR | |
| | RQPIPEATLIFTDGSSNGTAALIINHQTYYAQTSFSSAQVVELFAVHQALLTVPTSFNLFTDSSYVVGALQMIETVPIIGTTSPEVLNLFT | |
| | LIQQVLHCRQHPCFFGHIRAHSTLPGALVQGNHTADVLTKQVFFQS | |
| JSRV_ | PLGTSDSPVTHADPIDWKSEEPVWVDQWPLTQEKLSAAQQLVQEQLRLGHIEPSTSAWNSPIFVIKKKSGKWRLLQDLRKVNETMM | 4483 |
| P31623_2mutB | HMGALQPGLPTPSPIPDKSYIIVIDLKDCFYTIPLAPQDCKRFAFSLPSVNFKEPMQRYQWRVLPQGMTNSPTLCQKFVATAIAPVRQ | |
| | RFPQLYLVHYMDDILLAHTDEHLLYQAFSILKQHLSLNGLVIADEKIQTHFPYNYLGFSLYPRVYNTQLVKLQTDHLKTLNDFQKLLGDI | |
| | NWIRPYLKLPTYTLQPLFDILKGDSDPASPRTLSLEGRTALQSIEEAIRQQQITYCDYQRSWGLYILPTPRAPTGVLYQDKPLRWIYLSA | |
| | TPTKHLLPYYELVAKIIAKGRHEAIQYFGMEPPFICVPYALEQQDWLFQFSDNWSIAFANYPGQITHHYPSDKLLQFASSHAFIFPKIVR | |
| | RQPIPEATLIFTDGSSNGTAALIINHQTYYAQTSFSSAQVVELFAVHQALLTVPTSFNLFTDSSYVVGALQMIETVPIIGTTSPEVLNLFT | |
| | LIQQVLHCRQHPCFFGHIRAHSTLPGALVQGNHTADVLTKQVFFQS | |
| KORV_ | TLGDQGSRGSDPLPEPRVTLTVEGIPTEFLVNTGAEHSVLTKPMGKMGSKRTVVAGATGSKVYPWTTKRLLKIGQKQVTHSFLVIPE | 4484 |
| Q9TTC1 | CPAPLLGRDLLTKLKAQIQFSTEGPQVTWEDRPAMCLVLNLEEEYRLHEKPVPPSIDPSWLQLFPMVWAEKAGMGLANQVPPVVVE | |
| | LKSDASPVAVRQYPMSKEAREGIRPHIQRFLDLGILVPCQSPWNTPLLPVKKPGTNDYRPVQDLREVNKRVQDIHPTVPNPYNLLSSL | |
| | PPSHTWYSVLDLKDAFFCLKLHPNSQPLFAFEWRDPEKGNTGQLTWTRLPQGFKNSPTLFDEALHRDLASFRALNPQVVMLQYVD | |
| | DLLVAAPTYRDCKEGTRRLLQELSKLGYRVSAKKAQLCREEVTYLGYLLKGGKRWLTPARKATVMKIPTPTTPRQVREFLGTAGFCR | |
| | LWIPGFASLAAPLYPLTREKVPFTWTEAHQEAFGRIKEALLSAPALALPDLTKPFALYVDEKEGVARGVLTQTLGPWRRPVAYLSKKL | |
| | DPVASGWPTCLKAIAAVALLLKDADKLTLGQNVLVIAPHNLESIVRQPPDRWMTNARMTHYQSLLLNERVSFAPPAILNPATLLPVES | |
| | DDTPIHICSEILAEETGTRPDLRDQPLPGVPAWYTDGSSFIMDGRRQAGAAIVDNKRTVWASNLPEGTSAQKAELIALTQALRLAEGK | |
| | SINIYTDSRYAFATAHVHGAIYKQRGLLTSAGKDIKNKEEILALLEAIHLPKRVAIIHCPGHQRGTDPVATGNRKADEAAKQAAQSTRILT | |
| | ETTKN | |
| KORV_ | TLGDQGSRGSDPLPEPRVTLTVEGIPTEFLVNTGAEHSVLTKPMGKMGSKRTVVAGATGSKVYPWTTKRLLKIGQKQVTHSFLVIPE | 4485 |
| Q9TTC1_3mut | CPAPLLGRDLLTKLKAQIQFSTEGPQVTWEDRPAMCLVLNLEEEYRLHEKPVPPSIDPSWLQLFPMVWAEKAGMGLANQVPPVVVE | |
| | LKSDASPVAVRQYPMSKEAREGIRPHIQRFLDLGILVPCQSPWNTPLLPVKKPGTNDYRPVQDLREVNKRVQDIHPTVPNPYNLLSSL | |
| | PPSHTWYSVLDLKDAFFCLKLHPNSQPLFAFEWRDPEKGNTGQLTWTRLPQGFKNSPTLFNEALHRDLASFRALNPQVVMLQYVD | |
| | DLLVAAPTYRDCKEGTRRLLQELSKLGYRVSAKKAQLCREEVTYLGYLLKGGKRWLTPARKATVMKIPTPTTPRQVREFLGTAGFCR | |
| | LWIPGFASLAAPLYPLTRPKVPFTWTEAHQEAFGRIKEALLSAPALALPDLTKPFALYVDEKEGVARGVLTQTLGPWRRPVAYLSKKL | |
| | DPVASGWPTCLKAIAAVALLLKDADKLTLGQNVLVIAPHNLESIVRQPPDRWMTNARMTHYQSLLLNERVSFAPPAILNPATLLPVES | |
| | DDTPIHICSEILAEETGTRPDLRDQPLPGVPAWYTDGSSFIMDGRRQAGAAIVDNKRTVWASNLPEGTSAQKAELIALTQALRLAEGK | |
| | SINIYTDSRYAFATAHVHGAIYKQRGWLTSAGKDIKNKEEILALLEAIHLPKRVAIIHCPGHQRGTDPVATGNRKADEAAKQAAQSTRIL | |
| | TETTKN | |
| KORV_ | TLGDQGSRGSDPLPEPRVTLTVEGIPTEFLVNTGAEHSVLTKPMGKMGSKRTVVAGATGSKVYPWTTKRLLKIGQKQVTHSFLVIPE | 4486 |
| Q9TTC1_3mutA | CPAPLLGRDLLTKLKAQIQFSTEGPQVTWEDRPAMCLVLNLEEEYRLHEKPVPPSIDPSWLQLFPMVWAEKAGMGLANQVPPVVVE | |
| | LKSDASPVAVRQYPMSKEAREGIRPHIQRFLDLGILVPCQSPWNTPLLPVKKPGTNDYRPVQDLREVNKRVQDIHPTVPNPYNLLSSL | |
| | PPSHTWYSVLDLKDAFFCLKLHPNSQPLFAFEWRDPEKGNTGQLTWTRLPQGFKNSPTLFNEALHRDLASFRALNPQVVMLQYVD | |
| | DLLVAAPTYRDCKEGTRRLLQELSKLGYRVSAKKAQLCREEVTYLGYLLKGGKRWLTPARKATVMKIPTPTTPRQVREFLGKAGFCR | |
| | LFIPGFASLAAPLYPLTRPKVPFTWTEAHQEAFGRIKEALLSAPALALPDLTKPFALYVDEKEGVARGVLTQTLGPWRRPVAYLSKKLD | |
| | PVASGWPTCLKAIAAVALLLKDADKLTLGQNVLVIAPHNLESIVRQPPDRWMTNARMTHYQSLLLNERVSFAPPAILNPATLLPVESD | |
| | DTPIHICSEILAEETGTRPDLRDQPLPGVPAWYTDGSSFIMDGRRQAGAAIVDNKRTVWASNLPEGTSAQKAELIALTQALRLAEGKSI | |
| | NIYTDSRYAFATAHVHGAIYKQRGWLTSAGKDIKNKEEILALLEAIHLPKRVAIIHCPGHQRGTDPVATGNRKADEAAKQAAQSTRILTE | |
| | TTKN | |
| KORV_ | LLGRDLLTKLKAQIQFSTEGPQVTWEDRPAMCLVLNLEEEYRLHEKPVPPSIDPSWLQLFPMVWAEKAGMGLANQVPPVVVELKSD | 4487 |
| Q9TTC1-Pro | ASPVAVRQYPMSKEAREGIRPHIQRFLDLGILVPCQSPWNTPLLPVKKPGTNDYRPVQDLREVNKRVQDIHPTVPNPYNLLSSLPPS | |
| | HTWYSVLDLKDAFFCLKLHPNSQPLFAFEWRDPEKGNTGQLTWTRLPQGFKNSPTLFDEALHRDLASFRALNPQVVMLQYVDDLLV | |
| | AAPTYRDCKEGTRRLLQELSKLGYRVSAKKAQLCREEVTYLGYLLKGGKRWLTPARKATVMKIPTPTTPRQVREFLGTAGFCRLWIP | |
| | GFASLAAPLYPLTREKVPFTWTEAHQEAFGRIKEALLSAPALALPDLTKPFALYVDEKEGVARGVLTQTLGPWRRPVAYLSKKLDPVA | |
| | SGWPTCLKAIAAVALLLKDADKLTLGQNVLVIAPHNLESIVRQPPDRWMTNARMTHYQSLLLNERVSFAPPAILNPATLLPVESDDTPI | |
| | HICSEILAEETGTRPDLRDQPLPGVPAWYTDGSSFIMDGRRQAGAAIVDNKRTVWASNLPEGTSAQKAELIALTQALRLAEGKSINIYT | |
| | DSRYAFATAHVHGAIYKQRGLLTSAGKDIKNKEEILALLEAIHLPKRVAIIHCPGHQRGTDPVATGNRKADEAAKQAAQSTRILTETTKN | |
| KORV_ | LLGRDLLTKLKAQIQFSTEGPQVTWEDRPAMCLVLNLEEEYRLHEKPVPPSIDPSWLQLFPMVWAEKAGMGLANQVPPVVVELKSD | 4488 |
| Q9TTC1- | ASPVAVRQYPMSKEAREGIRPHIQRFLDLGILVPCQSPWNTPLLPVKKPGTNDYRPVQDLREVNKRVQDIHPTVPNPYNLLSSLPPS | |
| Pro_3mut | HTWYSVLDLKDAFFCLKLHPNSQPLFAFEWRDPEKGNTGQLTWTRLPQGFKNSPTLFNEALHRDLASFRALNPQVVMLQYVDDLLV | |
| | AAPTYRDCKEGTRRLLQELSKLGYRVSAKKAQLCREEVTYLGYLLKGGKRWLTPARKATVMKIPTPTTPRQVREFLGTAGFCRLWIP | |
| | GFASLAAPLYPLTRPKVPFTWTEAHQEAFGRIKEALLSAPALALPDLTKPFALYVDEKEGVARGVLTQTLGPWRRPVAYLSKKLDPVA | |
| | SGWPTCLKAIAAVALLLKDADKLTLGQNVLVIAPHNLESIVRQPPDRWMTNARMTHYQSLLLNERVSFAPPAILNPATLLPVESDDTPI | |
| | HICSEILAEETGTRPDLRDQPLPGVPAWYTDGSSFIMDGRRQAGAAIVDNKRTVWASNLPEGTSAQKAELIALTQALRLAEGKSINIYT | |
| | DSRYAFATAHVHGAIYKQRGWLTSAGKDIKNKEEILALLEAIHLPKRVAIIHCPGHQRGTDPVATGNRKADEAAKQAAQSTRILTETTK | |
| | N | |
| KORV_ | LLGRDLLTKLKAQIQFSTEGPQVTWEDRPAMCLVLNLEEEYRLHEKPVPPSIDPSWLQLFPMVWAEKAGMGLANQVPPVVVELKSD | 4489 |
| Q9TTC1- | ASPVAVRQYPMSKEAREGIRPHIQRFLDLGILVPCQSPWNTPLLPVKKPGTNDYRPVQDLREVNKRVQDIHPTVPNPYNLLSSLPPS | |
| Pro_3mutA | HTWYSVLDLKDAFFCLKLHPNSQPLFAFEWRDPEKGNTGQLTWTRLPQGFKNSPTLFNEALHRDLASFRALNPQVVMLQYVDDLLV | |
| | AAPTYRDCKEGTRRLLQELSKLGYRVSAKKAQLCREEVTYLGYLLKGGKRWLTPARKATVMKIPTPTTPRQVREFLGKAGFCRLFIP | |
| | GFASLAAPLYPLTRPKVPFTWTEAHQEAFGRIKEALLSAPALALPDLTKPFALYVDEKEGVARGVLTQTLGPWRRPVAYLSKKLDPVA | |
| | SGWPTCLKAIAAVALLLKDADKLTLGQNVLVIAPHNLESIVRQPPDRWMTNARMTHYQSLLLNERVSFAPPAILNPATLLPVESDDTPI | |
| | HICSEILAEETGTRPDLRDQPLPGVPAWYTDGSSFIMDGRRQAGAAIVDNKRTVWASNLPEGTSAQKAELIALTQALRLAEGKSINIYT | |
| | DSRYAFATAHVHGAIYKQRGWLTSAGKDIKNKEEILALLEAIHLPKRVAIIHCPGHQRGTDPVATGNRKADEAAKQAAQSTRILTETTK | |
| | N | |
| MLVAV_ | TLNLEDEYRLYETSAEPEVSPGSTWLSDFPQAWAETGGMGLAVRQAPLIIPLKATSTPVSIKQYPMSQEAKLGIKPHIQRLLDQGILVP | 4490 |
| P03356 | CQSPWNTPLLPVKKPGTNDYRPVQDLREVNKRVEDIHPTVPNPYNLLSGLPPSHRWYTVLDLKDAFFCLRLHPTSQPLFAFEWRDP | |
| | GMGISGQLTWTRLPQGFKNSPTLFDEALHRDLADFRIQHPDLILLQYVDDILLAATSELDCQQGTRALLLTLGNLGYRASAKKAQLCQ | |
| | KQVKYLGYLLKEGQRWLTEARKETVMGQPTPKTPRQLREFLGTAGFCRLWIPGFAEMAAPLYPLTKTGTLFNWGPDQQKAYQEIKQ | |
| | ALLTAPALGLPDLTKPFELFVDEKQGYAKGVLTQKLGPWRRPVAYLSKKLDPVAAGWPPCLRMVAAIAVLRKDAGKLTMGQPLVILA | |
| | PHAVEALVKQPPDRWLSNARMTHYQAMLLDTDRVQFGPVVALNPATLLPLPEEGAPHDCLEILAETHGTRPDLTDQPIPDADHTWY | |
| | TDGSSFLQEGQRKAGAAVTTETEVIWARALPAGTSAQRAELIALTQALKMAEGKRLNVYTDSRYAFATAHIHGEIYRRRGLLTSEGRE | |
| | IKNKSEILALLKALFLPKRLSIIHCLGHQKGDSAEARGNRLADQAAREAAIKTPPDTSTLL | |
| MLVAV_ | TLNLEDEYRLYETSAEPEVSPGSTWLSDFPQAWAETGGMGLAVRQAPLIIPLKATSTPVSIKQYPMSQEAKLGIKPHIQRLLDQGILVP | 4491 |
| P03356_3mut | CQSPWNTPLLPVKKPGTNDYRPVQDLREVNKRVEDIHPTVPNPYNLLSGLPPSHRWYTVLDLKDAFFCLRLHPTSQPLFAFEWRDP | |
| | GMGISGQLTWTRLPQGFKNSPTLFNEALHRDLADFRIQHPDLILLQYVDDILLAATSELDCQQGTRALLLTLGNLGYRASAKKAQLCQ | |
| | KQVKYLGYLLKEGQRWLTEARKETVMGQPTPKTPRQLREFLGTAGFCRLWIPGFAEMAAPLYPLTKPGTLFNWGPDQQKAYQEIKQ | |
| | ALLTAPALGLPDLTKPFELFVDEKQGYAKGVLTQKLGPWRRPVAYLSKKLDPVAAGWPPCLRMVAAIAVLRKDAGKLTMGQPLVILA | |
| | PHAVEALVKQPPDRWLSNARMTHYQAMLLDTDRVQFGPVVALNPATLLPLPEEGAPHDCLEILAETHGTRPDLTDQPIPDADHTWY | |
| | TDGSSFLQEGQRKAGAAVTTETEVIWARALPAGTSAQRAELIALTQALKMAEGKRLNVYTDSRYAFATAHIHGEIYRRRGWLTSEGR | |
| | EIKNKSEILALLKALFLPKRLSIIHCLGHQKGDSAEARGNRLADQAAREAAIKTPPDTSTLL | |
| MLVAV_ | TLNLEDEYRLYETSAEPEVSPGSTWLSDFPQAWAETGGMGLAVRQAPLIIPLKATSTPVSIKQYPMSQEAKLGIKPHIQRLLDQGILVP | 4492 |
| P03356_3mutA | CQSPWNTPLLPVKKPGTNDYRPVQDLREVNKRVEDIHPTVPNPYNLLSGLPPSHRWYTVLDLKDAFFCLRLHPTSQPLFAFEWRDP | |
| | GMGISGQLTWTRLPQGFKNSPTLFNEALHRDLADFRIQHPDLILLQYVDDILLAATSELDCQQGTRALLLTLGNLGYRASAKKAQLCQ | |
| | KQVKYLGYLLKEGQRWLTEARKETVMGQPTPKTPRQLREFLGKAGFCRLFIPGFAEMAAPLYPLTKPGTLFNWGPDQQKAYQEIKQ | |
| | ALLTAPALGLPDLTKPFELFVDEKQGYAKGVLTQKLGPWRRPVAYLSKKLDPVAAGWPPCLRMVAAIAVLRKDAGKLTMGQPLVILA | |
| | PHAVEALVKQPPDRWLSNARMTHYQAMLLDTDRVQFGPVVALNPATLLPLPEEGAPHDCLEILAETHGTRPDLTDQPIPDADHTWY | |
| | TDGSSFLQEGQRKAGAAVTTETEVIWARALPAGTSAQRAELIALTQALKMAEGKRLNVYTDSRYAFATAHIHGEIYRRRGWLTSEGR | |
| | EIKNKSEILALLKALFLPKRLSIIHCLGHQKGDSAEARGNRLADQAAREAAIKTPPDTSTLL | |
| MLVBM_ | TLGIEDEYRLHETSTEPDVSLGSTWLSDFPQAWAETGGMGLAVRQAPLIIPLKATSTPVSIQQYPMSHEARLGIKPHIQRLLDQGILVP | 4493 |
| Q7SVK7 | CQSPWNTPLLPVKKPGTNDYRPVQDLREVNKRVEDIHPTVPNPYNLLSGLPPSHQWYTVLDLKDAFFCLRLHPTSQPLFAFEWRDP | |
| | GMGISGQLTWTRLPQGFKNSPTLFDEALHRDLADFRIQHPDLILLQYVDDILLAATSELDCQQGTRALLQTLGDLGYRASAKKAQICQ | |
| | KQVKYLGYLLREGQRWLTEARKETVMGQPVPKTPRQLREFLGTAGFCRLWIPGFAEMAAPLYPLTKTGTLFSWGPDQQKAYQEIKQ | |
| | ALLTAPALGLPDLTKPFELFVDEKQGYAKGVLTQKLGPWRRPVAYLSKKLDPVAAGWPPCLRMVAAIAVLTKDAGKLTMGQPLVILA | |
| | PHAVEALVKQPPDRWLSNARMTHYQAMLLDTDRVQFGPVVALNPATLLPLPEEGAPHDCLEILAETHGTRPDLTDQPIPDADHTWY | |
| | TDGSSFLQEGQRKAGAAVTTETEVIWAGALPAGTSAQRAELIALTQALKMAEGKRLNVYTDSRYAFATAHIHGEIYRRRGLLTSEGRE | |
| | IKNKSEILALLKALFLPKRLSIIHCLGHQKGDSAEARGNRLADQAAREAAIKTPPDTSTLL | |
| MLVBM_ | TLGIEDEYRLHETSTEPDVSLGSTWLSDFPQAWAETGGMGLAVRQAPLIIPLKATSTPVSIQQYPMSHEARLGIKPHIQRLLDQGILVP | 4493 |
| Q7SVK7 | CQSPWNTPLLPVKKPGTNDYRPVQDLREVNKRVEDIHPTVPNPYNLLSGLPPSHQWYTVLDLKDAFFCLRLHPTSQPLFAFEWRDP | |
| | GMGISGQLTWTRLPQGFKNSPTLFDEALHRDLADFRIQHPDLILLQYVDDILLAATSELDCQQGTRALLQTLGDLGYRASAKKAQICQ | |
| | KQVKYLGYLLREGQRWLTEARKETVMGQPVPKTPRQLREFLGTAGFCRLWIPGFAEMAAPLYPLTKTGTLFSWGPDQQKAYQEIKQ | |
| | ALLTAPALGLPDLTKPFELFVDEKQGYAKGVLTQKLGPWRRPVAYLSKKLDPVAAGWPPCLRMVAAIAVLTKDAGKLTMGQPLVILA | |
| | PHAVEALVKQPPDRWLSNARMTHYQAMLLDTDRVQFGPVVALNPATLLPLPEEGAPHDCLEILAETHGTRPDLTDQPIPDADHTWY | |
| | TDGSSFLQEGQRKAGAAVTTETEVIWAGALPAGTSAQRAELIALTQALKMAEGKRLNVYTDSRYAFATAHIHGEIYRRRGLLTSEGRE | |
| | IKNKSEILALLKALFLPKRLSIIHCLGHQKGDSAEARGNRLADQAAREAAIKTPPDTSTLL | |
| MLVBM_ | TLGIEDEYRLHETSTEPDVSLGSTWLSDFPQAWAETGGMGLAVRQAPLIIPLKATSTPVSIQQYPMSHEARLGIKPHIQRLLDQGILVP | 4494 |
| Q7SVK7_3mut | CQSPWNTPLLPVKKPGTNDYRPVQDLREVNKRVEDIHPTVPNPYNLLSGLPPSHQWYTVLDLKDAFFCLRLHPTSQPLFAFEWRDP | |
| | GMGISGQLTWTRLPQGFKNSPTLFNEALHRDLADFRIQHPDLILLQYVDDILLAATSELDCQQGTRALLQTLGDLGYRASAKKAQICQ | |
| | KQVKYLGYLLREGQRWLTEARKETVMGQPVPKTPRQLREFLGTAGFCRLWIPGFAEMAAPLYPLTKPGTLFSWGPDQQKAYQEIK | |
| | QALLTAPALGLPDLTKPFELFVDEKQGYAKGVLTQKLGPWRRPVAYLSKKLDPVAAGWPPCLRMVAAIAVLTKDAGKLTMGQPLVIL | |
| | APHAVEALVKQPPDRWLSNARMTHYQAMLLDTDRVQFGPVVALNPATLLPLPEEGAPHDCLEILAETHGTRPDLTDQPIPDADHTW | |
| | YTDGSSFLQEGQRKAGAAVTTETEVIWAGALPAGTSAQRAELIALTQALKMAEGKRLNVYTDSRYAFATAHIHGEIYRRRGWLTSEG | |
| | REIKNKSEILALLKALFLPKRLSIIHCLGHQKGDSAEARGNRLADQAAREAAIKTPPDTSTLL | |
| MLVBM_ | TLGIEDEYRLHETSTEPDVSLGSTWLSDFPQAWAETGGMGLAVRQAPLIIPLKATSTPVSIQQYPMSHEARLGIKPHIQRLLDQGILVP | 4494 |
| Q7SVK7_3mut | CQSPWNTPLLPVKKPGTNDYRPVQDLREVNKRVEDIHPTVPNPYNLLSGLPPSHQWYTVLDLKDAFFCLRLHPTSQPLFAFEWRDP | |
| | GMGISGQLTWTRLPQGFKNSPTLFNEALHRDLADFRIQHPDLILLQYVDDILLAATSELDCQQGTRALLQTLGDLGYRASAKKAQICQ | |
| | KQVKYLGYLLREGQRWLTEARKETVMGQPVPKTPRQLREFLGTAGFCRLWIPGFAEMAAPLYPLTKPGTLFSWGPDQQKAYQEIK | |
| | QALLTAPALGLPDLTKPFELFVDEKQGYAKGVLTQKLGPWRRPVAYLSKKLDPVAAGWPPCLRMVAAIAVLTKDAGKLTMGQPLVIL | |
| | APHAVEALVKQPPDRWLSNARMTHYQAMLLDTDRVQFGPVVALNPATLLPLPEEGAPHDCLEILAETHGTRPDLTDQPIPDADHTW | |
| | YTDGSSFLQEGQRKAGAAVTTETEVIWAGALPAGTSAQRAELIALTQALKMAEGKRLNVYTDSRYAFATAHIHGEIYRRRGWLTSEG | |
| | REIKNKSEILALLKALFLPKRLSIIHCLGHQKGDSAEARGNRLADQAAREAAIKTPPDTSTLL | |
| MLVBM_ | LGIEDEYRLHETSTEPDVSLGSTWLSDFPQAWAETGGMGLAVRQAPLIIPLKATSTPVSIQQYPMSHEARLGIKPHIQRLLDQGILVPC | 4495 |
| Q7SVK7_ | QSPWNTPLLPVKKPGTNDYRPVQDLREVNKRVEDIHPTVPNPYNLLSGLPPSHQWYTVLDLKDAFFCLRLHPTSQPLFAFEWRDPG | |
| 3mutA_WS | MGISGQLTWTRLPQGFKNSPTLFNEALHRDLADFRIQHPDLILLQYVDDILLAATSELDCQQGTRALLQTLGDLGYRASAKKAQICQK | |
| | QVKYLGYLLREGQRWLTEARKETVMGQPVPKTPRQLREFLGKAGFCRLFIPGFAEMAAPLYPLTKPGTLFSWGPDQQKAYQEIKQA | |
| | LLTAPALGLPDLTKPFELFVDEKQGYAKGVLTQKLGPWRRPVAYLSKKLDPVAAGWPPCLRMVAAIAVLTKDAGKLTMGQPLVILAP | |
| | HAVEALVKQPPDRWLSNARMTHYQAMLLDTDRVQFGPVVALNPATLLPLPEEGAPHDCLEILAETHGTRPDLTDQPIPDADHTWYT | |
| | DGSSFLQEGQRKAGAAVTTETEVIWAGALPAGTSAQRAELIALTQALKMAEGKRLNVYTDSRYAFATAHIHGEIYRRRGWLTSEGRE | |
| | IKNKSEILALLKALFLPKRLSIIHCLGHQKGDSAEARGNRLADQAAREAAIKTPPDTSTLLI | |
| MLVBM_ | LGIEDEYRLHETSTEPDVSLGSTWLSDFPQAWAETGGMGLAVRQAPLIIPLKATSTPVSIQQYPMSHEARLGIKPHIQRLLDQGILVPC | 4495 |
| Q7SVK7_ | QSPWNTPLLPVKKPGTNDYRPVQDLREVNKRVEDIHPTVPNPYNLLSGLPPSHQWYTVLDLKDAFFCLRLHPTSQPLFAFEWRDPG | |
| 3mutA_WS | MGISGQLTWTRLPQGFKNSPTLFNEALHRDLADFRIQHPDLILLQYVDDILLAATSELDCQQGTRALLQTLGDLGYRASAKKAQICQK | |
| | QVKYLGYLLREGQRWLTEARKETVMGQPVPKTPRQLREFLGKAGFCRLFIPGFAEMAAPLYPLTKPGTLFSWGPDQQKAYQEIKQA | |
| | LLTAPALGLPDLTKPFELFVDEKQGYAKGVLTQKLGPWRRPVAYLSKKLDPVAAGWPPCLRMVAAIAVLTKDAGKLTMGQPLVILAP | |
| | HAVEALVKQPPDRWLSNARMTHYQAMLLDTDRVQFGPVVALNPATLLPLPEEGAPHDCLEILAETHGTRPDLTDQPIPDADHTWYT | |
| | DGSSFLQEGQRKAGAAVTTETEVIWAGALPAGTSAQRAELIALTQALKMAEGKRLNVYTDSRYAFATAHIHGEIYRRRGWLTSEGRE | |
| | IKNKSEILALLKALFLPKRLSIIHCLGHQKGDSAEARGNRLADQAAREAAIKTPPDTSTLLI | |
| MLVCB_ | TLNIEDEYRLHETSKEPDVSLGSTWLSDFPQAWAETGGMGLAVRQAPLIIPLKATSTPVSIKQYPMSQEARLGIKPHIQRLLDQGILVP | 4496 |
| P08361 | CQSPWNTPLLPVKKPGTNDYRPVQDLREVNKRVEDIHPTVPNPYNLLSGLPPSHQWYTVLDLKDAFFCLRLHPTSQPLFAFEWRDP | |
| | EMGISGQLTWTRLPQGFKNSPTLFDEALHRDLAGFRIQHPDLILLQYVDDLLLAATSELDCQQGTRALLQTLGDLGYRASAKKAQICQ | |
| | KQVKYLGYLLKEGQRWLTEARKETVMGQPIPKTPRQLREFLGTAGFCRLWIPGFAEMAAPLYPLTKTGTLFNWGPDQQKAFQEIKQ | |
| | ALLTAPALGLPDLTKPFELFVDEKQGYAKGVLTQKLGPWRRPVAYLSKKLDPVAAGWPPCLRMVAAIAVLTKDAGKLTMGQPLVILA | |
| | PHAVEALVKQPPDRWLSNARMTHYQALLLDTDRVQFGPVVALNPATLLPLPEEGLQHDCLDILAEAHGTRSDLMDQPLPDADHTWY | |
| | TDGSSFLQEGQRKAGAAVTTETEVIWARALPAGTSAQRAELIALTQALKMAEGKKLNVYTDSRYAFATAHIHGEIYRRRGLLTSEGKE | |
| | IKNKDEILALLKALFLPKRLSIIHCPGHQKGNSAEARGNRMADQAAREVATRETPETSTLL | |
| MLVCB_ | TLNIEDEYRLHETSKEPDVSLGSTWLSDFPQAWAETGGMGLAVRQAPLIIPLKATSTPVSIKQYPMSQEARLGIKPHIQRLLDQGILVP | 4497 |
| P08361_3mut | CQSPWNTPLLPVKKPGTNDYRPVQDLREVNKRVEDIHPTVPNPYNLLSGLPPSHQWYTVLDLKDAFFCLRLHPTSQPLFAFEWRDP | |
| | EMGISGQLTWTRLPQGFKNSPTLFNEALHRDLAGFRIQHPDLILLQYVDDLLLAATSELDCQQGTRALLQTLGDLGYRASAKKAQICQ | |
| | KQVKYLGYLLKEGQRWLTEARKETVMGQPIPKTPRQLREFLGTAGFCRLWIPGFAEMAAPLYPLTKPGTLFNWGPDQQKAFQEIKQ | |
| | ALLTAPALGLPDLTKPFELFVDEKQGYAKGVLTQKLGPWRRPVAYLSKKLDPVAAGWPPCLRMVAAIAVLTKDAGKLTMGQPLVILA | |
| | PHAVEALVKQPPDRWLSNARMTHYQALLLDTDRVQFGPVVALNPATLLPLPEEGLQHDCLDILAEAHGTRSDLMDQPLPDADHTWY | |
| | TDGSSFLQEGQRKAGAAVTTETEVIWARALPAGTSAQRAELIALTQALKMAEGKKLNVYTDSRYAFATAHIHGEIYRRRGWLTSEGK | |
| | EIKNKDEILALLKALFLPKRLSIIHCPGHQKGNSAEARGNRMADQAAREVATRETPETSTLL | |
| MLVCB_ | TLNIEDEYRLHETSKEPDVSLGSTWLSDFPQAWAETGGMGLAVRQAPLIIPLKATSTPVSIKQYPMSQEARLGIKPHIQRLLDQGILVP | 4498 |
| P08361_3mutA | CQSPWNTPLLPVKKPGTNDYRPVQDLREVNKRVEDIHPTVPNPYNLLSGLPPSHQWYTVLDLKDAFFCLRLHPTSQPLFAFEWRDP | |
| | EMGISGQLTWTRLPQGFKNSPTLFNEALHRDLAGFRIQHPDLILLQYVDDLLLAATSELDCQQGTRALLQTLGDLGYRASAKKAQICQ | |
| | KQVKYLGYLLKEGQRWLTEARKETVMGQPIPKTPRQLREFLGKAGFCRLFIPGFAEMAAPLYPLTKPGTLFNWGPDQQKAFQEIKQA | |
| | LLTAPALGLPDLTKPFELFVDEKQGYAKGVLTQKLGPWRRPVAYLSKKLDPVAAGWPPCLRMVAAIAVLTKDAGKLTMGQPLVILAP | |
| | HAVEALVKQPPDRWLSNARMTHYQALLLDTDRVQFGPVVALNPATLLPLPEEGLQHDCLDILAEAHGTRSDLMDQPLPDADHTWYT | |
| | DGSSFLQEGQRKAGAAVTTETEVIWARALPAGTSAQRAELIALTQALKMAEGKKLNVYTDSRYAFATAHIHGEIYRRRGWLTSEGKEI | |
| | KNKDEILALLKALFLPKRLSIIHCPGHQKGNSAEARGNRMADQAAREVATRETPETSTLL | |
| MLVF5_ | TLNIEDEYRLHETSKGPDVPLGSTWLSDFPQAWAETGGMGLAFRQAPLIISLKATSTPVSIKQYPMSQEARLGIKPHIQRLLDQGILVP | 4499 |
| P26810 | CQSPWNTPLLPVKKPGTNDYRPVQDLREVNKRVEDIHPTVPNPYNLLSGLPPSHQWYTVLDLKDAFFCLRLHPTSQSLFAFEWKDP | |
| | EMGISGQLTWTRLPQGFKNSPTLFDEALHRDLADFRIQHPDLILLQYVDDLLLAATSELDCQQGTRALLQTLGDLGYRASAKKAQICQ | |
| | KQVKYLGYLLKEGQRWLTEARKETVMGQPTPKTPRQLREFLGTAGLCRLWIPGFAEMAAPLYPLTKTGTLFKWGPDQQKAYQEIKQ | |
| | ALLTAPALGLPDLTKPFELFVDEKQGYAKGVLTQKLGPWRRPVAYLSKKLDPVAAGWPPCLRMVAAIAVLTKDVGKLTMGQPLVILA | |
| | PHAVEALVKQPPDRWLSNARMTHYQALLLDTDRVQFGPIVALNPATLLPLPEEGLQHDCLDILAEAHGTRPDLTDQPLPDADHTWYT | |
| | DGSSFLQEGQRRAGAAVTTETEVIWAKALPAGTSAQRAELIALTQALKMAAGKKLNVYTDSRYAFATAHIHGEIYRRRGLLTSEGKEI | |
| | KNKDEILALLKALFLPKRLSIIHCPGHQKGNHAEARGNRMADQAAREVATRETPETSTLL | |
| MLVF5_ | TLNIEDEYRLHETSKGPDVPLGSTWLSDFPQAWAETGGMGLAFRQAPLIISLKATSTPVSIKQYPMSQEARLGIKPHIQRLLDQGILVP | 4500 |
| P26810_3mut | CQSPWNTPLLPVKKPGTNDYRPVQDLREVNKRVEDIHPTVPNPYNLLSGLPPSHQWYTVLDLKDAFFCLRLHPTSQSLFAFEWKDP | |
| | EMGISGQLTWTRLPQGFKNSPTLFNEALHRDLADFRIQHPDLILLQYVDDLLLAATSELDCQQGTRALLQTLGDLGYRASAKKAQICQ | |
| | KQVKYLGYLLKEGQRWLTEARKETVMGQPTPKTPRQLREFLGTAGLCRLWIPGFAEMAAPLYPLTKPGTLFKWGPDQQKAYQEIKQ | |
| | ALLTAPALGLPDLTKPFELFVDEKQGYAKGVLTQKLGPWRRPVAYLSKKLDPVAAGWPPCLRMVAAIAVLTKDVGKLTMGQPLVILA | |
| | PHAVEALVKQPPDRWLSNARMTHYQALLLDTDRVQFGPIVALNPATLLPLPEEGLQHDCLDILAEAHGTRPDLTDQPLPDADHTWYT | |
| | DGSSFLQEGQRRAGAAVTTETEVIWAKALPAGTSAQRAELIALTQALKMAAGKKLNVYTDSRYAFATAHIHGEIYRRRGWLTSEGKEI | |
| | KNKDEILALLKALFLPKRLSIIHCPGHQKGNHAEARGNRMADQAAREVATRETPETSTLL | |
| MLVF5_ | TLNIEDEYRLHETSKGPDVPLGSTWLSDFPQAWAETGGMGLAFRQAPLIISLKATSTPVSIKQYPMSQEARLGIKPHIQRLLDQGILVP | 4501 |
| P26810_3mutA | CQSPWNTPLLPVKKPGTNDYRPVQDLREVNKRVEDIHPTVPNPYNLLSGLPPSHQWYTVLDLKDAFFCLRLHPTSQSLFAFEWKDP | |
| | EMGISGQLTWTRLPQGFKNSPTLFNEALHRDLADFRIQHPDLILLQYVDDLLLAATSELDCQQGTRALLQTLGDLGYRASAKKAQICQ | |
| | KQVKYLGYLLKEGQRWLTEARKETVMGQPTPKTPRQLREFLGKAGLCRLFIPGFAEMAAPLYPLTKPGTLFKWGPDQQKAYQEIKQ | |
| | ALLTAPALGLPDLTKPFELFVDEKQGYAKGVLTQKLGPWRRPVAYLSKKLDPVAAGWPPCLRMVAAIAVLTKDVGKLTMGQPLVILA | |
| | PHAVEALVKQPPDRWLSNARMTHYQALLLDTDRVQFGPIVALNPATLLPLPEEGLQHDCLDILAEAHGTRPDLTDQPLPDADHTWYT | |
| | DGSSFLQEGQRRAGAAVTTETEVIWAKALPAGTSAQRAELIALTQALKMAAGKKLNVYTDSRYAFATAHIHGEIYRRRGWLTSEGKEI | |
| | KNKDEILALLKALFLPKRLSIIHCPGHQKGNHAEARGNRMADQAAREVATRETPETSTLL | |
| MLVFF_ | TLNIEDEYRLHETSKGPDVPLGSTWLSDFPQAWAETGGMGLAVRQAPLIIPLKATSTPVSIKQYPMSQEARLGIKPHIQRLLDQGILVP | 4502 |
| P26809_3mut | CQSPWNTPLLPVKKPGTNDYRPVQDLREVNKRVEDIHPTVPNPYNLLSGLPPSHQWYTVLDLKDAFFCLRLHPTSQSLFAFEWRDP | |
| | EMGISGQLTWTRLPQGFKNSPTLFNEALHRDLADFRIQHPDLILLQYVDDLLLAATSELDCQQGTRALLQTLGDLGYRASAKKAQICQ | |
| | KQVKYLGYLLKEGQRWLTEARKETVMGQPTPKTPRQLREFLGTAGFCRLWIPGFAEMAAPLYPLTKPGTLFEWGPDQQKAYQEIKQ | |
| | ALLTAPALGLPDLTKPFELFVDEKQGYAKGVLTQKLGPWRRPVAYLSKKLDPVAAGWPPCLRMVAAIAVLTKDAGKLTMGQPLVILA | |
| | PHAVEALVKQPPDRWLSNARMTHYQALLLDTDRVQFGPIVALNPATLLPLPEEGLQHDCLDILAEAHGTRPDLTDQPLPDADHTWYT | |
| | DGSSFLQEGQRKAGAAVTTETEVVWAKALPAGTSAQRAELIALTQALKMAEGKKLNVYTDSRYAFATAHIHGEIYRRRGWLTSEGKE | |
| | IKNKDEILALLKALFLPKRLSIIHCPGHQKGNRAEARGNRMADQAAREVATRETPETSTLL | |
| MLVFF_ | TLNIEDEYRLHETSKGPDVPLGSTWLSDFPQAWAETGGMGLAVRQAPLIIPLKATSTPVSIKQYPMSQEARLGIKPHIQRLLDQGILVP | 4503 |
| P26809_3mutA | CQSPWNTPLLPVKKPGTNDYRPVQDLREVNKRVEDIHPTVPNPYNLLSGLPPSHQWYTVLDLKDAFFCLRLHPTSQSLFAFEWRDP | |
| | EMGISGQLTWTRLPQGFKNSPTLFNEALHRDLADFRIQHPDLILLQYVDDLLLAATSELDCQQGTRALLQTLGDLGYRASAKKAQICQ | |
| | KQVKYLGYLLKEGQRWLTEARKETVMGQPTPKTPRQLREFLGKAGFCRLFIPGFAEMAAPLYPLTKPGTLFEWGPDQQKAYQEIKQ | |
| | ALLTAPALGLPDLTKPFELFVDEKQGYAKGVLTQKLGPWRRPVAYLSKKLDPVAAGWPPCLRMVAAIAVLTKDAGKLTMGQPLVILA | |
| | PHAVEALVKQPPDRWLSNARMTHYQALLLDTDRVQFGPIVALNPATLLPLPEEGLQHDCLDILAEAHGTRPDLTDQPLPDADHTWYT | |
| | DGSSFLQEGQRKAGAAVTTETEVVWAKALPAGTSAQRAELIALTQALKMAEGKKLNVYTDSRYAFATAHIHGEIYRRRGWLTSEGKE | |
| | IKNKDEILALLKALFLPKRLSIIHCPGHQKGNRAEARGNRMADQAAREVATRETPETSTLL | |
| MLVMS_ | TLNIEDEHRLHETSKEPDVSLGSTWLSDFPQAWAETGGMGLAVRQAPLIIPLKATSTPVSIKQYPMSQEARLGIKPHIQRLLDQGILVP | 4013 |
| P03355 | CQSPWNTPLLPVKKPGTNDYRPVQDLREVNKRVEDIHPTVPNPYNLLSGLPPSHQWYTVLDLKDAFFCLRLHPTSQPLFAFEWRDP | |
| | EMGISGQLTWTRLPQGFKNSPTLFDEALHRDLADFRIQHPDLILLQYVDDLLLAATSELDCQQGTRALLQTLGNLGYRASAKKAQICQ | |
| | KQVKYLGYLLKEGQRWLTEARKETVMGQPTPKTPRQLREFLGTAGFCRLWIPGFAEMAAPLYPLTKTGTLFNWGPDQQKAYQEIKQ | |
| | ALLTAPALGLPDLTKPFELFVDEKQGYAKGVLTQKLGPWRRPVAYLSKKLDPVAAGWPPCLRMVAAIAVLTKDAGKLTMGQPLVILA | |
| | PHAVEALVKQPPDRWLSNARMTHYQALLLDTDRVQFGPVVALNPATLLPLPEEGLQHNCLDILAEAHGTRPDLTDQPLPDADHTWY | |
| | TDGSSLLQEGQRKAGAAVTTETEVIWAKALPAGTSAQRAELIALTQALKMAEGKKLNVYTDSRYAFATAHIHGEIYRRRGLLTSEGKEI | |
| | KNKDEILALLKALFLPKRLSIIHCPGHQKGHSAEARGNRMADQAARKAAITETPDTSTLL | |
| MLVMS_ | TLNIEDEHRLHETSKEPDVSLGSTWLSDFPQAWAETGGMGLAVRQAPLIIPLKATSTPVSIKQYPMSQEARLGIKPHIQRLLDQGILVP | 4013 |
| P03355 | CQSPWNTPLLPVKKPGTNDYRPVQDLREVNKRVEDIHPTVPNPYNLLSGLPPSHQWYTVLDLKDAFFCLRLHPTSQPLFAFEWRDP | |
| | EMGISGQLTWTRLPQGFKNSPTLFDEALHRDLADFRIQHPDLILLQYVDDLLLAATSELDCQQGTRALLQTLGNLGYRASAKKAQICQ | |
| | KQVKYLGYLLKEGQRWLTEARKETVMGQPTPKTPRQLREFLGTAGFCRLWIPGFAEMAAPLYPLTKTGTLFNWGPDQQKAYQEIKQ | |
| | ALLTAPALGLPDLTKPFELFVDEKQGYAKGVLTQKLGPWRRPVAYLSKKLDPVAAGWPPCLRMVAAIAVLTKDAGKLTMGQPLVILA | |
| | PHAVEALVKQPPDRWLSNARMTHYQALLLDTDRVQFGPVVALNPATLLPLPEEGLQHNCLDILAEAHGTRPDLTDQPLPDADHTWY | |
| | TDGSSLLQEGQRKAGAAVTTETEVIWAKALPAGTSAQRAELIALTQALKMAEGKKLNVYTDSRYAFATAHIHGEIYRRRGLLTSEGKEI | |
| | KNKDEILALLKALFLPKRLSIIHCPGHQKGHSAEARGNRMADQAARKAAITETPDTSTLL | |
| MLVMS_ | TLNIEDEHRLHETSKEPDVSLGSTWLSDFPQAWAETGGMGLAVRQAPLIIPLKATSTPVSIKQYPMSQEARLGIKPHIQRLLDQGILVP | 4504 |
| P03355_3mut | CQSPWNTPLLPVKKPGTNDYRPVQDLREVNKRVEDIHPTVPNPYNLLSGLPPSHQWYTVLDLKDAFFCLRLHPTSQPLFAFEWRDP | |
| | EMGISGQLTWTRLPQGFKNSPTLFNEALHRDLADFRIQHPDLILLQYVDDLLLAATSELDCQQGTRALLQTLGNLGYRASAKKAQICQ | |
| | KQVKYLGYLLKEGQRWLTEARKETVMGQPTPKTPRQLREFLGTAGFCRLWIPGFAEMAAPLYPLTKPGTLFNWGPDQQKAYQEIKQ | |
| | ALLTAPALGLPDLTKPFELFVDEKQGYAKGVLTQKLGPWRRPVAYLSKKLDPVAAGWPPCLRMVAAIAVLTKDAGKLTMGQPLVILA | |
| | PHAVEALVKQPPDRWLSNARMTHYQALLLDTDRVQFGPVVALNPATLLPLPEEGLQHNCLDILAEAHGTRPDLTDQPLPDADHTWY | |
| | TDGSSLLQEGQRKAGAAVTTETEVIWAKALPAGTSAQRAELIALTQALKMAEGKKLNVYTDSRYAFATAHIHGEIYRRRGWLTSEGK | |
| | EIKNKDEILALLKALFLPKRLSIIHCPGHQKGHSAEARGNRMADQAARKAAITETPDTSTLL | |
| MLVMS_ | TLNIEDEHRLHETSKEPDVSLGSTWLSDFPQAWAETGGMGLAVRQAPLIIPLKATSTPVSIKQYPMSQEARLGIKPHIQRLLDQGILVP | 4504 |
| P03355_3mut | CQSPWNTPLLPVKKPGTNDYRPVQDLREVNKRVEDIHPTVPNPYNLLSGLPPSHQWYTVLDLKDAFFCLRLHPTSQPLFAFEWRDP | |
| | EMGISGQLTWTRLPQGFKNSPTLFNEALHRDLADFRIQHPDLILLQYVDDLLLAATSELDCQQGTRALLQTLGNLGYRASAKKAQICQ | |
| | KQVKYLGYLLKEGQRWLTEARKETVMGQPTPKTPRQLREFLGTAGFCRLWIPGFAEMAAPLYPLTKPGTLFNWGPDQQKAYQEIKQ | |
| | ALLTAPALGLPDLTKPFELFVDEKQGYAKGVLTQKLGPWRRPVAYLSKKLDPVAAGWPPCLRMVAAIAVLTKDAGKLTMGQPLVILA | |
| | PHAVEALVKQPPDRWLSNARMTHYQALLLDTDRVQFGPVVALNPATLLPLPEEGLQHNCLDILAEAHGTRPDLTDQPLPDADHTWY | |
| | TDGSSLLQEGQRKAGAAVTTETEVIWAKALPAGTSAQRAELIALTQALKMAEGKKLNVYTDSRYAFATAHIHGEIYRRRGWLTSEGK | |
| | EIKNKDEILALLKALFLPKRLSIIHCPGHQKGHSAEARGNRMADQAARKAAITETPDTSTLL | |
| MLVMS_ | TLNIEDEHRLHETSKEPDVSLGSTWLSDFPQAWAETGGMGLAVRQAPLIIPLKATSTPVSIKQYPMSQEARLGIKPHIQRLLDQGILVP | 4505 |
| P03355_ | CQSPWNTPLLPVKKPGTNDYRPVQDLREVNKRVEDIHPTVPNPYNLLSGLPPSHQWYTVLDLKDAFFCLRLHPTSQPLFAFEWRDP | |
| 3mutA_WS | EMGISGQLTWTRLPQGFKNSPTLFNEALHRDLADFRIQHPDLILLQYVDDLLLAATSELDCQQGTRALLQTLGNLGYRASAKKAQICQ | |
| | KQVKYLGYLLKEGQRWLTEARKETVMGQPTPKTPRQLREFLGKAGFCRLFIPGFAEMAAPLYPLTKPGTLFNWGPDQQKAYQEIKQ | |
| | ALLTAPALGLPDLTKPFELFVDEKQGYAKGVLTQKLGPWRRPVAYLSKKLDPVAAGWPPCLRMVAAIAVLTKDAGKLTMGQPLVILA | |
| | PHAVEALVKQPPDRWLSNARMTHYQALLLDTDRVQFGPVVALNPATLLPLPEEGLQHNCLDILAEAHGTRPDLTDQPLPDADHTWY | |
| | TDGSSLLQEGQRKAGAAVTTETEVIWAKALPAGTSAQRAELIALTQALKMAEGKKLNVYTDSRYAFATAHIHGEIYRRRGWLTSEGK | |
| | EIKNKDEILALLKALFLPKRLSIIHCPGHQKGHSAEARGNRMADQAARKAAITETPDTSTLL | |
| MLVMS_ | TLNIEDEHRLHETSKEPDVSLGSTWLSDFPQAWAETGGMGLAVRQAPLIIPLKATSTPVSIKQYPMSQEARLGIKPHIQRLLDQGILVP | 4505 |
| P03355_ | CQSPWNTPLLPVKKPGTNDYRPVQDLREVNKRVEDIHPTVPNPYNLLSGLPPSHQWYTVLDLKDAFFCLRLHPTSQPLFAFEWRDP | |
| 3mutA_WS | EMGISGQLTWTRLPQGFKNSPTLFNEALHRDLADFRIQHPDLILLQYVDDLLLAATSELDCQQGTRALLQTLGNLGYRASAKKAQICQ | |
| | KQVKYLGYLLKEGQRWLTEARKETVMGQPTPKTPRQLREFLGKAGFCRLFIPGFAEMAAPLYPLTKPGTLFNWGPDQQKAYQEIKQ | |
| | ALLTAPALGLPDLTKPFELFVDEKQGYAKGVLTQKLGPWRRPVAYLSKKLDPVAAGWPPCLRMVAAIAVLTKDAGKLTMGQPLVILA | |
| | PHAVEALVKQPPDRWLSNARMTHYQALLLDTDRVQFGPVVALNPATLLPLPEEGLQHNCLDILAEAHGTRPDLTDQPLPDADHTWY | |
| | TDGSSLLQEGQRKAGAAVTTETEVIWAKALPAGTSAQRAELIALTQALKMAEGKKLNVYTDSRYAFATAHIHGEIYRRRGWLTSEGK | |
| | EIKNKDEILALLKALFLPKRLSIIHCPGHQKGHSAEARGNRMADQAARKAAITETPDTSTLL | |
| MLVMS_ | TLNIEDEYRLHETSKEPDVSLGSTWLSDFPQAWAETGGMGLAVRQAPLIIPLKATSTPVSIKQYPMSQEARLGIKPHIQRLLDQGILVP | 4506 |
| P03355_PLV919 | CQSPWNTPLLPVKKPGTNDYRPVQDLREVNKRVEDIHPTVPNPYNLLSGLPPSHQWYTVLDLKDAFFCLRLHPTSQPLFAFEWRDP | |
| | EMGISGQLTWTRLPQGFKNSPTLFNEALHRDLADFRIQHPDLILLQYVDDLLLAATSELDCQQGTRALLQTLGNLGYRASAKKAQICQ | |
| | KQVKYLGYLLKEGQRWLTEARKETVMGQPTPKTPRQLREFLGKAGFCRLFIPGFAEMAAPLYPLTKPGTLFNWGPDQQKAYQEIKQ | |
| | ALLTAPALGLPDLTKPFELFVDEKQGYAKGVLTQKLGPWRRPVAYLSKKLDPVAAGWPPCLRMVAAIAVLTKDAGKLTMGQPLVILA | |
| | PHAVEALVKQPPDRWLSNARMTHYQALLLDTDRVQFGPVVALNPATLLPLPEEGLQHNCLDILAEAHGTRPDLTDQPLPDADHTWY | |
| | TDGSSLLQEGQRKAGAAVTTETEVIWAKALPAGTSAQRAELIALTQALKMAEGKKLNVYTDSRYAFATAHIHGEIYRRRGWLTSEGK | |
| | EIKNKDEILALLKALFLPKRLSIIHCPGHQKGHSAEARGNRMADQAARKAAITETPDTSTLLIENSSPSGGSKRTADGSEFE | |
| MLVMS_ | TLNIEDEYRLHETSKEPDVSLGSTWLSDFPQAWAETGGMGLAVRQAPLIIPLKATSTPVSIKQYPMSQEARLGIKPHIQRLLDQGILVP | 4506 |
| P03355_PLV919 | CQSPWNTPLLPVKKPGTNDYRPVQDLREVNKRVEDIHPTVPNPYNLLSGLPPSHQWYTVLDLKDAFFCLRLHPTSQPLFAFEWRDP | |
| | EMGISGQLTWTRLPQGFKNSPTLFNEALHRDLADFRIQHPDLILLQYVDDLLLAATSELDCQQGTRALLQTLGNLGYRASAKKAQICQ | |
| | KQVKYLGYLLKEGQRWLTEARKETVMGQPTPKTPRQLREFLGKAGFCRLFIPGFAEMAAPLYPLTKPGTLFNWGPDQQKAYQEIKQ | |
| | ALLTAPALGLPDLTKPFELFVDEKQGYAKGVLTQKLGPWRRPVAYLSKKLDPVAAGWPPCLRMVAAIAVLTKDAGKLTMGQPLVILA | |
| | PHAVEALVKQPPDRWLSNARMTHYQALLLDTDRVQFGPVVALNPATLLPLPEEGLQHNCLDILAEAHGTRPDLTDQPLPDADHTWY | |
| | TDGSSLLQEGQRKAGAAVTTETEVIWAKALPAGTSAQRAELIALTQALKMAEGKKLNVYTDSRYAFATAHIHGEIYRRRGWLTSEGK | |
| | EIKNKDEILALLKALFLPKRLSIIHCPGHQKGHSAEARGNRMADQAARKAAITETPDTSTLLIENSSPSGGSKRTADGSEFE | |
| MLVRD_ | TLNIEDEYRLHEISTEPDVSPGSTWLSDFPQAWAETGGMGLAVRQAPLIIPLKATSTPVSIKQYPMSQEAKLGIKPHIQRLLDQGILVPC | 4507 |
| P11227 | QSPWNTPLLPVKKPGTNDYRPVQGLREVNKRVEDIHPTVPNPYNLLSGLPTSHRWYTVLDLKDAFFCLRLHPTSQPLFASEWRDPG | |
| | MGISGQLTWTRLPQGFKNSPTLFDEALHRGLADFRIQHPDLILLQYVDDLLLAATSELDCQQGTRALLKTLGNLGYRASAKKAQICQK | |
| | QVKYLGYLLREGQRWLTEARKETVMGQPTPKTPRQLREFLGTAGFCRLWIPRFAEMAAPLYPLTKTGTLFNWGPDQQKAYHEIKQA | |
| | LLTAPALGLPDLTKPFELFVDEKQGYAKGVLTQKLGPWRRPVAYLSKKLDPVAAGWPPCLRMVAAIAVLTKDAGKLTMGQPLVILAP | |
| | HAVEALVKQPPDRWLSNARMTHYQAMLLDTDRVQFGPVVALNPATLLPLPEEGAPHDCLEILAETHGTEPDLTDQPIPDADHTWYT | |
| | DGSSFLQEGQRKAGAAVTTETEVIWARALPAGTSAQRAELIALTQALKMAEGKRLNVYTDSRYAFATAHIHGEIYKRRGLLTSEGREI | |
| | KNKSEILALLKALFLPKRLSIIHCLGHQKGDSAEARGNRLADQAAREAAIKTPPDTSTLL | |
| MLVRD_P | TLNIEDEYRLHEISTEPDVSPGSTWLSDFPQAWAETGGMGLAVRQAPLIIPLKATSTPVSIKQYPMSQEAKLGIKPHIQRLLDQGILVPC | 4508 |
| 11227_3mut | QSPWNTPLLPVKKPGTNDYRPVQGLREVNKRVEDIHPTVPNPYNLLSGLPTSHRWYTVLDLKDAFFCLRLHPTSQPLFASEWRDPG | |
| | MGISGQLTWTRLPQGFKNSPTLFNEALHRGLADFRIQHPDLILLQYVDDLLLAATSELDCQQGTRALLKTLGNLGYRASAKKAQICQK | |
| | QVKYLGYLLREGQRWLTEARKETVMGQPTPKTPRQLREFLGTAGFCRLWIPRFAEMAAPLYPLTKPGTLFNWGPDQQKAYHEIKQA | |
| | LLTAPALGLPDLTKPFELFVDEKQGYAKGVLTQKLGPWRRPVAYLSKKLDPVAAGWPPCLRMVAAIAVLTKDAGKLTMGQPLVILAP | |
| | HAVEALVKQPPDRWLSNARMTHYQAMLLDTDRVQFGPVVALNPATLLPLPEEGAPHDCLEILAETHGTEPDLTDQPIPDADHTWYT | |
| | DGSSFLQEGQRKAGAAVTTETEVIWARALPAGTSAQRAELIALTQALKMAEGKRLNVYTDSRYAFATAHIHGEIYKRRGWLTSEGREI | |
| | KNKSEILALLKALFLPKRLSIIHCLGHQKGDSAEARGNRLADQAAREAAIKTPPDTSTLL | |
| MMTVB_ | WVQEISDSRPMLHIYLNGRRFLGLLNTGADKTCIAGRDWPANWPIHQTESSLQGLGMACGVARSSQPLRWQHEDKSGIIHPFVIPTL | 4509 |
| P03365 | PFTLWGRDIMKDIKVRLMTDSPDDSQDLMIGAIESNLFADQISWKSDQPVWLNQWPLKQEKLQALQQLVTEQLQLGHLEESNSPWN | |
| | TPVFVIKKKSGKWRLLQDLRAVNATMHDMGALQPGLPSPVAVPKGWEIIIIDLQDCFFNIKLHPEDCKRFAFSVPSPNFKRPYQRFQW | |
| | KVLPQGMKNSPTLCQKFVDKAILTVRDKYQDSYIVHYMDDILLAHPSRSIVDEILTSMIQALNKHGLVVSTEKIQKYDNLKYLGTHIQGD | |
| | SVSYQKLQIRTDKLRTLNDFQKLLGNINWIRPFLKLTTGELKPLFEILNGDSNPISTRKLTPEACKALQLMNERLSTARVKRLDLSQPW | |
| | SLCILKTEYTPTACLWQDGVVEWIHLPHISPKVITPYDIFCTQLIIKGRHRSKELFSKDPDYIVVPYTKVQFDLLLQEKEDWPISLLGFLG | |
| | EVHFHLPKDPLLTFTLQTAIIFPHMTSTTPLEKGIVIFTDGSANGRSVTYIQGREPIIKENTQNTAQQAEIVAVITAFEEVSQPFNLYTDSK | |
| | YVTGLFPEIETATLSPRTKIYTELKHLQRLIHKRQEKFYIGHIRGHTGLPGPLAQGNAYADSLTRILT | |
| MMTVB_ | WVQEISDSRPMLHIYLNGRRFLGLLNTGADKTCIAGRDWPANWPIHQTESSLQGLGMACGVARSSQPLRWQHEDKSGIIHPFVIPTL | 4509 |
| P03365 | PFTLWGRDIMKDIKVRLMTDSPDDSQDLMIGAIESNLFADQISWKSDQPVWLNQWPLKQEKLQALQQLVTEQLQLGHLEESNSPWN | |
| | TPVFVIKKKSGKWRLLQDLRAVNATMHDMGALQPGLPSPVAVPKGWEIIIIDLQDCFFNIKLHPEDCKRFAFSVPSPNFKRPYQRFQW | |
| | KVLPQGMKNSPTLCQKFVDKAILTVRDKYQDSYIVHYMDDILLAHPSRSIVDEILTSMIQALNKHGLVVSTEKIQKYDNLKYLGTHIQGD | |
| | SVSYQKLQIRTDKLRTLNDFQKLLGNINWIRPFLKLTTGELKPLFEILNGDSNPISTRKLTPEACKALQLMNERLSTARVKRLDLSQPW | |
| | SLCILKTEYTPTACLWQDGVVEWIHLPHISPKVITPYDIFCTQLIIKGRHRSKELFSKDPDYIVVPYTKVQFDLLLQEKEDWPISLLGFLG | |
| | EVHFHLPKDPLLTFTLQTAIIFPHMTSTTPLEKGIVIFTDGSANGRSVTYIQGREPIIKENTQNTAQQAEIVAVITAFEEVSQPFNLYTDSK | |
| | YVTGLFPEIETATLSPRTKIYTELKHLQRLIHKRQEKFYIGHIRGHTGLPGPLAQGNAYADSLTRILT | |
| MMTVB_ | WVQEISDSRPMLHIYLNGRRFLGLLNTGADKTCIAGRDWPANWPIHQTESSLQGLGMACGVARSSQPLRWQHEDKSGIIHPFVIPTL | 4510 |
| P03365_2mut | PFTLWGRDIMKDIKVRLMTDSPDDSQDLMIGAIESNLFADQISWKSDQPVWLNQWPLKQEKLQALQQLVTEQLQLGHLEESNSPWN | |
| | TPVFVIKKKSGKWRLLQDLRAVNATMHDMGALQPGLPSPVAVPKGWEIIIIDLQDCFFNIKLHPEDCKRFAFSVPSPNFKRPYQRFQW | |
| | KVLPQGMKNSPTLCQKFVDKAILTVRDKYQDSYIVHYMDDILLAHPSRSIVDEILTSMIQALNKHGLVVSTEKIQKYDNLKYLGTHIQGD | |
| | SVSYQKLQIRTDKLRTLNDFQKLLGNINWIRPFLKLTTGELKPLFEILNPDSNPISTRKLTPEACKALQLMNERLSTARVKRLDLSQPWS | |
| | LCILKTEYTPTACLWQDGVVEWIHLPHISPKVITPYDIFCTQLIIKGRHRSKELFSKDPDYIVVPYTKVQFDLLLQEKEDWPISLLGFLGE | |
| | VHFHLPKDPLLTFTLQTAIIFPHMTSTTPLEKGIVIFTDGSANGRSVTYIQGREPIIKENTQNTAQQAEIVAVITAFEEVSQPFNLYTDSKY | |
| | VTGLFPEIETATLSPRTKIYTELKHLQRLIHKRQEKFYIGHIRGHTGLPGPLAQGNAYADSLTRILT | |
| MMTVB_ | VQEISDSRPMLHIYLNGRRFLGLLDTGADKTCIAGRDWPANWPIHQTESSLQGLGMACGVARSSQPLRWQHEDKSGIIHPFVIPTLPF | 4511 |
| P03365_ | TLWGRDIMKDIKVRLMTDSPDDSQDLMIGAIESNLFADQISWKSDQPVWLNQWPLKQEKLQALQQLVTEQLQLGHLEESNSPWNTP | |
| 2mut_WS | VFVIKKKSGKWRLLQDLRAVNATMHDMGALQPGLPSPVAVPKGWEIIIIDLQDCFFNIKLHPEDCKRFAFSVPSPNFKRPYQRFQWKV | |
| | LPQGMKNSPTLCQKFVDKAILTVRDKYQDSYIVHYMDDILLAHPSRSIVDEILTSMIQALNKHGLVVSTEKIQKYDNLKYLGTHIQGDSV | |
| | SYQKLQIRTDKLRTLNDFQKLLGNINWIRPFLKLTTGELKPLFEILNPDSNPISTRKLTPEACKALQLMNERLSTARVKRLDLSQPWSLC | |
| | ILKTEYTPTACLWQDGVVEWIHLPHISPKVITPYDIFCTQLIIKGRHRSKELFSKDPDYIVVPYTKVQFDLLLQEKEDWPISLLGFLGEVH | |
| | FHLPKDPLLTFTLQTAIIFPHMTSTTPLEKGIVIFTDGSANGRSVTYIQGREPIIKENTQNTAQQAEIVAVITAFEEVSQPFNLYTDSKYVT | |
| | GLFPEIETATLSPRTKIYTELKHLQRLIHKRQEKFYIGHIRGHTGLPGPLAQGNAYADSLTRILTA | |
| MMTVB_ | VQEISDSRPMLHIYLNGRRFLGLLDTGADKTCIAGRDWPANWPIHQTESSLQGLGMACGVARSSQPLRWQHEDKSGIIHPFVIPTLPF | 4511 |
| P03365_ | TLWGRDIMKDIKVRLMTDSPDDSQDLMIGAIESNLFADQISWKSDQPVWLNQWPLKQEKLQALQQLVTEQLQLGHLEESNSPWNTP | |
| 2mut_WS | VFVIKKKSGKWRLLQDLRAVNATMHDMGALQPGLPSPVAVPKGWEIIIIDLQDCFFNIKLHPEDCKRFAFSVPSPNFKRPYQRFQWKV | |
| | LPQGMKNSPTLCQKFVDKAILTVRDKYQDSYIVHYMDDILLAHPSRSIVDEILTSMIQALNKHGLVVSTEKIQKYDNLKYLGTHIQGDSV | |
| | SYQKLQIRTDKLRTLNDFQKLLGNINWIRPFLKLTTGELKPLFEILNPDSNPISTRKLTPEACKALQLMNERLSTARVKRLDLSQPWSLC | |
| | ILKTEYTPTACLWQDGVVEWIHLPHISPKVITPYDIFCTQLIIKGRHRSKELFSKDPDYIVVPYTKVQFDLLLQEKEDWPISLLGFLGEVH | |
| | FHLPKDPLLTFTLQTAIIFPHMTSTTPLEKGIVIFTDGSANGRSVTYIQGREPIIKENTQNTAQQAEIVAVITAFEEVSQPFNLYTDSKYVT | |
| | GLFPEIETATLSPRTKIYTELKHLQRLIHKRQEKFYIGHIRGHTGLPGPLAQGNAYADSLTRILTA | |
| MMTVB_ | WVQEISDSRPMLHIYLNGRRFLGLLNTGADKTCIAGRDWPANWPIHQTESSLQGLGMACGVARSSQPLRWQHEDKSGIIHPFVIPTL | 4512 |
| P03365_2mutB | PFTLWGRDIMKDIKVRLMTDSPDDSQDLMIGAIESNLFADQISWKSDQPVWLNQWPLKQEKLQALQQLVTEQLQLGHLEESNSPWN | |
| | TPVFVIKKKSGKWRLLQDLRAVNATMHDMGALQPGLPSPVAPPKGWEIIIIDLQDCFFNIKLHPEDCKRFAFSVPSPNFKRPYQRFQW | |
| | KVLPQGMKNSPTLCQKFVDKAILTVRDKYQDSYIVHYMDDILLAHPSRSIVDEILTSMIQALNKHGLVVSTEKIQKYDNLKYLGTHIQGD | |
| | SVSYQKLQIRTDKLRTLNDFQKLLGNINWIRPFLKLTTGELKPLFEILNPDSNPISTRKLTPEACKALQLMNERLSTARVKRLDLSQPWS | |
| | LCILKTEYTPTACLWQDGVVEWIHLPHISPKVITPYDIFCTQLIIKGRHRSKELFSKDPDYIVVPYTKVQFDLLLQEKEDWPISLLGFLGE | |
| | VHFHLPKDPLLTFTLQTAIIFPHMTSTTPLEKGIVIFTDGSANGRSVTYIQGREPIIKENTQNTAQQAEIVAVITAFEEVSQPFNLYTDSKY | |
| | VTGLFPEIETATLSPRTKIYTELKHLQRLIHKRQEKFYIGHIRGHTGLPGPLAQGNAYADSLTRILT | |
| MMTVB_ | WVQEISDSRPMLHIYLNGRRFLGLLNTGADKTCIAGRDWPANWPIHQTESSLQGLGMACGVARSSQPLRWQHEDKSGIIHPFVIPTL | 4512 |
| P03365_2mutB | PFTLWGRDIMKDIKVRLMTDSPDDSQDLMIGAIESNLFADQISWKSDQPVWLNQWPLKQEKLQALQQLVTEQLQLGHLEESNSPWN | |
| | TPVFVIKKKSGKWRLLQDLRAVNATMHDMGALQPGLPSPVAPPKGWEIIIIDLQDCFFNIKLHPEDCKRFAFSVPSPNFKRPYQRFQW | |
| | KVLPQGMKNSPTLCQKFVDKAILTVRDKYQDSYIVHYMDDILLAHPSRSIVDEILTSMIQALNKHGLVVSTEKIQKYDNLKYLGTHIQGD | |
| | SVSYQKLQIRTDKLRTLNDFQKLLGNINWIRPFLKLTTGELKPLFEILNPDSNPISTRKLTPEACKALQLMNERLSTARVKRLDLSQPWS | |
| | LCILKTEYTPTACLWQDGVVEWIHLPHISPKVITPYDIFCTQLIIKGRHRSKELFSKDPDYIVVPYTKVQFDLLLQEKEDWPISLLGFLGE | |
| | VHFHLPKDPLLTFTLQTAIIFPHMTSTTPLEKGIVIFTDGSANGRSVTYIQGREPIIKENTQNTAQQAEIVAVITAFEEVSQPFNLYTDSKY | |
| | VTGLFPEIETATLSPRTKIYTELKHLQRLIHKRQEKFYIGHIRGHTGLPGPLAQGNAYADSLTRILT | |
| MMTVB_ | VQEISDSRPMLHIYLNGRRFLGLLDTGADKTCIAGRDWPANWPIHQTESSLQGLGMACGVARSSQPLRWQHEDKSGIIHPFVIPTLPF | 4513 |
| P03365_ | TLWGRDIMKDIKVRLMTDSPDDSQDLMIGAIESNLFADQISWKSDQPVWLNQWPLKQEKLQALQQLVTEQLQLGHLEESNSPWNTP | |
| 2mutB_WS | VFVIKKKSGKWRLLQDLRAVNATMHDMGALQPGLPSPPAVPKGWEIIIIDLQDCFFNIKLHPEDCKRFAFSVPSPNFKRPYQRFQWKV | |
| | LPQGMKNSPTLCQKFVDKAILTVRDKYQDSYIVHYMDDILLAHPSRSIVDEILTSMIQALNKHGLVVSTEKIQKYDNLKYLGTHIQGDSV | |
| | SYQKLQIRTDKLRTLNDFQKLLGNINWIRPFLKLTTGELKPLFEILNPDSNPISTRKLTPEACKALQLMNERLSTARVKRLDLSQPWSLC | |
| | ILKTEYTPTACLWQDGVVEWIHLPHISPKVITPYDIFCTQLIIKGRHRSKELFSKDPDYIVVPYTKVQFDLLLQEKEDWPISLLGFLGEVH | |
| | FHLPKDPLLTFTLQTAIIFPHMTSTTPLEKGIVIFTDGSANGRSVTYIQGREPIIKENTQNTAQQAEIVAVITAFEEVSQPFNLYTDSKYVT | |
| | GLFPEIETATLSPRTKIYTELKHLQRLIHKRQEKFYIGHIRGHTGLPGPLAQGNAYADSLTRILTA | |
| MMTVB_ | VQEISDSRPMLHIYLNGRRFLGLLDTGADKTCIAGRDWPANWPIHQTESSLQGLGMACGVARSSQPLRWQHEDKSGIIHPFVIPTLPF | 4513 |
| P03365_ | TLWGRDIMKDIKVRLMTDSPDDSQDLMIGAIESNLFADQISWKSDQPVWLNQWPLKQEKLQALQQLVTEQLQLGHLEESNSPWNTP | |
| 2mutB_WS | VFVIKKKSGKWRLLQDLRAVNATMHDMGALQPGLPSPPAVPKGWEIIIIDLQDCFFNIKLHPEDCKRFAFSVPSPNFKRPYQRFQWKV | |
| | LPQGMKNSPTLCQKFVDKAILTVRDKYQDSYIVHYMDDILLAHPSRSIVDEILTSMIQALNKHGLVVSTEKIQKYDNLKYLGTHIQGDSV | |
| | SYQKLQIRTDKLRTLNDFQKLLGNINWIRPFLKLTTGELKPLFEILNPDSNPISTRKLTPEACKALQLMNERLSTARVKRLDLSQPWSLC | |
| | ILKTEYTPTACLWQDGVVEWIHLPHISPKVITPYDIFCTQLIIKGRHRSKELFSKDPDYIVVPYTKVQFDLLLQEKEDWPISLLGFLGEVH | |
| | FHLPKDPLLTFTLQTAIIFPHMTSTTPLEKGIVIFTDGSANGRSVTYIQGREPIIKENTQNTAQQAEIVAVITAFEEVSQPFNLYTDSKYVT | |
| | GLFPEIETATLSPRTKIYTELKHLQRLIHKRQEKFYIGHIRGHTGLPGPLAQGNAYADSLTRILTA | |
| MMTVB_ | VQEISDSRPMLHIYLNGRRFLGLLDTGADKTCIAGRDWPANWPIHQTESSLQGLGMACGVARSSQPLRWQHEDKSGIIHPFVIPTLPF | 4514 |
| P03365_WS | TLWGRDIMKDIKVRLMTDSPDDSQDLMIGAIESNLFADQISWKSDQPVWLNQWPLKQEKLQALQQLVTEQLQLGHLEESNSPWNTP | |
| | VFVIKKKSGKWRLLQDLRAVNATMHDMGALQPGLPSPVAVPKGWEIIIIDLQDCFFNIKLHPEDCKRFAFSVPSPNFKRPYQRFQWKV | |
| | LPQGMKNSPTLCQKFVDKAILTVRDKYQDSYIVHYMDDILLAHPSRSIVDEILTSMIQALNKHGLVVSTEKIQKYDNLKYLGTHIQGDSV | |
| | SYQKLQIRTDKLRTLNDFQKLLGNINWIRPFLKLTTGELKPLFEILNGDSNPISTRKLTPEACKALQLMNERLSTARVKRLDLSQPWSL | |
| | CILKTEYTPTACLWQDGVVEWIHLPHISPKVITPYDIFCTQLIIKGRHRSKELFSKDPDYIVVPYTKVQFDLLLQEKEDWPISLLGFLGEV | |
| | HFHLPKDPLLTFTLQTAIIFPHMTSTTPLEKGIVIFTDGSANGRSVTYIQGREPIIKENTQNTAQQAEIVAVITAFEEVSQPFNLYTDSKYV | |
| | TGLFPEIETATLSPRTKIYTELKHLQRLIHKRQEKFYIGHIRGHTGLPGPLAQGNAYADSLTRILTA | |
| MMTVB_ | VQEISDSRPMLHIYLNGRRFLGLLDTGADKTCIAGRDWPANWPIHQTESSLQGLGMACGVARSSQPLRWQHEDKSGIIHPFVIPTLPF | 4514 |
| P03365_WS | TLWGRDIMKDIKVRLMTDSPDDSQDLMIGAIESNLFADQISWKSDQPVWLNQWPLKQEKLQALQQLVTEQLQLGHLEESNSPWNTP | |
| | VFVIKKKSGKWRLLQDLRAVNATMHDMGALQPGLPSPVAVPKGWEIIIIDLQDCFFNIKLHPEDCKRFAFSVPSPNFKRPYQRFQWKV | |
| | LPQGMKNSPTLCQKFVDKAILTVRDKYQDSYIVHYMDDILLAHPSRSIVDEILTSMIQALNKHGLVVSTEKIQKYDNLKYLGTHIQGDSV | |
| | SYQKLQIRTDKLRTLNDFQKLLGNINWIRPFLKLTTGELKPLFEILNGDSNPISTRKLTPEACKALQLMNERLSTARVKRLDLSQPWSL | |
| | CILKTEYTPTACLWQDGVVEWIHLPHISPKVITPYDIFCTQLIIKGRHRSKELFSKDPDYIVVPYTKVQFDLLLQEKEDWPISLLGFLGEV | |
| | HFHLPKDPLLTFTLQTAIIFPHMTSTTPLEKGIVIFTDGSANGRSVTYIQGREPIIKENTQNTAQQAEIVAVITAFEEVSQPFNLYTDSKYV | |
| | TGLFPEIETATLSPRTKIYTELKHLQRLIHKRQEKFYIGHIRGHTGLPGPLAQGNAYADSLTRILTA | |
| MMTVB_ | GRDIMKDIKVRLMTDSPDDSQDLMIGAIESNLFADQISWKSDQPVWLNQWPLKQEKLQALQQLVTEQLQLGHLEESNSPWNTPVFVI | 4515 |
| P03365-Pro | KKKSGKWRLLQDLRAVNATMHDMGALQPGLPSPVAVPKGWEIIIIDLQDCFFNIKLHPEDCKRFAFSVPSPNFKRPYQRFQWKVLPQ | |
| | GMKNSPTLCQKFVDKAILTVRDKYQDSYIVHYMDDILLAHPSRSIVDEILTSMIQALNKHGLVVSTEKIQKYDNLKYLGTHIQGDSVSYQ | |
| | KLQIRTDKLRTLNDFQKLLGNINWIRPFLKLTTGELKPLFEILNGDSNPISTRKLTPEACKALQLMNERLSTARVKRLDLSQPWSLCILK | |
| | TEYTPTACLWQDGVVEWIHLPHISPKVITPYDIFCTQLIIKGRHRSKELFSKDPDYIVVPYTKVQFDLLLQEKEDWPISLLGFLGEVHFH | |
| | LPKDPLLTFTLQTAIIFPHMTSTTPLEKGIVIFTDGSANGRSVTYIQGREPIIKENTQNTAQQAEIVAVITAFEEVSQPFNLYTDSKYVTGL | |
| | FPEIETATLSPRTKIYTELKHLQRLIHKRQEKFYIGHIRGHTGLPGPLAQGNAYADSLTRILT | |
| MMTVB_ | GRDIMKDIKVRLMTDSPDDSQDLMIGAIESNLFADQISWKSDQPVWLNQWPLKQEKLQALQQLVTEQLQLGHLEESNSPWNTPVFVI | 4515 |
| P03365-Pro | KKKSGKWRLLQDLRAVNATMHDMGALQPGLPSPVAVPKGWEIIIIDLQDCFFNIKLHPEDCKRFAFSVPSPNFKRPYQRFQWKVLPQ | |
| | GMKNSPTLCQKFVDKAILTVRDKYQDSYIVHYMDDILLAHPSRSIVDEILTSMIQALNKHGLVVSTEKIQKYDNLKYLGTHIQGDSVSYQ | |
| | KLQIRTDKLRTLNDFQKLLGNINWIRPFLKLTTGELKPLFEILNGDSNPISTRKLTPEACKALQLMNERLSTARVKRLDLSQPWSLCILK | |
| | TEYTPTACLWQDGVVEWIHLPHISPKVITPYDIFCTQLIIKGRHRSKELFSKDPDYIVVPYTKVQFDLLLQEKEDWPISLLGFLGEVHFH | |
| | LPKDPLLTFTLQTAIIFPHMTSTTPLEKGIVIFTDGSANGRSVTYIQGREPIIKENTQNTAQQAEIVAVITAFEEVSQPFNLYTDSKYVTGL | |
| | FPEIETATLSPRTKIYTELKHLQRLIHKRQEKFYIGHIRGHTGLPGPLAQGNAYADSLTRILT | |
| MMTVB_ | GRDIMKDIKVRLMTDSPDDSQDLMIGAIESNLFADQISWKSDQPVWLNQWPLKQEKLQALQQLVTEQLQLGHLEESNSPWNTPVFVI | 4516 |
| P03365- | KKKSGKWRLLQDLRAVNATMHDMGALQPGLPSPVAVPKGWEIIIIDLQDCFFNIKLHPEDCKRFAFSVPSPNFKRPYQRFQWKVLPQ | |
| Pro_2mut | GMKNSPTLCQKFVDKAILTVRDKYQDSYIVHYMDDILLAHPSRSIVDEILTSMIQALNKHGLVVSTEKIQKYDNLKYLGTHIQGDSVSYQ | |
| | KLQIRTDKLRTLNDFQKLLGNINWIRPFLKLTTGELKPLFEILNPDSNPISTRKLTPEACKALQLMNERLSTARVKRLDLSQPWSLCILKT | |
| | EYTPTACLWQDGVVEWIHLPHISPKVITPYDIFCTQLIIKGRHRSKELFSKDPDYIVVPYTKVQFDLLLQEKEDWPISLLGFLGEVHFHL | |
| | PKDPLLTFTLQTAIIFPHMTSTTPLEKGIVIFTDGSANGRSVTYIQGREPIIKENTQNTAQQAEIVAVITAFEEVSQPFNLYTDSKYVTGLF | |
| | PEIETATLSPRTKIYTELKHLQRLIHKRQEKFYIGHIRGHTGLPGPLAQGNAYADSLTRILT | |
| MMTVB_ | GRDIMKDIKVRLMTDSPDDSQDLMIGAIESNLFADQISWKSDQPVWLNQWPLKQEKLQALQQLVTEQLQLGHLEESNSPWNTPVFVI | 4516 |
| P03365- | KKKSGKWRLLQDLRAVNATMHDMGALQPGLPSPVAVPKGWEIIIIDLQDCFFNIKLHPEDCKRFAFSVPSPNFKRPYQRFQWKVLPQ | |
| Pro_2mut | GMKNSPTLCQKFVDKAILTVRDKYQDSYIVHYMDDILLAHPSRSIVDEILTSMIQALNKHGLVVSTEKIQKYDNLKYLGTHIQGDSVSYQ | |
| | KLQIRTDKLRTLNDFQKLLGNINWIRPFLKLTTGELKPLFEILNPDSNPISTRKLTPEACKALQLMNERLSTARVKRLDLSQPWSLCILKT | |
| | EYTPTACLWQDGVVEWIHLPHISPKVITPYDIFCTQLIIKGRHRSKELFSKDPDYIVVPYTKVQFDLLLQEKEDWPISLLGFLGEVHFHL | |
| | PKDPLLTFTLQTAIIFPHMTSTTPLEKGIVIFTDGSANGRSVTYIQGREPIIKENTQNTAQQAEIVAVITAFEEVSQPFNLYTDSKYVTGLF | |
| | PEIETATLSPRTKIYTELKHLQRLIHKRQEKFYIGHIRGHTGLPGPLAQGNAYADSLTRILT | |
| MMTVB_ | GRDIMKDIKVRLMTDSPDDSQDLMIGAIESNLFADQISWKSDQPVWLNQWPLKQEKLQALQQLVTEQLQLGHLEESNSPWNTPVFVI | 4517 |
| P03365- | KKKSGKWRLLQDLRAVNATMHDMGALQPGLPSPVAPPKGWEIIIIDLQDCFFNIKLHPEDCKRFAFSVPSPNFKRPYQRFQWKVLPQ | |
| Pro_2mutB | GMKNSPTLCQKFVDKAILTVRDKYQDSYIVHYMDDILLAHPSRSIVDEILTSMIQALNKHGLVVSTEKIQKYDNLKYLGTHIQGDSVSYQ | |
| | KLQIRTDKLRTLNDFQKLLGNINWIRPFLKLTTGELKPLFEILNPDSNPISTRKLTPEACKALQLMNERLSTARVKRLDLSQPWSLCILKT | |
| | EYTPTACLWQDGVVEWIHLPHISPKVITPYDIFCTQLIIKGRHRSKELFSKDPDYIVVPYTKVQFDLLLQEKEDWPISLLGFLGEVHFHL | |
| | PKDPLLTFTLQTAIIFPHMTSTTPLEKGIVIFTDGSANGRSVTYIQGREPIIKENTQNTAQQAEIVAVITAFEEVSQPFNLYTDSKYVTGLF | |
| | PEIETATLSPRTKIYTELKHLQRLIHKRQEKFYIGHIRGHTGLPGPLAQGNAYADSLTRILT | |
| MMTVB_ | GRDIMKDIKVRLMTDSPDDSQDLMIGAIESNLFADQISWKSDQPVWLNQWPLKQEKLQALQQLVTEQLQLGHLEESNSPWNTPVFVI | 4517 |
| P03365- | KKKSGKWRLLQDLRAVNATMHDMGALQPGLPSPVAPPKGWEIIIIDLQDCFFNIKLHPEDCKRFAFSVPSPNFKRPYQRFQWKVLPQ | |
| Pro_2mutB | GMKNSPTLCQKFVDKAILTVRDKYQDSYIVHYMDDILLAHPSRSIVDEILTSMIQALNKHGLVVSTEKIQKYDNLKYLGTHIQGDSVSYQ | |
| | KLQIRTDKLRTLNDFQKLLGNINWIRPFLKLTTGELKPLFEILNPDSNPISTRKLTPEACKALQLMNERLSTARVKRLDLSQPWSLCILKT | |
| | EYTPTACLWQDGVVEWIHLPHISPKVITPYDIFCTQLIIKGRHRSKELFSKDPDYIVVPYTKVQFDLLLQEKEDWPISLLGFLGEVHFHL | |
| | PKDPLLTFTLQTAIIFPHMTSTTPLEKGIVIFTDGSANGRSVTYIQGREPIIKENTQNTAQQAEIVAVITAFEEVSQPFNLYTDSKYVTGLF | |
| | PEIETATLSPRTKIYTELKHLQRLIHKRQEKFYIGHIRGHTGLPGPLAQGNAYADSLTRILT | |
| MPMV_ | LTAAIDILAPQQCAEPITWKSDEPVWVDQWPLTNDKLAAAQQLVQEQLEAGHITESSSPWNTPIFVIKKKSGKWRLLQDLRAVNATM | 4518 |
| P07572 | VLMGALQPGLPSPVAIPQGYLKIIIDLKDCFFSIPLHPSDQKRFAFSLPSTNFKEPMQRFQWKVLPQGMANSPTLCQKYVATAIHKVRH | |
| | AWKQMYIIHYMDDILIAGKDGQQVLQCFDQLKQELTAAGLHIAPEKVQLQDPYTYLGFELNGPKITNQKAVIRKDKLQTLNDFQKLLGD | |
| | INWLRPYLKLTTGDLKPLFDTLKGDSDPNSHRSLSKEALASLEKVETAIAEQFVTHINYSLPLIFLIFNTALTPTGLFWQDNPIMWIHLPA | |
| | SPKKVLLPYYDAIADLIILGRDHSKKYFGIEPSTIIQPYSKSQIDWLMQNTEMWPIACASFVGILDNHYPPNKLIQFCKLHTFVFPQIISKT | |
| | PLNNALLVFTDGSSTGMAAYTLTDTTIKFQTNLNSAQLVELQALIAVLSAFPNQPLNIYTDSAYLAHSIPLLETVAQIKHISETAKLFLQC | |
| | QQLIYNRSIPFYIGHVRAHSGLPGPIAQGNQRADLATKIVASNINT | |
| MPMV_ | LTAAIDILAPQQCAEPITWKSDEPVWVDQWPLTNDKLAAAQQLVQEQLEAGHITESSSPWNTPIFVIKKKSGKWRLLQDLRAVNATM | 4519 |
| P07572_2mutB | VLMGALQPGLPSPVAPPQGYLKIIIDLKDCFFSIPLHPSDQKRFAFSLPSTNFKEPMQRFQWKVLPQGMANSPTLCQKYVATAIHKVR | |
| | HAWKQMYIIHYMDDILIAGKDGQQVLQCFDQLKQELTAAGLHIAPEKVQLQDPYTYLGFELNGPKITNQKAVIRKDKLQTLNDFQKLLG | |
| | DINWLRPYLKLTTGDLKPLFDTLKPDSDPNSHRSLSKEALASLEKVETAIAEQFVTHINYSLPLIFLIFNTALTPTGLFWQDNPIMWIHLP | |
| | ASPKKVLLPYYDAIADLIILGRDHSKKYFGIEPSTIIQPYSKSQIDWLMQNTEMWPIACASFVGILDNHYPPNKLIQFCKLHTFVFPQIISK | |
| | TPLNNALLVFTDGSSTGMAAYTLTDTTIKFQTNLNSAQLVELQALIAVLSAFPNQPLNIYTDSAYLAHSIPLLETVAQIKHISETAKLFLQC | |
| | QQLIYNRSIPFYIGHVRAHSGLPGPIAQGNQRADLATKIVASNINT | |
| PERV_ | TLQLDDEYRLYSPLVKPDQNIQFWLEQFPQAWAETAGMGLAKQVPPQVIQLKASATPVSVRQYPLSKEAQEGIRPHVQRLIQQGILV | 4520 |
| Q4VFZ2 | PVQSPWNTPLLPVRKPGTNDYRPVQDLREVNKRVQDIHPTVPNPYNLLCALPPQRSWYTVLDLKDAFFCLRLHPTSQPLFAFEWRD | |
| | PGTGRTGQLTWTRLPQGFKNSPTIFDEALHRDLANFRIQHPQVTLLQYVDDLLLAGATKQDCLEGTKALLLELSDLGYRASAKKAQIC | |
| | RREVTYLGYSLRDGQRWLTEARKKTVVQIPAPTTAKQVREFLGTAGFCRLWIPGFATLAAPLYPLTKEKGEFSWAPEHQKAFDAIKK | |
| | ALLSAPALALPDVTKPFTLYVDERKGVARGVLTQTLGPWRRPVAYLSKKLDPVASGWPVCLKAIAAVAILVKDADKLTLGQNITVIAPH | |
| | ALENIVRQPPDRWMTNARMTHYQSLLLTERVTFAPPAALNPATLLPEETDEPVTHDCHQLLIEETGVRKDLTDIPLTGEVLTWFTDGS | |
| | SYVVEGKRMAGAAVVDGTRTIWASSLPEGTSAQKAELMALTQALRLAEGKSINIYTDSRYAFATAHVHGAIYKQRGLLTSAGREIKNK | |
| | EEILSLLEALHLPKRLAIIHCPGHQKAKDPISRGNQMADRVAKQAAQGVNLL | |
| PERV_ | TLQLDDEYRLYSPLVKPDQNIQFWLEQFPQAWAETAGMGLAKQVPPQVIQLKASATPVSVRQYPLSKEAQEGIRPHVQRLIQQGILV | 4520 |
| Q4VFZ2 | PVQSPWNTPLLPVRKPGTNDYRPVQDLREVNKRVQDIHPTVPNPYNLLCALPPQRSWYTVLDLKDAFFCLRLHPTSQPLFAFEWRD | |
| | PGTGRTGQLTWTRLPQGFKNSPTIFDEALHRDLANFRIQHPQVTLLQYVDDLLLAGATKQDCLEGTKALLLELSDLGYRASAKKAQIC | |
| | RREVTYLGYSLRDGQRWLTEARKKTVVQIPAPTTAKQVREFLGTAGFCRLWIPGFATLAAPLYPLTKEKGEFSWAPEHQKAFDAIKK | |
| | ALLSAPALALPDVTKPFTLYVDERKGVARGVLTQTLGPWRRPVAYLSKKLDPVASGWPVCLKAIAAVAILVKDADKLTLGQNITVIAPH | |
| | ALENIVRQPPDRWMTNARMTHYQSLLLTERVTFAPPAALNPATLLPEETDEPVTHDCHQLLIEETGVRKDLTDIPLTGEVLTWFTDGS | |
| | SYVVEGKRMAGAAVVDGTRTIWASSLPEGTSAQKAELMALTQALRLAEGKSINIYTDSRYAFATAHVHGAIYKQRGLLTSAGREIKNK | |
| | EEILSLLEALHLPKRLAIIHCPGHQKAKDPISRGNQMADRVAKQAAQGVNLL | |
| PERV_ | TLQLDDEYRLYSPLVKPDQNIQFWLEQFPQAWAETAGMGLAKQVPPQVIQLKASATPVSVRQYPLSKEAQEGIRPHVQRLIQQGILV | 4521 |
| Q4VFZ2_3mut | PVQSPWNTPLLPVRKPGTNDYRPVQDLREVNKRVQDIHPTVPNPYNLLCALPPQRSWYTVLDLKDAFFCLRLHPTSQPLFAFEWRD | |
| | PGTGRTGQLTWTRLPQGFKNSPTIFNEALHRDLANFRIQHPQVTLLQYVDDLLLAGATKQDCLEGTKALLLELSDLGYRASAKKAQIC | |
| | RREVTYLGYSLRDGQRWLTEARKKTVVQIPAPTTAKQVREFLGTAGFCRLWIPGFATLAAPLYPLTKPKGEFSWAPEHQKAFDAIKK | |
| | ALLSAPALALPDVTKPFTLYVDERKGVARGVLTQTLGPWRRPVAYLSKKLDPVASGWPVCLKAIAAVAILVKDADKLTLGQNITVIAPH | |
| | ALENIVRQPPDRWMTNARMTHYQSLLLTERVTFAPPAALNPATLLPEETDEPVTHDCHQLLIEETGVRKDLTDIPLTGEVLTWFTDGS | |
| | SYVVEGKRMAGAAVVDGTRTIWASSLPEGTSAQKAELMALTQALRLAEGKSINIYTDSRYAFATAHVHGAIYKQRGWLTSAGREIKN | |
| | KEEILSLLEALHLPKRLAIIHCPGHQKAKDPISRGNQMADRVAKQAAQGVNLL | |
| PERV_ | TLQLDDEYRLYSPLVKPDQNIQFWLEQFPQAWAETAGMGLAKQVPPQVIQLKASATPVSVRQYPLSKEAQEGIRPHVQRLIQQGILV | 4521 |
| Q4VFZ2_3mut | PVQSPWNTPLLPVRKPGTNDYRPVQDLREVNKRVQDIHPTVPNPYNLLCALPPQRSWYTVLDLKDAFFCLRLHPTSQPLFAFEWRD | |
| | PGTGRTGQLTWTRLPQGFKNSPTIFNEALHRDLANFRIQHPQVTLLQYVDDLLLAGATKQDCLEGTKALLLELSDLGYRASAKKAQIC | |
| | RREVTYLGYSLRDGQRWLTEARKKTVVQIPAPTTAKQVREFLGTAGFCRLWIPGFATLAAPLYPLTKPKGEFSWAPEHQKAFDAIKK | |
| | ALLSAPALALPDVTKPFTLYVDERKGVARGVLTQTLGPWRRPVAYLSKKLDPVASGWPVCLKAIAAVAILVKDADKLTLGQNITVIAPH | |
| | ALENIVRQPPDRWMTNARMTHYQSLLLTERVTFAPPAALNPATLLPEETDEPVTHDCHQLLIEETGVRKDLTDIPLTGEVLTWFTDGS | |
| | SYVVEGKRMAGAAVVDGTRTIWASSLPEGTSAQKAELMALTQALRLAEGKSINIYTDSRYAFATAHVHGAIYKQRGWLTSAGREIKN | |
| | KEEILSLLEALHLPKRLAIIHCPGHQKAKDPISRGNQMADRVAKQAAQGVNLL | |
| PERV_ | LDDEYRLYSPLVKPDQNIQFWLEQFPQAWAETAGMGLAKQVPPQVIQLKASATPVSVRQYPLSKEAQEGIRPHVQRLIQQGILVPVQ | 4522 |
| Q4VFZ2_ | SPWNTPLLPVRKPGTNDYRPVQDLREVNKRVQDIHPTVPNPYNLLCALPPQRSWYTVLDLKDAFFCLRLHPTSQPLFAFEWRDPGT | |
| 3mutA_WS | GRTGQLTWTRLPQGFKNSPTIFNEALHRDLANFRIQHPQVTLLQYVDDLLLAGATKQDCLEGTKALLLELSDLGYRASAKKAQICRRE | |
| | VTYLGYSLRDGQRWLTEARKKTVVQIPAPTTAKQVREFLGKAGFCRLFIPGFATLAAPLYPLTKPKGEFSWAPEHQKAFDAIKKALLS | |
| | APALALPDVTKPFTLYVDERKGVARGVLTQTLGPWRRPVAYLSKKLDPVASGWPVCLKAIAAVAILVKDADKLTLGQNITVIAPHALEN | |
| | IVRQPPDRWMTNARMTHYQSLLLTERVTFAPPAALNPATLLPEETDEPVTHDCHQLLIEETGVRKDLTDIPLTGEVLTWFTDGSSYVV | |
| | EGKRMAGAAVVDGTRTIWASSLPEGTSAQKAELMALTQALRLAEGKSINIYTDSRYAFATAHVHGAIYKQRGWLTSAGREIKNKEEIL | |
| | SLLEALHLPKRLAIIHCPGHQKAKDPISRGNQMADRVAKQAAQGVNLLP | |
| PERV_ | LDDEYRLYSPLVKPDQNIQFWLEQFPQAWAETAGMGLAKQVPPQVIQLKASATPVSVRQYPLSKEAQEGIRPHVQRLIQQGILVPVQ | 4522 |
| Q4VFZ2_ | SPWNTPLLPVRKPGTNDYRPVQDLREVNKRVQDIHPTVPNPYNLLCALPPQRSWYTVLDLKDAFFCLRLHPTSQPLFAFEWRDPGT | |
| 3mutA_WS | GRTGQLTWTRLPQGFKNSPTIFNEALHRDLANFRIQHPQVTLLQYVDDLLLAGATKQDCLEGTKALLLELSDLGYRASAKKAQICRRE | |
| | VTYLGYSLRDGQRWLTEARKKTVVQIPAPTTAKQVREFLGKAGFCRLFIPGFATLAAPLYPLTKPKGEFSWAPEHQKAFDAIKKALLS | |
| | APALALPDVTKPFTLYVDERKGVARGVLTQTLGPWRRPVAYLSKKLDPVASGWPVCLKAIAAVAILVKDADKLTLGQNITVIAPHALEN | |
| | IVRQPPDRWMTNARMTHYQSLLLTERVTFAPPAALNPATLLPEETDEPVTHDCHQLLIEETGVRKDLTDIPLTGEVLTWFTDGSSYVV | |
| | EGKRMAGAAVVDGTRTIWASSLPEGTSAQKAELMALTQALRLAEGKSINIYTDSRYAFATAHVHGAIYKQRGWLTSAGREIKNKEEIL | |
| | SLLEALHLPKRLAIIHCPGHQKAKDPISRGNQMADRVAKQAAQGVNLLP | |
| SFV1_ | MDPLQLLQPLEAEIKGTKLKAHWNSGATITCVPEAFLEDERPIQTMLIKTIHGEKQQDVYYLTFKVQGRKVEAEVLASPYDYILLNPSD | 4523 |
| P23074 | VPWLMKKPLQLTVLVPLHEYQERLLQQTALPKEQKELLQKLFLKYDALWQHWENQVGHRRIKPHNIATGTLAPRPQKQYPINPKAKP | |
| | SIQIVIDDLLKQGVLIQQNSTMNTPVYPVPKPDGKWRMVLDYREVNKTIPLIAAQNQHSAGILSSIYRGKYKTTLDLTNGFWAHPITPES | |
| | YWLTAFTWQGKQYCWTRLPQGFLNSPALFTADVVDLLKEIPNVQAYVDDIYISHDDPQEHLEQLEKIFSILLNAGYVVSLKKSEIAQRE | |
| | VEFLGFNITKEGRGLTDTFKQKLLNITPPKDLKQLQSILGLLNFARNFIPNYSELVKPLYTIVANANGKFISWTEDNSNQLQHIISVLNQA | |
| | DNLEERNPETRLIIKVNSSPSAGYIRYYNEGSKRPIMYVNYIFSKAEAKFTQTEKLLTTMHKGLIKAMDLAMGQEILVYSPIVSMTKIQRT | |
| | PLPERKALPVRWITWMTYLEDPRIQFHYDKSLPELQQIPNVTEDVIAKTKHPSEFAMVFYTDGSAIKHPDVNKSHSAGMGIAQVQFIP | |
| | EYKIVHQWSIPLGDHTAQLAEIAAVEFACKKALKISGPVLIVTDSFYVAESANKELPYWKSNGFLNNKKKPLRHVSKWKSIAECLQLKP | |
| | DIIIMHEKGHQQPMTTLHTEGNNLADKLATQGSYVVH | |
| SFV1_ | MDPLQLLQPLEAEIKGTKLKAHWNSGATITCVPEAFLEDERPIQTMLIKTIHGEKQQDVYYLTFKVQGRKVEAEVLASPYDYILLNPSD | 4524 |
| P23074_2mut | VPWLMKKPLQLTVLVPLHEYQERLLQQTALPKEQKELLQKLFLKYDALWQHWENQVGHRRIKPHNIATGTLAPRPQKQYPINPKAKP | |
| | SIQIVIDDLLKQGVLIQQNSTMNTPVYPVPKPDGKWRMVLDYREVNKTIPLIAAQNQHSAGILSSIYRGKYKTTLDLTNGFWAHPITPES | |
| | YWLTAFTWQGKQYCWTRLPQGFLNSPALFNADVVDLLKEIPNVQAYVDDIYISHDDPQEHLEQLEKIFSILLNAGYVVSLKKSEIAQRE | |
| | VEFLGFNITKEGRGLTDTFKQKLLNITPPKDLKQLQSILGLLNFARNFIPNYSELVKPLYTIVAPANGKFISWTEDNSNQLQHIISVLNQA | |
| | DNLEERNPETRLIIKVNSSPSAGYIRYYNEGSKRPIMYVNYIFSKAEAKFTQTEKLLTTMHKGLIKAMDLAMGQEILVYSPIVSMTKIQRT | |
| | PLPERKALPVRWITWMTYLEDPRIQFHYDKSLPELQQIPNVTEDVIAKTKHPSEFAMVFYTDGSAIKHPDVNKSHSAGMGIAQVQFIP | |
| | EYKIVHQWSIPLGDHTAQLAEIAAVEFACKKALKISGPVLIVTDSFYVAESANKELPYWKSNGFLNNKKKPLRHVSKWKSIAECLQLKP | |
| | DIIIMHEKGHQQPMTTLHTEGNNLADKLATQGSYVVH | |
| SFV1_ | MDPLQLLQPLEAEIKGTKLKAHWNSGATITCVPEAFLEDERPIQTMLIKTIHGEKQQDVYYLTFKVQGRKVEAEVLASPYDYILLNPSD | 4525 |
| P23074_2mutA | VPWLMKKPLQLTVLVPLHEYQERLLQQTALPKEQKELLQKLFLKYDALWQHWENQVGHRRIKPHNIATGTLAPRPQKQYPINPKAKP | |
| | SIQIVIDDLLKQGVLIQQNSTMNTPVYPVPKPDGKWRMVLDYREVNKTIPLIAAQNQHSAGILSSIYRGKYKTTLDLTNGFWAHPITPES | |
| | YWLTAFTWQGKQYCWTRLPQGFLNSPALFNADVVDLLKEIPNVQAYVDDIYISHDDPQEHLEQLEKIFSILLNAGYVVSLKKSEIAQRE | |
| | VEFLGFNITKEGRGLTDTFKQKLLNITPPKDLKQLQSILGKLNFARNFIPNYSELVKPLYTIVAPANGKFISWTEDNSNQLQHIISVLNQA | |
| | DNLEERNPETRLIIKVNSSPSAGYIRYYNEGSKRPIMYVNYIFSKAEAKFTQTEKLLTTMHKGLIKAMDLAMGQEILVYSPIVSMTKIQRT | |
| | PLPERKALPVRWITWMTYLEDPRIQFHYDKSLPELQQIPNVTEDVIAKTKHPSEFAMVFYTDGSAIKHPDVNKSHSAGMGIAQVQFIP | |
| | EYKIVHQWSIPLGDHTAQLAEIAAVEFACKKALKISGPVLIVTDSFYVAESANKELPYWKSNGFLNNKKKPLRHVSKWKSIAECLQLKP | |
| | DIIIMHEKGHQQPMTTLHTEGNNLADKLATQGSYVVH | |
| SFV1_ | VPWLMKKPLQLTVLVPLHEYQERLLQQTALPKEQKELLQKLFLKYDALWQHWENQVGHRRIKPHNIATGTLAPRPQKQYPINPKAKP | 4526 |
| P23074-Pro | SIQIVIDDLLKQGVLIQQNSTMNTPVYPVPKPDGKWRMVLDYREVNKTIPLIAAQNQHSAGILSSIYRGKYKTTLDLTNGFWAHPITPES | |
| | YWLTAFTWQGKQYCWTRLPQGFLNSPALFTADVVDLLKEIPNVQAYVDDIYISHDDPQEHLEQLEKIFSILLNAGYVVSLKKSEIAQRE | |
| | VEFLGFNITKEGRGLTDTFKQKLLNITPPKDLKQLQSILGLLNFARNFIPNYSELVKPLYTIVANANGKFISWTEDNSNQLQHIISVLNQA | |
| | DNLEERNPETRLIIKVNSSPSAGYIRYYNEGSKRPIMYVNYIFSKAEAKFTQTEKLLTTMHKGLIKAMDLAMGQEILVYSPIVSMTKIQRT | |
| | PLPERKALPVRWITWMTYLEDPRIQFHYDKSLPELQQIPNVTEDVIAKTKHPSEFAMVFYTDGSAIKHPDVNKSHSAGMGIAQVQFIP | |
| | EYKIVHQWSIPLGDHTAQLAEIAAVEFACKKALKISGPVLIVTDSFYVAESANKELPYWKSNGFLNNKKKPLRHVSKWKSIAECLQLKP | |
| | DIIIMHEKGHQQPMTTLHTEGNNLADKLATQGSYVVH | |
| SFV1_ | VPWLMKKPLQLTVLVPLHEYQERLLQQTALPKEQKELLQKLFLKYDALWQHWENQVGHRRIKPHNIATGTLAPRPQKQYPINPKAKP | 4527 |
| P23074- | SIQIVIDDLLKQGVLIQQNSTMNTPVYPVPKPDGKWRMVLDYREVNKTIPLIAAQNQHSAGILSSIYRGKYKTTLDLTNGFWAHPITPES | |
| Pro_2mut | YWLTAFTWQGKQYCWTRLPQGFLNSPALFNADVVDLLKEIPNVQAYVDDIYISHDDPQEHLEQLEKIFSILLNAGYVVSLKKSEIAQRE | |
| | VEFLGFNITKEGRGLTDTFKQKLLNITPPKDLKQLQSILGLLNFARNFIPNYSELVKPLYTIVAPANGKFISWTEDNSNQLQHIISVLNQA | |
| | DNLEERNPETRLIIKVNSSPSAGYIRYYNEGSKRPIMYVNYIFSKAEAKFTQTEKLLTTMHKGLIKAMDLAMGQEILVYSPIVSMTKIQRT | |
| | PLPERKALPVRWITWMTYLEDPRIQFHYDKSLPELQQIPNVTEDVIAKTKHPSEFAMVFYTDGSAIKHPDVNKSHSAGMGIAQVQFIP | |
| | EYKIVHQWSIPLGDHTAQLAEIAAVEFACKKALKISGPVLIVTDSFYVAESANKELPYWKSNGFLNNKKKPLRHVSKWKSIAECLQLKP | |
| | DIIIMHEKGHQQPMTTLHTEGNNLADKLATQGSYVVH | |
| SFV1_ | VPWLMKKPLQLTVLVPLHEYQERLLQQTALPKEQKELLQKLFLKYDALWQHWENQVGHRRIKPHNIATGTLAPRPQKQYPINPKAKP | 4528 |
| P23074- | SIQIVIDDLLKQGVLIQQNSTMNTPVYPVPKPDGKWRMVLDYREVNKTIPLIAAQNQHSAGILSSIYRGKYKTTLDLTNGFWAHPITPES | |
| Pro_2mutA | YWLTAFTWQGKQYCWTRLPQGFLNSPALFNADVVDLLKEIPNVQAYVDDIYISHDDPQEHLEQLEKIFSILLNAGYVVSLKKSEIAQRE | |
| | VEFLGFNITKEGRGLTDTFKQKLLNITPPKDLKQLQSILGKLNFARNFIPNYSELVKPLYTIVAPANGKFISWTEDNSNQLQHIISVLNQA | |
| | DNLEERNPETRLIIKVNSSPSAGYIRYYNEGSKRPIMYVNYIFSKAEAKFTQTEKLLTTMHKGLIKAMDLAMGQEILVYSPIVSMTKIQRT | |
| | PLPERKALPVRWITWMTYLEDPRIQFHYDKSLPELQQIPNVTEDVIAKTKHPSEFAMVFYTDGSAIKHPDVNKSHSAGMGIAQVQFIP | |
| | EYKIVHQWSIPLGDHTAQLAEIAAVEFACKKALKISGPVLIVTDSFYVAESANKELPYWKSNGFLNNKKKPLRHVSKWKSIAECLQLKP | |
| | DIIIMHEKGHQQPMTTLHTEGNNLADKLATQGSYVVH | |
| SFV3L_ | MDPLQLLQPLEAEIKGTKLKAHWNSGATITCVPQAFLEEEVPIKNIWIKTIHGEKEQPVYYLTFKIQGRKVEAEVISSPYDYILVSPSDIP | 4529 |
| P27401 | WLMKKPLQLTTLVPLQEYEERLLKQTMLTGSYKEKLQSLFLKYDALWQHWENQVGHRRIKPHHIATGTVNPRPQKQYPINPKAKASI | |
| | QTVINDLLKQGVLIQQNSIMNTPVYPVPKPDGKWRMVLDYREVNKTIPLIAAQNQHSAGILSSIFRGKYKTTLDLSNGFWAHSITPESY | |
| | WLTAFTWLGQQYCWTRLPQGFLNSPALFTADVVDLLKEVPNVQVYVDDIYISHDDPREHLEQLEKVFSLLLNAGYVVSLKKSEIAQH | |
| | EVEFLGFNITKEGRGLTETFKQKLLNITPPRDLKQLQSILGLLNFARNFIPNFSELVKPLYNIIATANGKYITWTTDNSQQLQNIISMLNSA | |
| | ENLEERNPEVRLIMKVNTSPSAGYIRFYNEFAKRPIMYLNYVYTKAEVKFTNTEKLLTTIHKGLIKALDLGMGQEILVYSPIVSMTKIQKT | |
| | PLPERKALPIRWITWMSYLEDPRIQFHYDKTLPELQQVPTVTDDIIAKIKHPSEFSMVFYTDGSAIKHPNVNKSHNAGMGIAQVQFKPE | |
| | FTVINTWSIPLGDHTAQLAEVAAVEFACKKALKIDGPVLIVTDSFYVAESVNKELPYWQSNGFFNNKKKPLKHVSKWKSIADCIQLKPD | |
| | IIIIHEKGHQPTASTFHTEGNNLADKLATQGSYVVN | |
| SFV3L_ | MDPLQLLQPLEAEIKGTKLKAHWNSGATITCVPQAFLEEEVPIKNIWIKTIHGEKEQPVYYLTFKIQGRKVEAEVISSPYDYILVSPSDIP | 4530 |
| P27401_2mut | WLMKKPLQLTTLVPLQEYEERLLKQTMLTGSYKEKLQSLFLKYDALWQHWENQVGHRRIKPHHIATGTVNPRPQKQYPINPKAKASI | |
| | QTVINDLLKQGVLIQQNSIMNTPVYPVPKPDGKWRMVLDYREVNKTIPLIAAQNQHSAGILSSIFRGKYKTTLDLSNGFWAHSITPESY | |
| | WLTAFTWLGQQYCWTRLPQGFLNSPALFNADVVDLLKEVPNVQVYVDDIYISHDDPREHLEQLEKVFSLLLNAGYVVSLKKSEIAQH | |
| | EVEFLGFNITKEGRGLTETFKQKLLNITPPRDLKQLQSILGLLNFARNFIPNFSELVKPLYNIIATAPGKYITWTTDNSQQLQNIISMLNSA | |
| | ENLEERNPEVRLIMKVNTSPSAGYIRFYNEFAKRPIMYLNYVYTKAEVKFTNTEKLLTTIHKGLIKALDLGMGQEILVYSPIVSMTKIQKT | |
| | PLPERKALPIRWITWMSYLEDPRIQFHYDKTLPELQQVPTVTDDIIAKIKHPSEFSMVFYTDGSAIKHPNVNKSHNAGMGIAQVQFKPE | |
| | FTVINTWSIPLGDHTAQLAEVAAVEFACKKALKIDGPVLIVTDSFYVAESVNKELPYWQSNGFFNNKKKPLKHVSKWKSIADCIQLKPD | |
| | IIIIHEKGHQPTASTFHTEGNNLADKLATQGSYVVN | |
| SFV3L_ | MDPLQLLQPLEAEIKGTKLKAHWNSGATITCVPQAFLEEEVPIKNIWIKTIHGEKEQPVYYLTFKIQGRKVEAEVISSPYDYILVSPSDIP | 4531 |
| P27401_2mutA | WLMKKPLQLTTLVPLQEYEERLLKQTMLTGSYKEKLQSLFLKYDALWQHWENQVGHRRIKPHHIATGTVNPRPQKQYPINPKAKASI | |
| | QTVINDLLKQGVLIQQNSIMNTPVYPVPKPDGKWRMVLDYREVNKTIPLIAAQNQHSAGILSSIFRGKYKTTLDLSNGFWAHSITPESY | |
| | WLTAFTWLGQQYCWTRLPQGFLNSPALFNADVVDLLKEVPNVQVYVDDIYISHDDPREHLEQLEKVFSLLLNAGYVVSLKKSEIAQH | |
| | EVEFLGFNITKEGRGLTETFKQKLLNITPPRDLKQLQSILGKLNFARNFIPNFSELVKPLYNIIATAPGKYITWTTDNSQQLQNIISMLNSA | |
| | ENLEERNPEVRLIMKVNTSPSAGYIRFYNEFAKRPIMYLNYVYTKAEVKFTNTEKLLTTIHKGLIKALDLGMGQEILVYSPIVSMTKIQKT | |
| | PLPERKALPIRWITWMSYLEDPRIQFHYDKTLPELQQVPTVTDDIIAKIKHPSEFSMVFYTDGSAIKHPNVNKSHNAGMGIAQVQFKPE | |
| | FTVINTWSIPLGDHTAQLAEVAAVEFACKKALKIDGPVLIVTDSFYVAESVNKELPYWQSNGFFNNKKKPLKHVSKWKSIADCIQLKPD | |
| | IIIIHEKGHQPTASTFHTEGNNLADKLATQGSYVVN | |
| SFV3L_ | IPWLMKKPLQLTTLVPLQEYEERLLKQTMLTGSYKEKLQSLFLKYDALWQHWENQVGHRRIKPHHIATGTVNPRPQKQYPINPKAKA | 4532 |
| P27401-Pro | SIQTVINDLLKQGVLIQQNSIMNTPVYPVPKPDGKWRMVLDYREVNKTIPLIAAQNQHSAGILSSIFRGKYKTTLDLSNGFWAHSITPES | |
| | YWLTAFTWLGQQYCWTRLPQGFLNSPALFTADVVDLLKEVPNVQVYVDDIYISHDDPREHLEQLEKVFSLLLNAGYVVSLKKSEIAQ | |
| | HEVEFLGFNITKEGRGLTETFKQKLLNITPPRDLKQLQSILGLLNFARNFIPNFSELVKPLYNIIATANGKYITWTTDNSQQLQNIISMLNS | |
| | AENLEERNPEVRLIMKVNTSPSAGYIRFYNEFAKRPIMYLNYVYTKAEVKFTNTEKLLTTIHKGLIKALDLGMGQEILVYSPIVSMTKIQK | |
| | TPLPERKALPIRWITWMSYLEDPRIQFHYDKTLPELQQVPTVTDDIIAKIKHPSEFSMVFYTDGSAIKHPNVNKSHNAGMGIAQVQFKP | |
| | EFTVINTWSIPLGDHTAQLAEVAAVEFACKKALKIDGPVLIVTDSFYVAESVNKELPYWQSNGFFNNKKKPLKHVSKWKSIADCIQLKP | |
| | DIIIIHEKGHQPTASTFHTEGNNLADKLATQGSYVVN | |
| SFV3L_ | IPWLMKKPLQLTTLVPLQEYEERLLKQTMLTGSYKEKLQSLFLKYDALWQHWENQVGHRRIKPHHIATGTVNPRPQKQYPINPKAKA | 4533 |
| P27401- | SIQTVINDLLKQGVLIQQNSIMNTPVYPVPKPDGKWRMVLDYREVNKTIPLIAAQNQHSAGILSSIFRGKYKTTLDLSNGFWAHSITPES | |
| Pro_2mut | YWLTAFTWLGQQYCWTRLPQGFLNSPALFNADVVDLLKEVPNVQVYVDDIYISHDDPREHLEQLEKVFSLLLNAGYVVSLKKSEIAQ | |
| | HEVEFLGFNITKEGRGLTETFKQKLLNITPPRDLKQLQSILGLLNFARNFIPNFSELVKPLYNIIATAPGKYITWTTDNSQQLQNIISMLNS | |
| | AENLEERNPEVRLIMKVNTSPSAGYIRFYNEFAKRPIMYLNYVYTKAEVKFTNTEKLLTTIHKGLIKALDLGMGQEILVYSPIVSMTKIQK | |
| | TPLPERKALPIRWITWMSYLEDPRIQFHYDKTLPELQQVPTVTDDIIAKIKHPSEFSMVFYTDGSAIKHPNVNKSHNAGMGIAQVQFKP | |
| | EFTVINTWSIPLGDHTAQLAEVAAVEFACKKALKIDGPVLIVTDSFYVAESVNKELPYWQSNGFFNNKKKPLKHVSKWKSIADCIQLKP | |
| | DIIIIHEKGHQPTASTFHTEGNNLADKLATQGSYVVN | |
| SFV3L_ | IPWLMKKPLQLTTLVPLQEYEERLLKQTMLTGSYKEKLQSLFLKYDALWQHWENQVGHRRIKPHHIATGTVNPRPQKQYPINPKAKA | 4534 |
| P27401- | SIQTVINDLLKQGVLIQQNSIMNTPVYPVPKPDGKWRMVLDYREVNKTIPLIAAQNQHSAGILSSIFRGKYKTTLDLSNGFWAHSITPES | |
| Pro_2mutA | YWLTAFTWLGQQYCWTRLPQGFLNSPALFNADVVDLLKEVPNVQVYVDDIYISHDDPREHLEQLEKVFSLLLNAGYVVSLKKSEIAQ | |
| | HEVEFLGFNITKEGRGLTETFKQKLLNITPPRDLKQLQSILGKLNFARNFIPNFSELVKPLYNIIATAPGKYITWTTDNSQQLQNIISMLNS | |
| | AENLEERNPEVRLIMKVNTSPSAGYIRFYNEFAKRPIMYLNYVYTKAEVKFTNTEKLLTTIHKGLIKALDLGMGQEILVYSPIVSMTKIQK | |
| | TPLPERKALPIRWITWMSYLEDPRIQFHYDKTLPELQQVPTVTDDIIAKIKHPSEFSMVFYTDGSAIKHPNVNKSHNAGMGIAQVQFKP | |
| | EFTVINTWSIPLGDHTAQLAEVAAVEFACKKALKIDGPVLIVTDSFYVAESVNKELPYWQSNGFFNNKKKPLKHVSKWKSIADCIQLKP | |
| | DIIIIHEKGHQPTASTFHTEGNNLADKLATQGSYVVN | |
| SFVCP_ | MNPLQLLQPLPAEVKGTKLLAHWNSGATITCIPESFLEDEQPIKQTLIKTIHGEKQQNVYYLTFKVKGRKVEAEVIASPYEYILLSPTDV | 4535 |
| Q87040 | PWLTQQPLQLTILVPLQEYQDRINKTALPEEQKQQLKALFTKYDNLWQHWENQVGHRKIRPHNIATGDYPPRPQKQYPINPKAKPSI | |
| | QIVIDDLLKQGVLTPQNSTMNTPVYPVPKPDGRWRMVLDYREVNKTIPLTAAQNQHSAGILATIVRQKYKTTLDLANGFWAHPITPDS | |
| | YWLTAFTWQGKQYCWTRLPQGFLNSPALFTADAVDLLKEVPNVQVYVDDIYLSHDNPHEHIQQLEKVFQILLQAGYVVSLKKSEIGQ | |
| | RTVEFLGFNITKEGRGLTDTFKTKLLNVTPPKDLKQLQSILGLLNFARNFIPNFAELVQTLYNLIASSKGKYIEWTEDNTKQLNKVIEALN | |
| | TASNLEERLPDQRLVIKVNTSPSAGYVRYYNESGKKPIMYLNYVFSKAELKFSMLEKLLTTMHKALIKAMDLAMGQEILVYSPIVSMTKI | |
| | QKTPLPERKALPIRWITWMTYLEDPRIQFHYDKTLPELKHIPDVYTSSIPPLKHPSQYEGVFCTDGSAIKSPDPTKSNNAGMGIVHAIY | |
| | NPEYKILNQWSIPLGHHTAQMAEIAAVEFACKKALKVPGPVLVITDSFYVAESANKELPYWKSNGFVNNKKEPLKHISKWKSIAECLSI | |
| | KPDITIQHEKGHQPINTSIHTEGNALADKLATQGSYVVN | |
| SFVCP_ | MNPLQLLQPLPAEVKGTKLLAHWNSGATITCIPESFLEDEQPIKQTLIKTIHGEKQQNVYYLTFKVKGRKVEAEVIASPYEYILLSPTDV | 4536 |
| Q87040_2mut | PWLTQQPLQLTILVPLQEYQDRINKTALPEEQKQQLKALFTKYDNLWQHWENQVGHRKIRPHNIATGDYPPRPQKQYPINPKAKPSI | |
| | QIVIDDLLKQGVLTPQNSTMNTPVYPVPKPDGRWRMVLDYREVNKTIPLTAAQNQHSAGILATIVRQKYKTTLDLANGFWAHPITPDS | |
| | YWLTAFTWQGKQYCWTRLPQGFLNSPALFNADAVDLLKEVPNVQVYVDDIYLSHDNPHEHIQQLEKVFQILLQAGYVVSLKKSEIGQ | |
| | RTVEFLGFNITKEGRGLTDTFKTKLLNVTPPKDLKQLQSILGLLNFARNFIPNFAELVQTLYNLIASSPGKYIEWTEDNTKQLNKVIEALN | |
| | TASNLEERLPDQRLVIKVNTSPSAGYVRYYNESGKKPIMYLNYVFSKAELKFSMLEKLLTTMHKALIKAMDLAMGQEILVYSPIVSMTKI | |
| | QKTPLPERKALPIRWITWMTYLEDPRIQFHYDKTLPELKHIPDVYTSSIPPLKHPSQYEGVFCTDGSAIKSPDPTKSNNAGMGIVHAIY | |
| | NPEYKILNQWSIPLGHHTAQMAEIAAVEFACKKALKVPGPVLVITDSFYVAESANKELPYWKSNGFVNNKKEPLKHISKWKSIAECLSI | |
| | KPDITIQHEKGHQPINTSIHTEGNALADKLATQGSYVVN | |
| SFVCP_ | MNPLQLLQPLPAEVKGTKLLAHWNSGATITCIPESFLEDEQPIKQTLIKTIHGEKQQNVYYLTFKVKGRKVEAEVIASPYEYILLSPTDV | 4537 |
| Q87040_2mutA | PWLTQQPLQLTILVPLQEYQDRINKTALPEEQKQQLKALFTKYDNLWQHWENQVGHRKIRPHNIATGDYPPRPQKQYPINPKAKPSI | |
| | QIVIDDLLKQGVLTPQNSTMNTPVYPVPKPDGRWRMVLDYREVNKTIPLTAAQNQHSAGILATIVRQKYKTTLDLANGFWAHPITPDS | |
| | YWLTAFTWQGKQYCWTRLPQGFLNSPALFNADAVDLLKEVPNVQVYVDDIYLSHDNPHEHIQQLEKVFQILLQAGYVVSLKKSEIGQ | |
| | RTVEFLGFNITKEGRGLTDTFKTKLLNVTPPKDLKQLQSILGKLNFARNFIPNFAELVQTLYNLIASSPGKYIEWTEDNTKQLNKVIEALN | |
| | TASNLEERLPDQRLVIKVNTSPSAGYVRYYNESGKKPIMYLNYVFSKAELKFSMLEKLLTTMHKALIKAMDLAMGQEILVYSPIVSMTKI | |
| | QKTPLPERKALPIRWITWMTYLEDPRIQFHYDKTLPELKHIPDVYTSSIPPLKHPSQYEGVFCTDGSAIKSPDPTKSNNAGMGIVHAIY | |
| | NPEYKILNQWSIPLGHHTAQMAEIAAVEFACKKALKVPGPVLVITDSFYVAESANKELPYWKSNGFVNNKKEPLKHISKWKSIAECLSI | |
| | KPDITIQHEKGHQPINTSIHTEGNALADKLATQGSYVVN | |
| SFVCP_ | VPWLTQQPLQLTILVPLQEYQDRINKTALPEEQKQQLKALFTKYDNLWQHWENQVGHRKIRPHNIATGDYPPRPQKQYPINPKAKP | 4538 |
| Q87040-Pro | SIQIVIDDLLKQGVLTPQNSTMNTPVYPVPKPDGRWRMVLDYREVNKTIPLTAAQNQHSAGILATIVRQKYKTTLDLANGFWAHPITPD | |
| | SYWLTAFTWQGKQYCWTRLPQGFLNSPALFTADAVDLLKEVPNVQVYVDDIYLSHDNPHEHIQQLEKVFQILLQAGYVVSLKKSEIG | |
| | QRTVEFLGFNITKEGRGLTDTFKTKLLNVTPPKDLKQLQSILGLLNFARNFIPNFAELVQTLYNLIASSKGKYIEWTEDNTKQLNKVIEAL | |
| | NTASNLEERLPDQRLVIKVNTSPSAGYVRYYNESGKKPIMYLNYVFSKAELKFSMLEKLLTTMHKALIKAMDLAMGQEILVYSPIVSMT | |
| | KIQKTPLPERKALPIRWITWMTYLEDPRIQFHYDKTLPELKHIPDVYTSSIPPLKHPSQYEGVFCTDGSAIKSPDPTKSNNAGMGIVHAI | |
| | YNPEYKILNQWSIPLGHHTAQMAEIAAVEFACKKALKVPGPVLVITDSFYVAESANKELPYWKSNGFVNNKKEPLKHISKWKSIAECLS | |
| | IKPDITIQHEKGHQPINTSIHTEGNALADKLATQGSYVVN | |
| SFVCP_ | VPWLTQQPLQLTILVPLQEYQDRILNKTALPEEQKQQLKALFTKYDNLWQHWENQVGHRKIRPHNIATGDYPPRPQKQYPINPKAKP | 4539 |
| Q87040- | SIQIVIDDLLKQGVLTPQNSTMNTPVYPVPKPDGRWRMVLDYREVNKTIPLTAAQNQHSAGILATIVRQKYKTTLDLANGFWAHPITPD | |
| Pro_2mut | SYWLTAFTWQGKQYCWTRLPQGFLNSPALFNADAVDLLKEVPNVQVYVDDIYLSHDNPHEHIQQLEKVFQILLQAGYVVSLKKSEIG | |
| | QRTVEFLGFNITKEGRGLTDTFKTKLLNVTPPKDLKQLQSILGLLNFARNFIPNFAELVQTLYNLIASSPGKYIEWTEDNTKQLNKVIEAL | |
| | NTASNLEERLPDQRLVIKVNTSPSAGYVRYYNESGKKPIMYLNYVFSKAELKFSMLEKLLTTMHKALIKAMDLAMGQEILVYSPIVSMT | |
| | KIQKTPLPERKALPIRWITWMTYLEDPRIQFHYDKTLPELKHIPDVYTSSIPPLKHPSQYEGVFCTDGSAIKSPDPTKSNNAGMGIVHAI | |
| | YNPEYKILNQWSIPLGHHTAQMAEIAAVEFACKKALKVPGPVLVITDSFYVAESANKELPYWKSNGFVNNKKEPLKHISKWKSIAECLS | |
| | IKPDITIQHEKGHQPINTSIHTEGNALADKLATQGSYVVN | |
| SFVCP_ | VPWLTQQPLQLTILVPLQEYQDRINKTALPEEQKQQLKALFTKYDNLWQHWENQVGHRKIRPHNIATGDYPPRPQKQYPINPKAKP | 4540 |
| Q87040- | SIQIVIDDLLKQGVLTPQNSTMNTPVYPVPKPDGRWRMVLDYREVNKTIPLTAAQNQHSAGILATIVRQKYKTTLDLANGFWAHPITPD | |
| Pro_2mutA | SYWLTAFTWQGKQYCWTRLPQGFLNSPALFNADAVDLLKEVPNVQVYVDDIYLSHDNPHEHIQQLEKVFQILLQAGYVVSLKKSEIG | |
| | QRTVEFLGFNITKEGRGLTDTFKTKLLNVTPPKDLKQLQSILGKLNFARNFIPNFAELVQTLYNLIASSPGKYIEWTEDNTKQLNKVIEAL | |
| | NTASNLEERLPDQRLVIKVNTSPSAGYVRYYNESGKKPIMYLNYVFSKAELKFSMLEKLLTTMHKALIKAMDLAMGQEILVYSPIVSMT | |
| | KIQKTPLPERKALPIRWITWMTYLEDPRIQFHYDKTLPELKHIPDVYTSSIPPLKHPSQYEGVFCTDGSAIKSPDPTKSNNAGMGIVHAI | |
| | YNPEYKILNQWSIPLGHHTAQMAEIAAVEFACKKALKVPGPVLVITDSFYVAESANKELPYWKSNGFVNNKKEPLKHISKWKSIAECLS | |
| | IKPDITIQHEKGHQPINTSIHTEGNALADKLATQGSYVVN | |
| SMRVH_ | PRSRAIDIPVPHADKISWKITDPVWVDQWPLTYEKTLAAIALVQEQLAAGHIEPTNSPWNTPIFIIKKKSGSWRLLQDLRAVNKVMVPM | 4541 |
| P03364 | GALQPGLPSPVAIPLNYHKIVIDLKDCFFTIPLHPEDRPYFAFSVPQINFQSPMPRYQWKVLPQGMANSPTLCQKFVAAAIAPVRSQW | |
| | PEAYILHYMDDILLACDSAEAAKACYAHIISCLTSYGLKIAPDKVQVSEPFSYLGFELHHQQVFTPRVCLKTDHLKTLNDFQKLLGDIQW | |
| | LRPYLKLPTSALVPLNNILKGDPNPLSVRALTPEAKQSLALINKAIQNQSVQQISYNLPLVLLLLPTPHTPTAVFWQPNGTDPTKNGSPL | |
| | LWLHLPASPSKVLLTYPSLLAMLIIKGRYTGRQLFGRDPHSIIIPYTQDQLTWLLQTSDEWAIALSSFTGDIDNHYPSDPVIQFAKLHQFI | |
| | FPKITKCAPIPQATLVFTDGSSNGIAAYVIDNQPISIKSPYLSAQLVELYAILQVFTVLAHQPFNLYTDSAYIAQSVPLLETVPFIKSSTNAT | |
| | PLFSKLQQLILNRQHPFFIGHLRAHLNLPGPLAEGNALADAATQIFPIISD | |
| SMRVH_ | PRSRAIDIPVPHADKISWKITDPVWVDQWPLTYEKTLAAIALVQEQLAAGHIEPTNSPWNTPIFIIKKKSGSWRLLQDLRAVNKVMVPM | 4542 |
| P03364_2mut | GALQPGLPSPVAIPLNYHKIVIDLKDCFFTIPLHPEDRPYFAFSVPQINFQSPMPRYQWKVLPQGMANSPTLCQKFVAAAIAPVRSQW | |
| | PEAYILHYMDDILLACDSAEAAKACYAHIISCLTSYGLKIAPDKVQVSEPFSYLGFELHHQQVFTPRVCLKTDHLKTLNDFQKLLGDIQW | |
| | LRPYLKLPTSALVPLNNILKPDPNPLSVRALTPEAKQSLALINKAIQNQSVQQISYNLPLVLLLLPTPHTPTAVFWQPNGTDPTKNGSPL | |
| | LWLHLPASPSKVLLTYPSLLAMLIIKGRYTGRQLFGRDPHSIIIPYTQDQLTWLLQTSDEWAIALSSFTGDIDNHYPSDPVIQFAKLHQFI | |
| | FPKITKCAPIPQATLVFTDGSSNGIAAYVIDNQPISIKSPYLSAQLVELYAILQVFTVLAHQPFNLYTDSAYIAQSVPLLETVPFIKSSTNAT | |
| | PLFSKLQQLILNRQHPFFIGHLRAHLNLPGPLAEGNALADAATQIFPIISD | |
| SMRVH_ | PRSRAIDIPVPHADKISWKITDPVWVDQWPLTYEKTLAAIALVQEQLAAGHIEPTNSPWNTPIFIIKKKSGSWRLLQDLRAVNKVMVPM | 4543 |
| P03364_2mutB | GALQPGLPSPVAPPLNYHKIVIDLKDCFFTIPLHPEDRPYFAFSVPQINFQSPMPRYQWKVLPQGMANSPTLCQKFVAAAIAPVRSQW | |
| | PEAYILHYMDDILLACDSAEAAKACYAHIISCLTSYGLKIAPDKVQVSEPFSYLGFELHHQQVFTPRVCLKTDHLKTLNDFQKLLGDIQW | |
| | LRPYLKLPTSALVPLNNILKPDPNPLSVRALTPEAKQSLALINKAIQNQSVQQISYNLPLVLLLLPTPHTPTAVFWQPNGTDPTKNGSPL | |
| | LWLHLPASPSKVLLTYPSLLAMLIIKGRYTGRQLFGRDPHSIIIPYTQDQLTWLLQTSDEWAIALSSFTGDIDNHYPSDPVIQFAKLHQFI | |
| | FPKITKCAPIPQATLVFTDGSSNGIAAYVIDNQPISIKSPYLSAQLVELYAILQVFTVLAHQPFNLYTDSAYIAQSVPLLETVPFIKSSTNAT | |
| | PLFSKLQQLILNRQHPFFIGHLRAHLNLPGPLAEGNALADAATQIFPIISD | |
| SRV2_ | LATAVDILAPQRYADPITWKSDEPVWVDQWPLTQEKLAAAQQLVQEQLQAGHIIESNSPWNTPIFVIKKKSGKWRLLQDLRAVNATM | 4544 |
| P51517 | VLMGALQPGLPSPVAIPQGYFKIVIDLKDCFFTIPLQPVDQKRFAFSLPSTNFKQPMKRYQWKVLPQGMANSPTLCQKYVAAAIEPVR | |
| | KSWAQMYIIHYMDDILIAGKLGEQVLQCFAQLKQALTTTGLQIAPEKVQLQDPYTYLGFQINGPKITNQKAVIRRDKLQTLNDFQKLLG | |
| | DINWLRPYLHLTTGDLKPLFDILKGDSNPNSPRSLSEAALASLQKVETAIAEQFVTQIDYTQPLTFLIFNTTLTPTGLFWQNNPVMWVH | |
| | LPASPKKVLLPYYDAIADLIILGRDNSKKYFGLEPSTIIQPYSKSQIHWLMQNTETWPIACASYAGNIDNHYPPNKLIQFCKLHAVVFPRII | |
| | SKTPLDNALLVFTDGSSTGIAAYTFEKTTVRFKTSHTSAQLVELQALIAVLSAFPHRALNVYTDSAYLAHSIPLLETVSHIKHISDTAKFF | |
| | LQCQQLIYNRSIPFYLGHIRAHSGLPGPLSQGNHITDLATKVVATTLTT | |
| SRV2_ | LATAVDILAPQRYADPITWKSDEPVWVDQWPLTQEKLAAAQQLVQEQLQAGHIIESNSPWNTPIFVIKKKSGKWRLLQDLRAVNATM | 4545 |
| P51517_2mutB | VLMGALQPGLPSPVAPPQGYFKIVIDLKDCFFTIPLQPVDQKRFAFSLPSTNFKQPMKRYQWKVLPQGMANSPTLCQKYVAAAIEPV | |
| | RKSWAQMYIIHYMDDILIAGKLGEQVLQCFAQLKQALTTTGLQIAPEKVQLQDPYTYLGFQINGPKITNQKAVIRRDKLQTLNDFQKLL | |
| | GDINWLRPYLHLTTGDLKPLFDILKGDSNPNSPRSLSEAALASLQKVETAIAEQFVTQIDYTQPLTFLIFNTTLTPTGLFWQNNPVMWV | |
| | HLPASPKKVLLPYYDAIADLIILGRDNSKKYFGLEPSTIIQPYSKSQIHWLMQNTETWPIACASYAGNIDNHYPPNKLIQFCKLHAVVFP | |
| | RIISKTPLDNALLVFTDGSSTGIAAYTFEKTTVRFKTSHTSAQLVELQALIAVLSAFPHRALNVYTDSAYLAHSIPLLETVSHIKHISDTAK | |
| | FFLQCQQLIYNRSIPFYLGHIRAHSGLPGPLSQGNHITDLATKVVATTLTT | |
| WDSV_ | SCQTKNTLNIDEYLLQFPDQLWASLPTDIGRMLVPPITIKIKDNASLPSIRQYPLPKDKTEGLRPLISSLENQGILIKCHSPCNTPIFPIKKA | 4546 |
| O92815 | GRDEYRMIHDLRAINNIVAPLTAVVASPTTVLSNLAPSLHWFTVIDLSNAFFSVPIHKDSQYLFAFTFEGHQYTWTVLPQGFIHSPTLFS | |
| | QALYQSLHKIKFKISSEICIYMDDVLIASKDRDTNLKDTAVMLQHLASEGHKVSKKKLQLCQQEVVYLGQLLTPEGRKILPDRKVTVSQ | |
| | FQQPTTIRQIRAFLGLVGYCRHWIPEFSIHSKFLEKQLKKDTAEPFQLDDQQVEAFNKLKHAITTAPVLVVPDPAKPFQLYTSHSEHASI | |
| | AVLTQKHAGRTRPIAFLSSKFDAIESGLPPCLKACASIHRSLTQADSFILGAPLIIYTTHAICTLLQRDRSQLVTASRFSKWEADLLRPEL | |
| | TFVACSAVSPAHLYMQSCENNIPPHDCVLLTHTISRPRPDLSDLPIPDPDMTLFSDGSYTTGRGGAAVVMHRPVTDDFIIIHQQPGGA | |
| | SAQTAELLALAAACHLATDKTVNIYTDSRYAYGVVHDFGHLWMHRGFVTSAGTPIKNHKEIEYLLKQIMKPKQVSVIKIEAHTKGVSME | |
| | VRGNAAADEAAKNAVFLVQR | |
| WDSV_ | SCQTKNTLNIDEYLLQFPDQLWASLPTDIGRMLVPPITIKIKDNASLPSIRQYPLPKDKTEGLRPLISSLENQGILIKCHSPCNTPIFPIKKA | 4547 |
| O92815_2mut | GRDEYRMIHDLRAINNIVAPLTAVVASPTTVLSNLAPSLHWFTVIDLSNAFFSVPIHKDSQYLFAFTFEGHQYTWTVLPQGFIHSPTLFN | |
| | QALYQSLHKIKFKISSEICIYMDDVLIASKDRDTNLKDTAVMLQHLASEGHKVSKKKLQLCQQEVVYLGQLLTPEGRKILPDRKVTVSQ | |
| | FQQPTTIRQIRAFLGLVGYCRHWIPEFSIHSKFLEKQLKPDTAEPFQLDDQQVEAFNKLKHAITTAPVLVVPDPAKPFQLYTSHSEHASI | |
| | AVLTQKHAGRTRPIAFLSSKFDAIESGLPPCLKACASIHRSLTQADSFILGAPLIIYTTHAICTLLQRDRSQLVTASRFSKWEADLLRPEL | |
| | TFVACSAVSPAHLYMQSCENNIPPHDCVLLTHTISRPRPDLSDLPIPDPDMTLFSDGSYTTGRGGAAVVMHRPVTDDFIIIHQQPGGA | |
| | SAQTAELLALAAACHLATDKTVNIYTDSRYAYGVVHDFGHLWMHRGFVTSAGTPIKNHKEIEYLLKQIMKPKQVSVIKIEAHTKGVSME | |
| | VRGNAAADEAAKNAVFLVQR | |
| WDSV_ | SCQTKNTLNIDEYLLQFPDQLWASLPTDIGRMLVPPITIKIKDNASLPSIRQYPLPKDKTEGLRPLISSLENQGILIKCHSPCNTPIFPIKKA | 4548 |
| O92815_2mutA | GRDEYRMIHDLRAINNIVAPLTAVVASPTTVLSNLAPSLHWFTVIDLSNAFFSVPIHKDSQYLFAFTFEGHQYTWTVLPQGFIHSPTLFN | |
| | QALYQSLHKIKFKISSEICIYMDDVLIASKDRDTNLKDTAVMLQHLASEGHKVSKKKLQLCQQEVVYLGQLLTPEGRKILPDRKVTVSQ | |
| | FQQPTTIRQIRAFLGKVGYCRHFIPEFSIHSKFLEKQLKPDTAEPFQLDDQQVEAFNKLKHAITTAPVLVVPDPAKPFQLYTSHSEHASI | |
| | AVLTQKHAGRTRPIAFLSSKFDAIESGLPPCLKACASIHRSLTQADSFILGAPLIIYTTHAICTLLQRDRSQLVTASRFSKWEADLLRPEL | |
| | TFVACSAVSPAHLYMQSCENNIPPHDCVLLTHTISRPRPDLSDLPIPDPDMTLFSDGSYTTGRGGAAVVMHRPVTDDFIIIHQQPGGA | |
| | SAQTAELLALAAACHLATDKTVNIYTDSRYAYGVVHDFGHLWMHRGFVTSAGTPIKNHKEIEYLLKQIMKPKQVSVIKIEAHTKGVSME | |
| | VRGNAAADEAAKNAVFLVQR | |
| WMSV_ | VLNLEEEYRLHEKPVPSSIDPSWLQLFPTVWAERAGMGLANQVPPVVVELRSGASPVAVRQYPMSKEAREGIRPHIQRFLDLGVLVP | 4549 |
| P03359 | CQSPWNTPLLPVKKPGTNDYRPVQDLREINKRVQDIHPTVPNPYNLLSSLPPSHTWYSVLDLKDAFFCLKLHPNSQPLFAFEWRDPE | |
| | KGNTGQLTWTRLPQGFKNSPTLFDEALHRDLAPFRALNPQVVLLQYVDDLLVAAPTYRDCKEGTQKLLQELSKLGYRVSAKKAQLC | |
| | QKEVTYLGYLLKEGKRWLTPARKATVMKIPPPTTPRQVREFLGTAGFCRLWIPGFASLAAPLYPLTKESIPFIWTEEHQKAFDRIKEAL | |
| | LSAPALALPDLTKPFTLYVDERAGVARGVLTQTLGPWRRPVAYLSKKLDPVASGWPTCLKAVAAVALLLKDADKLTLGQNVTVIASHS | |
| | LESIVRQPPDRWMTNARMTHYQSLLLNERVSFAPPAVLNPATLLPVESEATPVHRCSEILAEETGTRRDLKDQPLPGVPAWYTDGSS | |
| | FIAEGKRRAGAAIVDGKRTVWASSLPEGTSAQKAELVALTQALRLAEGKDINIYTDSRYAFATAHIHGAIYKQRGLLTSAGKDIKNKEEI | |
| | LALLEAIHLPKRVAIIHCPGHQKGNDPVATGNRRADEAAKQAALSTRVLAETTKP | |
| WMSV_ | VLNLEEEYRLHEKPVPSSIDPSWLQLFPTVWAERAGMGLANQVPPVVVELRSGASPVAVRQYPMSKEAREGIRPHIQRFLDLGVLVP | 4550 |
| P03359_3mut | CQSPWNTPLLPVKKPGTNDYRPVQDLREINKRVQDIHPTVPNPYNLLSSLPPSHTWYSVLDLKDAFFCLKLHPNSQPLFAFEWRDPE | |
| | KGNTGQLTWTRLPQGFKNSPTLFNEALHRDLAPFRALNPQVVLLQYVDDLLVAAPTYRDCKEGTQKLLQELSKLGYRVSAKKAQLC | |
| | QKEVTYLGYLLKEGKRWLTPARKATVMKIPPPTTPRQVREFLGTAGFCRLWIPGFASLAAPLYPLTKPSIPFIWTEEHQKAFDRIKEAL | |
| | LSAPALALPDLTKPFTLYVDERAGVARGVLTQTLGPWRRPVAYLSKKLDPVASGWPTCLKAVAAVALLLKDADKLTLGQNVTVIASHS | |
| | LESIVRQPPDRWMTNARMTHYQSLLLNERVSFAPPAVLNPATLLPVESEATPVHRCSEILAEETGTRRDLKDQPLPGVPAWYTDGSS | |
| | FIAEGKRRAGAAIVDGKRTVWASSLPEGTSAQKAELVALTQALRLAEGKDINIYTDSRYAFATAHIHGAIYKQRGWLTSAGKDIKNKEE | |
| | ILALLEAIHLPKRVAIIHCPGHQKGNDPVATGNRRADEAAKQAALSTRVLAETTKP | |
| WMSV_ | VLNLEEEYRLHEKPVPSSIDPSWLQLFPTVWAERAGMGLANQVPPVVVELRSGASPVAVRQYPMSKEAREGIRPHIQRFLDLGVLVP | 4551 |
| P03359_3mutA | CQSPWNTPLLPVKKPGTNDYRPVQDLREINKRVQDIHPTVPNPYNLLSSLPPSHTWYSVLDLKDAFFCLKLHPNSQPLFAFEWRDPE | |
| | KGNTGQLTWTRLPQGFKNSPTLFNEALHRDLAPFRALNPQVVLLQYVDDLLVAAPTYRDCKEGTQKLLQELSKLGYRVSAKKAQLC | |
| | QKEVTYLGYLLKEGKRWLTPARKATVMKIPPPTTPRQVREFLGKAGFCRLFIPGFASLAAPLYPLTKPSIPFIWTEEHQKAFDRIKEALL | |
| | SAPALALPDLTKPFTLYVDERAGVARGVLTQTLGPWRRPVAYLSKKLDPVASGWPTCLKAVAAVALLLKDADKLTLGQNVTVIASHSL | |
| | ESIVRQPPDRWMTNARMTHYQSLLLNERVSFAPPAVLNPATLLPVESEATPVHRCSEILAEETGTRRDLKDQPLPGVPAWYTDGSSF | |
| | IAEGKRRAGAAIVDGKRTVWASSLPEGTSAQKAELVALTQALRLAEGKDINIYTDSRYAFATAHIHGAIYKQRGWLTSAGKDIKNKEEI | |
| | LALLEAIHLPKRVAIIHCPGHQKGNDPVATGNRRADEAAKQAALSTRVLAETTKP | |
| XMRV6_ | TLNIEDEYRLHETSKEPDVPLGSTWLSDFPQAWAETGGMGLAVRQAPLIIPLKATSTPVSIKQYPMSQEARLGIKPHIQRLLDQGILVP | 4552 |
| A1Z651 | CQSPWNTPLLPVKKPGTNDYRPVQDLREVNKRVEDIHPTVPNPYNLLSGLPPSHQWYTVLDLKDAFFCLRLHPTSQPLFAFEWRDP | |
| | EMGISGQLTWTRLPQGFKNSPTLFDEALHRDLADFRIQHPDLILLQYVDDLLLAATSEQDCQRGTRALLQTLGNLGYRASAKKAQICQ | |
| | KQVKYLGYLLKEGQRWLTEARKETVMGQPTPKTPRQLREFLGTAGFCRLWIPGFAEMAAPLYPLTKTGTLFNWGPDQQKAYQEIKQ | |
| | ALLTAPALGLPDLTKPFELFVDEKQGYAKGVLTQKLGPWRRPVAYLSKKLDPVAAGWPPCLRMVAAIAVLTKDAGKLTMGQPLVILA | |
| | PHAVEALVKQPPDRWLSNARMTHYQAMLLDTDRVQFGPVVALNPATLLPLPEKEAPHDCLEILAETHGTRPDLTDQPIPDADYTWYT | |
| | DGSSFLQEGQRRAGAAVTTETEVIWARALPAGTSAQRAELIALTQALKMAEGKKLNVYTDSRYAFATAHVHGEIYRRRGLLTSEGREI | |
| | KNKNEILALLKALFLPKRLSIIHCPGHQKGNSAEARGNRMADQAAREAAMKAVLETSTLL | |
| XMRV6_ | TLNIEDEYRLHETSKEPDVPLGSTWLSDFPQAWAETGGMGLAVRQAPLIIPLKATSTPVSIKQYPMSQEARLGIKPHIQRLLDQGILVP | 4553 |
| A1Z651_3mut | CQSPWNTPLLPVKKPGTNDYRPVQDLREVNKRVEDIHPTVPNPYNLLSGLPPSHQWYTVLDLKDAFFCLRLHPTSQPLFAFEWRDP | |
| | EMGISGQLTWTRLPQGFKNSPTLFNEALHRDLADFRIQHPDLILLQYVDDLLLAATSEQDCQRGTRALLQTLGNLGYRASAKKAQICQ | |
| | KQVKYLGYLLKEGQRWLTEARKETVMGQPTPKTPRQLREFLGTAGFCRLWIPGFAEMAAPLYPLTKPGTLFNWGPDQQKAYQEIKQ | |
| | ALLTAPALGLPDLTKPFELFVDEKQGYAKGVLTQKLGPWRRPVAYLSKKLDPVAAGWPPCLRMVAAIAVLTKDAGKLTMGQPLVILA | |
| | PHAVEALVKQPPDRWLSNARMTHYQAMLLDTDRVQFGPVVALNPATLLPLPEKEAPHDCLEILAETHGTRPDLTDQPIPDADYTWYT | |
| | DGSSFLQEGQRRAGAAVTTETEVIWARALPAGTSAQRAELIALTQALKMAEGKKLNVYTDSRYAFATAHVHGEIYRRRGWLTSEGR | |
| | EIKNKNEILALLKALFLPKRLSIIHCPGHQKGNSAEARGNRMADQAAREAAMKAVLETSTLL | |
| XMRV6_ | TLNIEDEYRLHETSKEPDVPLGSTWLSDFPQAWAETGGMGLAVRQAPLIIPLKATSTPVSIKQYPMSQEARLGIKPHIQRLLDQGILVP | 4554 |
| A1Z651_3mutA | CQSPWNTPLLPVKKPGTNDYRPVQDLREVNKRVEDIHPTVPNPYNLLSGLPPSHQWYTVLDLKDAFFCLRLHPTSQPLFAFEWRDP | |
| | EMGISGQLTWTRLPQGFKNSPTLFNEALHRDLADFRIQHPDLILLQYVDDLLLAATSEQDCQRGTRALLQTLGNLGYRASAKKAQICQ | |
| | KQVKYLGYLLKEGQRWLTEARKETVMGQPTPKTPRQLREFLGKAGFCRLFIPGFAEMAAPLYPLTKPGTLFNWGPDQQKAYQEIKQ | |
| | ALLTAPALGLPDLTKPFELFVDEKQGYAKGVLTQKLGPWRRPVAYLSKKLDPVAAGWPPCLRMVAAIAVLTKDAGKLTMGQPLVILA | |
| | PHAVEALVKQPPDRWLSNARMTHYQAMLLDTDRVQFGPVVALNPATLLPLPEKEAPHDCLEILAETHGTRPDLTDQPIPDADYTWYT | |
| | DGSSFLQEGQRRAGAAVTTETEVIWARALPAGTSAQRAELIALTQALKMAEGKKLNVYTDSRYAFATAHVHGEIYRRRGWLTSEGR | |
| | EIKNKNEILALLKALFLPKRLSIIHCPGHQKGNSAEARGNRMADQAAREAAMKAVLETSTLL | |

[0094] In some embodiments, reverse transcriptase domains are modified, for example by site-specific mutation. In some embodiments, reverse transcriptase domains are engineered to have improved properties, e.g. SuperScript IV (SSIV) reverse transcriptase derived from the MMLV RT. In some embodiments, the reverse transcriptase domain may be engineered to have lower error rates, e.g., as described in WO2001068895, incorporated herein by reference. In some embodiments, the reverse transcriptase domain may be engineered to be more thermostable. In some embodiments, the reverse transcriptase domain may be engineered to be more processive. In some embodiments, the reverse transcriptase domain may be engineered to have tolerance to inhibitors. In some embodiments, the reverse transcriptase domain may be engineered to be faster. In some embodiments, the reverse transcriptase domain may be engineered to better tolerate modified nucleotides in the RNA template. In some embodiments, the reverse transcriptase domain may be engineered to insert modified DNA nucleotides. In some embodiments, the reverse transcriptase domain is engineered to bind a template RNA. In some embodiments, one or more mutations are chosen from D200N, L603W, T330P, D524G, E562Q, D583N, P51L, S67R, E67K, T197A, H204R, E302K, F309N, W313F, L435G, N454K, H594Q, L671P, E69K, or D653N in the RT domain of murine leukemia virus reverse transcriptase or a corresponding mutation at a corresponding position of another RT domain.

[0095] In some embodiments, a gene modifying polypeptide comprises the RT domain from a retroviral reverse transcriptase, e.g., a wild-type M-MLV RT, e.g., comprising the following sequence:

M-MLV (WT):
(SEQ ID NO: 4012)
TLNIEDEYRLHETSKEPDVSLGSTWLSDFPQAWAETGGMGLAVRQAPLIIPLKATSTPVSI
KQYPMSQEARLGIKPHIQRLLDQGILVPCQSPWNTPLLPVKKPGTNDYRPVQDLREVNK
RVEDIHPTVPNPYNLLSGLPPSHQWYTVLDLKDAFFCLRLHPTSQPLFAFEWRDPEMGIS
GQLTWTRLPQGFKNSPTLFDEALHRDLADFRIQHPDLILLQYVDDLLLAATSELDCQQG
TRALLQTLGNLGYRASAKKAQICQKQVKYLGYLLKEGQRWLTEARKETVMGQPTPKT
PRQLREFLGTAGFCRLWIPGFAEMAAPLYPLTKTGTLFNWGPDQQKAYQEIKQALLTAP
ALGLPDLTKPFELFVDEKQGYAKGVLTQKLGPWRRPVAYLSKKLDPVAAGWPPCLRM
VAAIAVLTKDAGKLTMGQPLVILAPHAVEALVKQPPDRWLSNARMTHYQALLLDTDR
VQFGPVVALNPATLLPLPEEGLQHNCLDILAEAHGTRPDLTDQPLPDADHTWYTDGSSL
LQEGQRKAGAAVTTETEVIWAKALPAGTSAQRAELIALTQALKMAEGKKLNVYTDSRY
AFATAHIHGEIYRRRGLLTSEGKEIKNKDEILALLKALFLPKRLSIIHCPGHQKGHSAEAR
GNRMADQAARKAAITETPDTSTLLI

[0096] In some embodiments, a gene modifying polypeptide comprises the RT domain from a retroviral reverse transcriptase, e.g., an M-MLV RT, e.g., comprising the following sequence:

(SEQ ID NO: 4013)
TLNIEDEHRLHETSKEPDVSLGSTWLSDFPQAWAETGGMGLAVRQAPLIIPLKATSTPVSI
KQYPMSQEARLGIKPHIQRLLDQGILVPCQSPWNTPLLPVKKPGTNDYRPVQDLREVNK
RVEDIHPTVPNPYNLLSGLPPSHQWYTVLDLKDAFFCLRLHPTSQPLFAFEWRDPEMGIS
GQLTWTRLPQGFKNSPTLFDEALHRDLADFRIQHPDLILLQYVDDLLLAATSELDCQQG
TRALLQTLGNLGYRASAKKAQICQKQVKYLGYLLKEGQRWLTEARKETVMGQPTPKT
PRQLREFLGTAGFCRLWIPGFAEMAAPLYPLTKTGTLFNWGPDQQKAYQEIKQALLTAP
ALGLPDLTKPFELFVDEKQGYAKGVLTQKLGPWRRPVAYLSKKLDPVAAGWPPCLRM
VAAIAVLTKDAGKLTMGQPLVILAPHAVEALVKQPPDRWLSNARMTHYQALLLDTDR
VQFGPVVALNPATLLPLPEEGLQHNCLDILAEAHGTRPDLTDQPLPDADHTWYTDGSSL
LQEGQRKAGAAVTTETEVIWAKALPAGTSAQRAELIALTQALKMAEGKKLNVYTDSRY
AFATAHIHGEIYRRRGLLTSEGKEIKNKDEILALLKALFLPKRLSIIHCPGHQKGHSAEAR
GNRMADQAARKAAITETPDTSTLL

[0097] In some embodiments, a gene modifying polypeptide comprises the RT domain from a retroviral reverse transcriptase comprising the sequence of amino acids 659-1329 of NP_057933. In embodiments, the gene modifying polypeptide further comprises one additional amino acid at the N-terminus of the sequence of amino acids 659-1329 of NP_057933, e.g., as shown below:

(SEQ ID NO: 4014)
TLNIEDEHRLHETSKEPDVSLGSTWLSDFPQAWAETGGMGLAVRQAPLIIPLKATSTPVSI
KQYPMSQEARLGIKPHIQRLLDQGILVPCQSPWNTPLLPVKKPGTNDYRPVQDLREVN
KRVEDIHPTVPNPYNLLSGLPPSHQWYTVLDLKDAFFCLRLHPTSQPLFAFEWRDP
EMGISGQLTWTRLPQGFKNSPTLFDEALHRDLADFRIQHPDLILLQYVDDLLLAAT
SELDCQQGTRALLQTLGNLGYRASAKKAQICQKQVKYLGYLLKEGQRWLTEARKE
TVMGQPTPKTPRQLREFLGTAGFCRLWIPGFAEMAAPLYPLTKTGTLFNWGPDQQKAY
QEIKQALLTAPALGLPDLTKPFELFVDEKQGYAKGVLTQKLGPWRRPVAYLSKKLDPV
AAGWPPCLRMVAAIAVLTKDAGKLTMGQPLVILAPHAVEALVKQPPDRWLSNARMTH
YQALLLDTDRVQFGPVVALNPATLLPLPEEGLQHNCLDILAEAHGTRPDLTDQPLPDAD
HTWYTDGSSLLQEGQRKAGAAVTTETEVIWAKALPAGTSAQRAELIALTQALKMAEGK
KLNVYTDSRYAFATAHIHGEIYRRRGLLTSEGKEIKNKDEILALLKALFLPKRLSIIHCPG
HQKGHSAEARGNRMADQAARKAA

Core RT (bold), annotated per above
RNAseH (underlined), annotated per above

[0098] In embodiments, the gene modifying polypeptide further comprises one additional amino acid at the C-terminus of the sequence of amino acids 659-1329 of NP_057933. In embodiments, the gene modifying polypeptide comprises an RNaseH1 domain (e.g., amino acids 1178-1318 of NP_057933).

[0099] In some embodiments, a retroviral reverse transcriptase domain, e.g., M-MLV RT, may comprise one or more mutations from a wild-type sequence that may improve features of the RT, e.g., thermostability, processivity, and/or template binding. In some embodiments, an M-MLV RT domain comprises, relative to the M-MLV (WT) sequence above, one or more mutations, e.g., selected from D200N, L603W, T330P, T306K, W313F, D524G, E562Q, D583N, P51L, S67R, E67K, T197A, H204R, E302K, F309N, L435G, N454K, H594Q, D653N, R110S, K103L, e.g., a combination of mutations, such as D200N, L603W, and T330P, optionally further including T306K and W313F. In some embodiments, an M-MLV RT used herein comprises the mutations D200N, L603W, T330P, T306K and W313F. In embodiments, the mutant M-MLV RT comprises the following amino acid sequence:

M-MLV (PE2):
(SEQ ID NO: 4015)
TLNIEDEYRLHETSKEPDVSLGSTWLSDFPQAWAETGGMGLAVRQAPLIIPLKATSTPVSI
KQYPMSQEARLGIKPHIQRLLDQGILVPCQSPWNTPLLPVKKPGTNDYRPVQDLREVNK
RVEDIHPTVPNPYNLLSGLPPSHQWYTVLDLKDAFFCLRLHPTSQPLFAFEWRDPEMGIS
GQLTWTRLPQGFKNSPTLFNEALHRDLADFRIQHPDLILLQYVDDLLLAATSELDCQQG
TRALLQTLGNLGYRASAKKAQICQKQVKYLGYLLKEGQRWLTEARKETVMGQPTPKT
PRQLREFLGKAGFCRLFIPGFAEMAAPLYPLTKPGTLFNWGPDQQKAYQEIKQALLTAP
ALGLPDLTKPFELFVDEKQGYAKGVLTQKLGPWRRPVAYLSKKLDPVAAGWPPCLRM
VAAIAVLTKDAGKLTMGQPLVILAPHAVEALVKQPPDRWLSNARMTHYQALLLDTDR
VQFGPVVALNPATLLPLPEEGLQHNCLDILAEAHGTRPDLTDQPLPDADHTWYTDGSSL
LQEGQRKAGAAVTTETEVIWAKALPAGTSAQRAELIALTQALKMAEGKKLNVYTDSRY
AFATAHIHGEIYRRRGWLTSEGKEIKNKDEILALLKALFLPKRLSIIHCPGHQKGHSAEAR
GNRMADQAARKAAITETPDTSTLLI

[0100] In some embodiments, a writing domain (e.g., RT domain) comprises an RNA-binding domain, e.g., that specifically binds to an RNA sequence. In some embodiments, a template RNA comprises an RNA sequence that is specifically bound by the RNA-binding domain of the writing domain.

[0101] In some embodiments, the reverse transcription domain only recognizes and reverse transcribes a specific template, e.g., a template RNA of the system. In some embodiments, the template comprises a sequence or structure that enables recognition and reverse transcription by a reverse transcription domain. In some embodiments, the template comprises a sequence or structure that enables association with an RNA-binding domain of a polypeptide component of a genome engineering system described herein. In some embodiments, the genome engineering system reverse preferably transcribes a template comprising an association sequence over a template lacking an association sequence.

[0102] The writing domain may also comprise DNA-dependent DNA polymerase activity, e.g., comprise enzymatic activity capable of writing DNA into the genome from a template DNA sequence. In some embodiments, DNA-dependent DNA polymerization is employed to complete second-strand synthesis of a target site edit. In some embodiments, the DNA-dependent DNA polymerase activity is provided by a DNA polymerase domain in the polypeptide. In some embodiments, the DNA-dependent DNA polymerase activity is provided by a reverse transcriptase domain that is also capable of DNA-dependent DNA polymerization, e.g., second-strand synthesis. In some embodiments, the DNA-dependent DNA polymerase activity is provided by a second polypeptide of the system. In some embodiments, the DNA-dependent DNA polymerase activity is provided by an endogenous host cell polymerase that is optionally recruited to the target site by a component of the genome engineering system.

[0103] In some embodiments, the reverse transcriptase domain has a lower probability of premature termination rate (P_{off}) in vitro relative to a reference reverse transcriptase domain. In some embodiments, the reference reverse transcriptase domain is a viral reverse transcriptase domain, e.g., the RT domain from M-MLV.

[0104] In some embodiments, the reverse transcriptase domain has a lower probability of premature termination rate (P_{off}) in vitro of less than about 5×10⁻³/nt, 5×10⁻⁴/nt, or 5×10⁻⁶/nt, e.g., as measured on a 1094 nt RNA. In embodiments, the in vitro premature termination rate is determined as described in Bibillo and Eickbush (2002) J Biol Chem 277 (38): 34836-34845 (incorporated by reference herein its entirety).

[0105] In some embodiments, the reverse transcriptase domain is able to complete at least about 30% or 50% of integrations in cells. The percent of complete integrations can be measured by dividing the number of substantially full-length integration events (e.g., genomic sites that comprise at least 98% of the expected integrated sequence) by the number of total (including substantially full-length and partial) integration events in a population of cells. In embodiments, the integrations in cells is determined (e.g., across the integration site) using long-read amplicon sequencing, e.g., as described in Karst et al. (2020) bioRxiv doi.org/10.1101/645903 (incorporated by reference herein in its entirety).

[0106] In embodiments, quantifying integrations in cells comprises counting the fraction of integrations that contain at least about 75%, 80%, 85%, 90%, 95%, 96%, 97%, 98%, 99%, or 100% of the DNA sequence corresponding to the template RNA (e.g., a template RNA having a length of at least 0.05, 0.1, 0.5, 0.6, 0.7, 0.8, 0.9, 1, 1.5, 2, 3, 4, or 5 kb, e.g., a length between 0.5-0.6, 0.6-0.7, 0.7-0.8, 0.8-0.9, 1.0-1.2, 1.2-1.4, 1.4-1.6, 1.6-1.8, 1.8-2.0, 2-3, 3-4, or 4-5 kb).

[0107] In some embodiments, the reverse transcriptase domain is capable of polymerizing dNTPs in vitro. In embodiments, the reverse transcriptase domain is capable of polymerizing dNTPs in vitro at a rate between 0.1-50 nt/sec (e.g., between 0.1-1, 1-10, or 10-50 nt/sec). In embodiments, polymerization of dNTPs by the reverse transcriptase domain is measured by a single-molecule assay, e.g., as described in Schwartz and Quake (2009) PNAS 106 (48): 20294-20299 (incorporated by reference in its entirety).

[0108] In some embodiments, the reverse transcriptase domain has an in vitro error rate (e.g., misincorporation of nucleotides) of between 1×10⁻³-1×10⁻⁴ or 1×10⁻⁴-1×10⁻⁵ substitutions/nt, e.g., as described in Yasukawa et al. (2017) Biochem Biophys Res Commun 492 (2): 147-153 (incorporated herein by reference in its entirety). In some embodiments, the reverse transcriptase domain has an error rate (e.g., misincorporation of nucleotides) in cells (e.g., HEK293T cells) of between 1×10⁻³-1×10⁻⁴ or 1×10⁻⁴-1×10⁻⁵ substitutions/nt, e.g., by long-read amplicon sequencing, e.g., as described in Karst et al. (2020) bioRxiv doi.org/10.1101/645903 (incorporated by reference herein in its entirety).

[0109] In some embodiments, the reverse transcriptase domain is capable of performing reverse transcription of a target RNA in vitro. In some embodiments, the reverse transcriptase requires a primer of at least 3 nucleotides to initiate reverse transcription of a template. In some embodiments, reverse transcription of the target RNA is determined by detection of cDNA from the target RNA (e.g., when provided with a ssDNA primer, e.g., which anneals to the target with at least 3, 4, 5, 6, 7, 8, 9, or 10 nt at the 3′ end), e.g., as described in Bibillo and Eickbush (2002) J Biol Chem 277 (38): 34836-34845 (incorporated herein by reference in its entirety).

[0110] In some embodiments, the reverse transcriptase domain performs reverse transcription at least 5 or 10 times more efficiently (e.g., by cDNA production), e.g., when converting its RNA template to cDNA, for example, as compared to an RNA template lacking the protein binding motif (e.g., a 3′ UTR). In embodiments, efficiency of reverse transcription is measured as described in Yasukawa et al. (2017) Biochem Biophys Res Commun 492 (2): 147-153 (incorporated by reference herein in its entirety).

[0111] In some embodiments, the reverse transcriptase domain specifically binds a specific RNA template with higher frequency (e.g., about 5 or 10-fold higher frequency) than any endogenous cellular RNA, e.g., when expressed in cells (e.g., HEK293T cells). In embodiments, frequency of specific binding between the reverse transcriptase domain and the template RNA are measured by CLIP-seq, e.g., as described in Lin and Miles (2019) Nucleic Acids Res 47 (11): 5490-5501 (incorporated herein by reference in its entirety).

### Template Nucleic Acid Binding Domain

[0112] The gene modifying polypeptide typically contains regions capable of associating with the template nucleic acid (e.g., template RNA). In some embodiments, the template nucleic acid binding domain is an RNA binding domain. In some embodiments, the RNA binding domain is a modular domain that can associate with RNA molecules containing specific signatures, e.g., structural motifs. In other embodiments, the template nucleic acid binding domain (e.g., RNA binding domain) is contained within the reverse transcription domain, e.g., the reverse transcriptase-derived component has a known signature for RNA preference.

[0113] In other embodiments, the template nucleic acid binding domain (e.g., RNA binding domain) is contained within the target DNA binding domain. For example, in some embodiments, the DNA binding domain is a CRISPR-associated protein that recognizes the structure of a template nucleic acid (e.g., template RNA) comprising a gRNA. In some embodiments, a gene modifying polypeptide comprises a DNA-binding domain comprising a CRISPR-associated protein that associates with a gRNA scaffold that allows the DNA-binding domain to bind a target genomic DNA sequence. In some embodiments, the gRNA scaffold and gRNA spacer is comprised within the template nucleic acid (e.g., template RNA), thus the DNA-binding domain is also the template nucleic acid binding domain. In some embodiments, the polypeptide possesses RNA binding function in multiple domains, e.g., can bind a gRNA structure in a CRISPR-associated DNA binding domain and an additional sequence or structure in a reverse transcriptase domain.

[0114] In some embodiments, the RNA binding domain is capable of binding to a template RNA with greater affinity than a reference RNA binding domain. In some embodiments, the reference RNA binding domain is an RNA binding domain from Cas9 of S. pyogenes. In some embodiments, the RNA binding domain is capable of binding to a template RNA with an affinity between 100 pM-10 nM (e.g., between 100 pM-1 nM or 1 nM-10 nM). In some embodiments, the affinity of an RNA binding domain for its template RNA is measured in vitro, e.g., by thermophoresis, e.g., as described in Asmari et al. Methods 146:107-119 (2018) (incorporated by reference herein in its entirety). In some embodiments, the affinity of an RNA binding domain for its template RNA is measured in cells (e.g., by FRET or CLIP-Seq).

[0115] In some embodiments, the RNA binding domain is associated with the template RNA in vitro at a frequency at least about 5-fold or 10-fold higher than with a scrambled RNA. In some embodiments, the frequency of association between the RNA binding domain and the template RNA or scrambled RNA is measured by CLIP-seq, e.g., as described in Lin and Miles (2019) Nucleic Acids Res 47 (11): 5490-5501 (incorporated by reference herein in its entirety). In some embodiments, the RNA binding domain is associated with the template RNA in cells (e.g., in HEK293T cells) at a frequency at least about 5-fold or 10-fold higher than with a scrambled RNA. In some embodiments, the frequency of association between the RNA binding domain and the template RNA or scrambled RNA is measured by CLIP-seq, e.g., as described in Lin and Miles (2019), supra.

### Endonuclease Domains and DNA Binding Domains

[0116] In some embodiments, a gene modifying polypeptide possesses the function of DNA target site cleavage via an endonuclease domain. In some embodiments, a gene modifying polypeptide comprises a DNA binding domain, e.g., for binding to a target nucleic acid. In some embodiments, a domain (e.g., a Cas domain) of the gene modifying polypeptide comprises two or more smaller domains, e.g., a DNA binding domain and an endonuclease domain. It is understood that when a DNA binding domain (e.g., a Cas domain) is said to bind to a target nucleic acid sequence, in some embodiments, the binding is mediated by a gRNA.

[0117] In some embodiments, a domain has two functions. For example, in some embodiments, the endonuclease domain is also a DNA-binding domain. In some embodiments, the endonuclease domain is also a template nucleic acid (e.g., template RNA) binding domain. For example, in some embodiments, a polypeptide comprises a CRISPR-associated endonuclease domain that binds a template RNA comprising a gRNA, binds a target DNA sequence (e.g., with complementarity to a portion of the gRNA), and cuts the target DNA sequence. In some embodiments, an endonuclease domain or endonuclease/DNA-binding domain from a heterologous source can be used or can be modified (e.g., by insertion, deletion, or substitution of one or more residues) in a gene modifying system described herein.

[0118] In some embodiments, a nucleic acid encoding the endonuclease domain or endonuclease/DNA binding domain is altered from its natural sequence to have altered codon usage, e.g. improved for human cells. In some embodiments, the endonuclease element is a heterologous endonuclease element, such as a Cas endonuclease (e.g., Cas9), a type-II restriction endonuclease (e.g., Fok1), a meganuclease (e.g., I-Scel), or other endonuclease domain.

[0119] In certain aspects, the DNA-binding domain of a gene modifying polypeptide described herein is selected, designed, or constructed for binding to a desired host DNA target sequence. In certain embodiments, the DNA-binding domain of the polypeptide is a heterologous DNA-binding element. In some embodiments the heterologous DNA binding element is a zinc-finger element or a TAL effector element, e.g., a zinc-finger or TAL polypeptide or functional fragment thereof. In some embodiments the heterologous DNA binding element is a sequence-guided DNA binding element, such as Cas9, Cpf1, or other CRISPR-related protein that has been altered to have no endonuclease activity. In some embodiments the heterologous DNA binding element retains endonuclease activity. In some embodiments, the heterologous DNA binding element retains partial endonuclease activity to cleave ssDNA, e.g., possesses nickase activity. In specific embodiments, the heterologous DNA-binding domain can be any one or more of Cas9, TAL domain, ZF domain, Myb domain, combinations thereof, or multiples thereof.

[0120] In some embodiments, DNA-binding domains are modified, for example by site-specific mutation, increasing or decreasing DNA-binding elements (for example, number and/or specificity of zinc fingers), etc., to alter DNA-binding specificity and affinity. In some embodiments a nucleic acid sequence encoding the DNA binding domain is altered from its natural sequence to have altered codon usage, e.g. improved for human cells. In embodiments, the DNA binding domain comprises one or more modifications relative to a wild-type DNA binding domain, e.g., a modification via directed evolution, e.g., phage-assisted continuous evolution (PACE).

[0121] In some embodiments, the DNA binding domain comprises a meganuclease domain (e.g., as described herein, e.g., in the endonuclease domain section), or a functional fragment thereof. In some embodiments, the meganuclease domain possesses endonuclease activity, e.g., double-strand cleavage and/or nickase activity. In other embodiments, the meganuclease domain has reduced activity, e.g., lacks endonuclease activity, e.g., the meganuclease is catalytically inactive. In some embodiments, a catalytically inactive meganuclease is used as a DNA binding domain, e.g., as described in Fonfara et al. Nucleic Acids Res 40 (2): 847-860 (2012), incorporated herein by reference in its entirety.

[0122] In some embodiments, a gene modifying polypeptide comprises a modification to a DNA-binding domain, e.g., relative to the wild-type polypeptide. In some embodiments, the DNA-binding domain comprises an addition, deletion, replacement, or modification to the amino acid sequence of the original DNA-binding domain. In some embodiments, the DNA-binding domain is modified to include a heterologous functional domain that binds specifically to a target nucleic acid (e.g., DNA) sequence of interest. In some embodiments, the functional domain replaces at least a portion (e.g., the entirety of) the prior DNA-binding domain of the polypeptide. In some embodiments, the functional domain comprises a zinc finger (e.g., a zinc finger that specifically binds to the target nucleic acid (e.g., DNA) sequence of interest. In some embodiments, the functional domain comprises a Cas domain (e.g., a Cas domain that specifically binds to the target nucleic acid (e.g., DNA) sequence of interest. In some embodiments, the Cas domain comprises a Cas9 or a mutant or variant thereof (e.g., as described herein). In embodiments, the Cas domain is associated with a guide RNA (gRNA), e.g., as described herein. In embodiments, the Cas domain is directed to a target nucleic acid (e.g., DNA) sequence of interest by the gRNA. In embodiments, the Cas domain is encoded in the same nucleic acid (e.g., RNA) molecule as the gRNA. In embodiments, the Cas domain is encoded in a different nucleic acid (e.g., RNA) molecule from the gRNA.

[0123] In some embodiments, the DNA binding domain is capable of binding to a target sequence (e.g., a dsDNA target sequence) with greater affinity than a reference DNA binding domain. In some embodiments, the reference DNA binding domain is a DNA binding domain from Cas9 of S. pyogenes. In some embodiments, the DNA binding domain is capable of binding to a target sequence (e.g., a dsDNA target sequence) with an affinity between 100 pM-10 nM (e.g., between 100 pM-1 nM or 1 nM-10 nM).

[0124] In some embodiments, the affinity of a DNA binding domain for its target sequence (e.g., dsDNA target sequence) is measured in vitro, e.g., by thermophoresis, e.g., as described in Asmari et al. Methods 146:107-119 (2018) (incorporated by reference herein in its entirety).

[0125] In embodiments, the DNA binding domain is capable of binding to its target sequence (e.g., dsDNA target sequence), e.g, with an affinity between 100 pM-10 nM (e.g., between 100 pM-1 nM or 1 nM-10 nM) in the presence of a molar excess of scrambled sequence competitor dsDNA, e.g., of about 100-fold molar excess.

[0126] In some embodiments, the DNA binding domain is found associated with its target sequence (e.g., dsDNA target sequence) more frequently than any other sequence in the genome of a target cell, e.g., human target cell, e.g., as measured by ChIP-seq (e.g., in HEK293T cells), e.g., as described in He and Pu (2010) Curr. Protoc Mol Biol Chapter 21 (incorporated herein by reference in its entirety). In some embodiments, the DNA binding domain is found associated with its target sequence (e.g., dsDNA target sequence) at least about 5-fold or 10-fold, more frequently than any other sequence in the genome of a target cell, e.g., as measured by ChIP-seq (e.g., in HEK293T cells), e.g., as described in He and Pu (2010), supra.

[0127] In some embodiments, the endonuclease domain has nickase activity and cleaves one strand of a target DNA. In some embodiments, nickase activity reduces the formation of double-stranded breaks at the target site. In some embodiments, the endonuclease domain creates a staggered nick structure in the first and second strands of a target DNA. In some embodiments, a staggered nick structure generates free 3′ overhangs at the target site. In some embodiments, free 3′ overhangs at the target site improve editing efficiency, e.g., by enhancing access and annealing of a 3′ homology region of a template nucleic acid. In some embodiments, a staggered nick structure reduces the formation of double-stranded breaks at the target site.

[0128] In some embodiments, the endonuclease domain cleaves both strands of a target DNA, e.g., results in blunt-end cleavage of a target with no ssDNA overhangs on either side of the cut-site. The amino acid sequence of an endonuclease domain of a gene modifying system described herein may be at least about 50%, at least about 60%, at least about 70%, at least about 80%, at least about 85%, at least about 90%, at least about 95%, at least about 96%, at least about 97%, at least about 98%, at least about 99% identical to the amino acid sequence of an endonuclease domain described herein.

[0129] In certain embodiments, the heterologous endonuclease is Fok1 or a functional fragment thereof. In certain embodiments, the heterologous endonuclease is a Holliday junction resolvase or homolog thereof, such as the Holliday junction resolving enzyme from Sulfolobus solfataricus—Ssol Hje (Govindaraju et al., Nucleic Acids Research 44:7, 2016). In certain embodiments, the heterologous endonuclease is the endonuclease of the large fragment of a spliceosomal protein, such as Prp8 (Mahbub et al., Mobile DNA 8:16, 2017). In certain embodiments, the heterologous endonuclease is derived from a CRISPR-associated protein, e.g., Cas9. In certain embodiments, the heterologous endonuclease is engineered to have only ssDNA cleavage activity, e.g., only nickase activity, e.g., be a Cas9 nickase, e.g., SpCas9 with D10A, H840A, or N863A mutations. Table 3 provides exemplary Cas proteins and mutations associated with nickase activity. In still other embodiments, homologous endonuclease domains are modified, for example by site-specific mutation, to alter DNA endonuclease activity. In still other embodiments, endonuclease domains are modified to reduce DNA-sequence specificity, e.g., by truncation to remove domains that confer DNA-sequence specificity or mutation to inactivate regions conferring DNA-sequence specificity.

[0130] In some embodiments, the endonuclease domain has nickase activity and does not form double-stranded breaks. In some embodiments, the endonuclease domain forms single-stranded breaks at a higher frequency than double-stranded breaks, e.g., at least 90%, 95%, 96%, 97%, 98%, or 99% of the breaks are single-stranded breaks, or less than 10%, 5%, 4%, 3%, 2%, or 1% of the breaks are double-stranded breaks. In some embodiments, the endonuclease forms substantially no double-stranded breaks. In some embodiments, the endonuclease does not form detectable levels of double-stranded breaks.

[0131] In some embodiments, the endonuclease domain has nickase activity that nicks the target site DNA of the first strand; e.g., in some embodiments, the endonuclease domain cuts the genomic DNA of the target site near to the site of alteration on the strand that will be extended by the writing domain. In some embodiments, the endonuclease domain has nickase activity that nicks the target site DNA of the first strand and does not nick the target site DNA of the second strand. For example, when a polypeptide comprises a CRISPR-associated endonuclease domain having nickase activity, in some embodiments, said CRISPR-associated endonuclease domain nicks the target site DNA strand containing the PAM site (e.g., and does not nick the target site DNA strand that does not contain the PAM site). As a further example, when a polypeptide comprises a CRISPR-associated endonuclease domain having nickase activity, in some embodiments, said CRISPR-associated endonuclease domain nicks the target site DNA strand not containing the PAM site (e.g., and does not nick the target site DNA strand that contains the PAM site).

[0132] In some other embodiments, the endonuclease domain has nickase activity that nicks the target site DNA of the first strand and the second strand. Without wishing to be bound by theory, after a writing domain (e.g., RT domain) of a polypeptide described herein polymerizes (e.g., reverse transcribes) from the heterologous object sequence of a template nucleic acid (e.g., template RNA), the cellular DNA repair machinery must repair the nick on the first DNA strand. The target site DNA now contains two different sequences for the first DNA strand: one corresponding to the original genomic DNA (e.g., having a free 5′ end) and a second corresponding to that polymerized from the heterologous object sequence (e.g., having a free 3′ end). It is thought that the two different sequences equilibrate with one another, first one hybridizing the second strand, then the other, and which sequence the cellular DNA repair apparatus incorporates into its repaired target site may be a stochastic process. Without wishing to be bound by theory, it is thought that introducing an additional nick to the second-strand may bias the cellular DNA repair machinery to adopt the heterologous object sequence-based sequence more frequently than the original genomic sequence (Anzalone et al. Nature 576:149-157 (2019)). In some embodiments, the additional nick is positioned at least 10, 15, 20, 25, 30, 35, 40, 45, 50, 55, 60, 65, 70, 75, 80, 85, 90, 95, 100, 105, 110, 115, 120, 125, 130, 135, 140, 145, or 150 nucleotides 5′ or 3′ of the target site modification (e.g., the insertion, deletion, or substitution) or to the nick on the first strand.

[0133] Alternatively, or additionally, without wishing to be bound by theory, it is thought that an additional nick to the second strand may promote second-strand synthesis. In some embodiments, where the gene modifying system has inserted or substituted a portion of the first strand, synthesis of a new sequence corresponding to the insertion/substitution in the second strand is necessary.

[0134] In some embodiments, the polypeptide comprises a single domain having endonuclease activity (e.g., a single endonuclease domain) and said domain nicks both the first strand and the second strand. For example, in such an embodiment the endonuclease domain may be a CRISPR-associated endonuclease domain, and the template nucleic acid (e.g., template RNA) comprises a gRNA spacer that directs nicking of the first strand and an additional gRNA spacer that directs nicking of the second strand. In some embodiments, the polypeptide comprises a plurality of domains having endonuclease activity, and a first endonuclease domain nicks the first strand and a second endonuclease domain nicks the second strand (optionally, the first endonuclease domain does not (e.g., cannot) nick the second strand and the second endonuclease domain does not (e.g., cannot) nick the first strand).

[0135] In some embodiments, the endonuclease domain is capable of nicking a first strand and a second strand. In some embodiments, the first and second strand nicks occur at the same position in the target site but on opposite strands. In some embodiments, the second strand nick occurs in a staggered location, e.g., upstream or downstream, from the first nick. In some embodiments, the endonuclease domain generates a target site deletion if the second strand nick is upstream of the first strand nick. In some embodiments, the endonuclease domain generates a target site duplication if the second strand nick is downstream of the first strand nick. In some embodiments, the endonuclease domain generates no duplication and/or deletion if the first and second strand nicks occur in the same position of the target site. In some embodiments, the endonuclease domain has altered activity depending on protein conformation or RNA-binding status, e.g., which promotes the nicking of the first or second strand (e.g., as described in Christensen et al. PNAS 2006; incorporated by reference herein in its entirety).

[0136] In some embodiments, the endonuclease domain comprises a meganuclease, or a functional fragment thereof. In some embodiments, the endonuclease domain comprises a homing endonuclease, or a functional fragment thereof. In some embodiments, the endonuclease domain comprises a meganuclease from the LAGLIDADG (SEQ ID NO: 4555), GIY-YIG, HNH, His-Cys Box, or PD-(D/E) XK families, or a functional fragment or variant thereof, e.g., which possess conserved amino acid motifs, e.g., as indicated in the family names. In some embodiments, the endonuclease domain comprises a meganuclease, or fragment thereof, chosen from, e.g., I-SmaMI (Uniprot F7WD42), I-Scel (Uniprot P03882), I-Anil (Uniprot P03880), I-DmoI (Uniprot P21505), I-CreI (Uniprot P05725), I-TevI (Uniprot P13299), I-OnuI (Uniprot Q4VWW5), or I-BmoI (Uniprot Q9ANR6). In some embodiments, the meganuclease is naturally monomeric, e.g., I-Scel, I-TevI, or dimeric, e.g., I-CreI, in its functional form. For example, the LAGLIDADG (SEQ ID NO: 4555) meganucleases with a single copy of the LAGLIDADG (SEQ ID NO: 4555) motif generally form homodimers, whereas members with two copies of the LAGLIDADG (SEQ ID NO: 4555) motif are generally found as monomers. In some embodiments, a meganuclease that normally forms as a dimer is expressed as a fusion, e.g., the two subunits are expressed as a single ORF and, optionally, connected by a linker, e.g., an I-CreI dimer fusion (Rodriguez-Fornes et al. Gene Therapy 2020; incorporated by reference herein in its entirety). In some embodiments, a meganuclease, or a functional fragment thereof, is altered to favor nickase activity for one strand of a double-stranded DNA molecule, e.g., I-Scel (K1221 and/or K223I) (Niu et al. J Mol Biol 2008), I-Anil (K227M) (McConnell Smith et al. PNAS 2009), I-DmoI (Q42A and/or K120M) (Molina et al. J Biol Chem 2015). In some embodiments, a meganuclease or functional fragment thereof possessing this preference for single-strand cleavage is used as an endonuclease domain, e.g., with nickase activity. In some embodiments, an endonuclease domain comprises a meganuclease, or a functional fragment thereof, which naturally targets or is engineered to target a safe harbor site, e.g., an I-CreI targeting SH6 site (Rodriguez-Fornes et al., supra). In some embodiments, an endonuclease domain comprises a meganuclease, or a functional fragment thereof, with a sequence tolerant catalytic domain, e.g., I-TevI recognizing the minimal motif CNNNG (Kleinstiver et al. PNAS 2012). In some embodiments, a target sequence tolerant catalytic domain is fused to a DNA binding domain, e.g., to direct activity, e.g., by fusing I-TevI to: (i) zinc fingers to create Tev-ZFEs (Kleinstiver et al. PNAS 2012), (ii) other meganucleases to create MegaTevs (Wolfs et al. Nucleic Acids Res 2014), and/or (iii) Cas9 to create TevCas9 (Wolfs et al. PNAS 2016).

[0137] In some embodiments, the endonuclease domain comprises a restriction enzyme, e.g., a Type IIS or Type IIP restriction enzyme. In some embodiments, the endonuclease domain comprises a Type IIS restriction enzyme, e.g., FokI, or a fragment or variant thereof. In some embodiments, the endonuclease domain comprises a Type IIP restriction enzyme, e.g., PvuII, or a fragment or variant thereof. In some embodiments, a dimeric restriction enzyme is expressed as a fusion such that it functions as a single chain, e.g., a FokI dimer fusion (Minczuk et al. Nucleic Acids Res 36 (12): 3926-3938 (2008)).

[0138] The use of additional endonuclease domains is described, for example, in Guha and Edgell Int J Mol Sci 18 (22): 2565 (2017), which is incorporated herein by reference in its entirety.

[0139] In some embodiments, a gene modifying polypeptide comprises a modification to an endonuclease domain, e.g., relative to a wild-type Cas protein. In some embodiments, the endonuclease domain comprises an addition, deletion, replacement, or modification to the amino acid sequence of the wild-type Cas protein. In some embodiments, the endonuclease domain is modified to include a heterologous functional domain that binds specifically to and/or induces endonuclease cleavage of a target nucleic acid (e.g., DNA) sequence of interest. In some embodiments, the endonuclease domain comprises a zinc finger. In embodiments, the endonuclease domain comprising the Cas domain is associated with a guide RNA (gRNA), e.g., as described herein. In some embodiments, the endonuclease domain is modified to include a functional domain that does not target a specific target nucleic acid (e.g., DNA) sequence. In embodiments, the endonuclease domain comprises a Fok1 domain.

[0140] In some embodiments, the endonuclease domain is associated with the target dsDNA in vitro at a frequency at least about 5-fold or 10-fold higher than with a scrambled dsDNA. In some embodiments, the endonuclease domain is associated with the target dsDNA in vitro at a frequency at least about 5-fold or 10-fold higher than with a scrambled dsDNA, e.g., in a cell (e.g., a HEK293T cell). In some embodiments, the frequency of association between the endonuclease domain and the target DNA or scrambled DNA is measured by ChIP-seq, e.g., as described in He and Pu (2010) Curr. Protoc Mol Biol Chapter 21 (incorporated by reference herein in its entirety).

[0141] In some embodiments, the endonuclease domain can catalyze the formation of a nick at a target sequence, e.g., to an increase of at least about 5-fold or 10-fold relative to a non-target sequence (e.g., relative to any other genomic sequence in the genome of the target cell). In some embodiments, the level of nick formation is determined using NickSeq, e.g., as described in Elacqua et al. (2019) bioRxiv doi.org/10.1101/867937 (incorporated herein by reference in its entirety).

[0142] In some embodiments, the endonuclease domain is capable of nicking DNA in vitro. In embodiments, the nick results in an exposed base. In embodiments, the exposed base can be detected using a nuclease sensitivity assay, e.g., as described in Chaudhry and Weinfeld (1995) Nucleic Acids Res 23 (19): 3805-3809 (incorporated by reference herein in its entirety). In embodiments, the level of exposed bases (e.g., detected by the nuclease sensitivity assay) is increased by at least 10%, 50%, or more relative to a reference endonuclease domain. In some embodiments, the reference endonuclease domain is an endonuclease domain from Cas9 of S. pyogenes.

[0143] In some embodiments, the endonuclease domain is capable of nicking DNA in a cell. In embodiments, the endonuclease domain is capable of nicking DNA in a HEK293T cell. In embodiments, an unrepaired nick that undergoes replication in the absence of Rad51 results in increased NHEJ rates at the site of the nick, which can be detected, e.g., by using a Rad51 inhibition assay, e.g., as described in Bothmer et al. (2017) Nat Commun 8:13905 (incorporated by reference herein in its entirety). In embodiments, NHEJ rates are increased above 0-5%. In embodiments, NHEJ rates are increased to 20-70% (e.g., between 30%-60% or 40-50%), e.g., upon Rad51 inhibition.

[0144] In some embodiments, the endonuclease domain releases the target after cleavage. In some embodiments, release of the target is indicated indirectly by assessing for multiple turnovers by the enzyme, e.g., as described in Yourik at al. RNA 25 (1): 35-44 (2019) (incorporated herein by reference in its entirety) and shown in FIG. 2. In some embodiments, the kₑₓₚ of an endonuclease domain is 1×10⁻³-1×10⁻5 min-1 as measured by such methods.

[0145] In some embodiments, the endonuclease domain has a catalytic efficiency (k_{cat}/Kₘ) greater than about 1×10⁸ s⁻¹M⁻¹ in vitro. In embodiments, the endonuclease domain has a catalytic efficiency greater than about 1×10⁵, 1×10⁶, 1×10⁷, or 1×10⁸, s⁻¹ M⁻¹ in vitro. In embodiments, catalytic efficiency is determined as described in Chen et al. (2018) Science 360 (6387): 436-439 (incorporated herein by reference in its entirety). In some embodiments, the endonuclease domain has a catalytic efficiency (k_{cat}/Kₘ) greater than about 1×10⁸ s⁻¹ M⁻¹ in cells. In embodiments, the endonuclease domain has a catalytic efficiency greater than about 1×10⁵, 1×10⁶, 1×10⁷, or 1×10⁸ s⁻¹ M⁻¹ in cells.

### Gene Modifying Polypeptides Comprising Cas Domains

[0146] In some embodiments, a gene modifying polypeptide described herein comprises a Cas domain. In some embodiments, the Cas domain can direct the gene modifying polypeptide to a target site specified by a gRNA spacer, thereby modifying a target nucleic acid sequence in “cis.” In some embodiments, a gene modifying polypeptide is fused to a Cas domain. In some embodiments, a gene modifying polypeptide comprises a CRISPR/Cas domain (also referred to herein as a CRISPR-associated protein). In some embodiments, a CRISPR/Cas domain comprises a protein involved in the clustered regulatory interspaced short palindromic repeat (CRISPR) system, e.g., a Cas protein, and optionally binds a guide RNA, e.g., single guide RNA (sgRNA).

[0147] CRISPR systems are adaptive defense systems originally discovered in bacteria and archaea. CRISPR systems use RNA-guided nucleases termed CRISPR-associated or “Cas” endonucleases (e. g., Cas9 or Cpf1) to cleave foreign DNA. For example, in a typical CRISPR-Cas system, an endonuclease is directed to a target nucleotide sequence (e. g., a site in the genome that is to be sequence-edited) by sequence-specific, non-coding “guide RNAs” that target single- or double-stranded DNA sequences. Three classes (I-III) of CRISPR systems have been identified. The class II CRISPR systems use a single Cas endonuclease (rather than multiple Cas proteins). One class II CRISPR system includes a type II Cas endonuclease such as Cas9, a CRISPR RNA (“crRNA”), and a trans-activating crRNA (“tracrRNA”). The crRNA contains a “spacer” sequence, a typically about 20-nucleotide RNA sequence that corresponds to a target DNA sequence (“protospacer”). In the wild-type system, and in some engineered systems, crRNA also contains a region that binds to the tracrRNA to form a partially double-stranded structure that is cleaved by RNase III, resulting in a crRNA/tracrRNA hybrid molecule. A crRNA/tracrRNA hybrid then directs the Cas endonuclease to recognize and cleave a target DNA sequence. A target DNA sequence is generally adjacent to a “protospacer adjacent motif” (“PAM”) that is specific for a given Cas endonuclease and required for cleavage activity at a target site matching the spacer of the crRNA. CRISPR endonucleases identified from various prokaryotic species have unique PAM sequence requirements, e.g., as listed for exemplary Cas enzymes in Table 3; examples of PAM sequences include 5′-NGG (Streptococcus pyogenes), 5′-NNAGAA (Streptococcus thermophilus CRISPR1), 5′-NGGNG (Streptococcus thermophilus CRISPR3), and 5′-NNNGATT (Neisseria meningitidis). Some endonucleases, e.g., Cas9 endonucleases, are associated with G-rich PAM sites, e. g., 5′-NGG, and perform blunt-end cleaving of the target DNA at a location 3 nucleotides upstream from (5′ from) the PAM site. Another class II CRISPR system includes the type V endonuclease Cpf1, which is smaller than Cas9; examples include AsCpf1 (from Acidaminococcus sp.) and LbCpf1 (from Lachnospiraceae sp.). Cpf1-associated CRISPR arrays are processed into mature crRNAs without the requirement of a tracrRNA; in other words, a Cpf1 system, in some embodiments, comprises only Cpf1 nuclease and a crRNA to cleave a target DNA sequence. Cpf1 endonucleases, are typically associated with T-rich PAM sites, e. g., 5′-TTN. Cpf1 can also recognize a 5′-CTA PAM motif. Cpf1 typically cleaves a target DNA by introducing an offset or staggered double-strand break with a 4- or 5-nucleotide 5′ overhang, for example, cleaving a target DNA with a 5-nucleotide offset or staggered cut located 18 nucleotides downstream from (3′ from) from a PAM site on the coding strand and 23 nucleotides downstream from the PAM site on the complimentary strand; the 5-nucleotide overhang that results from such offset cleavage allows more precise genome editing by DNA insertion by homologous recombination than by insertion at blunt-end cleaved DNA. See, e.g., Zetsche et al. (2015) Cell, 163:759-771.

[0148] A variety of CRISPR associated (Cas) genes or proteins can be used in the technologies provided by the present disclosure and the choice of Cas protein will depend upon the particular conditions of the method. Specific examples of Cas proteins include class II systems including Cas1, Cas2, Cas3, Cas4, Cas5, Cas6, Cas7, Cas8, Cas9, Cas10, Cpf1, C2C1, or C2C3. In some embodiments, a Cas protein, e.g., a Cas9 protein, may be from any of a variety of prokaryotic species. In some embodiments a particular Cas protein, e.g., a particular Cas9 protein, is selected to recognize a particular protospacer-adjacent motif (PAM) sequence. In some embodiments, a DNA-binding domain or endonuclease domain includes a sequence targeting polypeptide, such as a Cas protein, e.g., Cas9. In certain embodiments a Cas protein, e.g., a Cas9 protein, may be obtained from a bacteria or archaea or synthesized using known methods. In certain embodiments, a Cas protein may be from a gram-positive bacteria or a gram-negative bacteria. In certain embodiments, a Cas protein may be from a Streptococcus (e.g., a S. pyogenes, or a S. thermophilus), a Francisella (e.g., an F. novicida), a Staphylococcus (e.g., an S. aureus), an Acidaminococcus (e.g., an Acidaminococcus sp. BV3L6), a Neisseria (e.g., an N. meningitidis), a Cryptococcus, a Corynebacterium, a Haemophilus, a Eubacterium, a Pasteurella, a Prevotella, a Veillonella, or a Marinobacter.

[0149] In some embodiments, a gene modifying polypeptide may comprise a Cas domain as listed in Table 3 or 4, or a functional fragment thereof, or a sequence having at least 70%, 75%, 80%, 85%, 90%, 95%, 96%, 97%, 98%, 99% identity thereto.

TABLE 3
CRISPR/Cas Proteins, Species, and Mutations

| | | | # of | | Mutations to alter PAM | Mutations to make |
|---|---|---|---|---|---|---|
| Name | Enzyme | Species | AAs | PAM | recognition | catalytically dead |
| FnCas9 | Cas9 | Francisella | 1629 | 5′-NGG-3′ | Wt | D11A/H969A/N995A |
| | | novicida | | | | |
| FnCas9 | Cas9 | Francisella | 1629 | 5′-YG-3′ | E1369R/E1449H/R1556A | D11A/H969A/N995A |
| RHA | | novicida | | | | |
| SaCas9 | Cas9 | Staphylococcus | 1053 | 5′-NNGRRT-3′ | Wt | D10A/H557A |
| | | aureus | | | | |
| SaCas9 | Cas9 | Staphylococcus | 1053 | 5′-NNNRRT-3′ | E782K/N968K/R1015H | D10A/H557A |
| KKH | | aureus | | | | |
| SpCas9 | Cas9 | Streptococcus | 1368 | 5′-NGG-3′ | Wt | D10A/D839A/H840A/N863A |
| | | pyogenes | | | | |
| SpCas9 | Cas9 | Streptococcus | 1368 | 5′-NGA-3′ | D1135V/R1335Q/T1337R | D10A/D839A/H840A/N863A |
| VQR | | pyogenes | | | | |
| AsCpf1 | Cpf1 | Acidaminococcus | 1307 | 5′-TYCV-3′ | S542R/K607R | E993A |
| RR | | sp. BV3L6 | | | | |
| AsCpf1 | Cpf1 | Acidaminococcus | 1307 | 5′-TATV-3′ | S542R/K548V/N552R | E993A |
| RVR | | sp. BV3L6 | | | | |
| FnCpf1 | Cpf1 | Francisella | 1300 | 5′-NTTN-3′ | Wt | D917A/E1006A/D1255A |
| | | novicida | | | | |
| NmCas9 | Cas9 | Neisseria | 1082 | 5′-NNNGATT-3′ | Wt | D16A/D587A/H588A/N611A |
| | | meningitidis | | | | |

TABLE 4
Amino Acid Sequences of CRISPR/Cas Proteins, Species, and Mutations

| | Parental | Protein Sequence | Nickase | Nickase | Nickase | SEQ ID |
|---|---|---|---|---|---|---|
| Variant | Host(s) | | (HNH) | (HNH) | (RuvC) | NO: |
| Nme2Cas9 | Neisseria | MAAFKPNPINYILGLDIGIASVGWAMVEIDEEENPIRLIDLGVRVFERAEVPK | N611A | H588A | D16A | 4556 |
| | meningitidis | TGDSLAMARRLARSVRRLTRRRAHRLLRARRLLKREGVLQAADFDENGLIKS | | | | |
| | | LPNTPWQLRAAALDRKLTPLEWSAVLLHLIKHRGYLSQRKNEGETADKELG | | | | |
| | | ALLKGVANNAHALQTGDFRTPAELALNKFEKESGHIRNQRGDYSHTFSRKD | | | | |
| | | LQAELILLFEKQKEFGNPHVSGGLKEGIETLLMTQRPALSGDAVQKMLGHCT | | | | |
| | | FEPAEPKAAKNTYTAERFIWLTKLNNLRILEQGSERPLTDTERATLMDEPYRK | | | | |
| | | SKLTYAQARKLLGLEDTAFFKGLRYGKDNAEASTLMEMKAYHAISRALEKEG | | | | |
| | | LKDKKSPLNLSSELQDEIGTAFSLFKTDEDITGRLKDRVQPEILEALLKHISFDKF | | | | |
| | | VQISLKALRRIVPLMEQGKRYDEACAEIYGDHYGKKNTEEKIYLPPIPADEIRN | | | | |
| | | PVVLRALSQARKVINGVVRRYGSPARIHIETAREVGKSFKDRKEIEKRQEENR | | | | |
| | | KDREKAAAKFREYFPNFVGEPKSKDILKLRLYEQQHGKCLYSGKEINLVRLNE | | | | |
| | | KGYVEIDHALPFSRTWDDSFNNKVLVLGSENQNKGNQTPYEYFNGKDNSR | | | | |
| | | EWQEFKARVETSRFPRSKKQRILLQKFDEDGFKECNLNDTRYVNRFLCQFVA | | | | |
| | | DHILLTGKGKRRVFASNGQITNLLRGFWGLRKVRAENDRHHALDAVVVACS | | | | |
| | | TVAMQQKITRFVRYKEMNAFDGKTIDKETGKVLHQKTHFPQPWEFFAQEV | | | | |
| | | MIRVFGKPDGKPEFEEADTPEKLRTLLAEKLSSRPEAVHEYVTPLFVSRAPNR | | | | |
| | | KMSGAHKDTLRSAKRFVKHNEKISVKRVWLTEIKLADLENMVNYKNGREIEL | | | | |
| | | YEALKARLEAYGGNAKQAFDPKDNPFYKKGGQLVKAVRVEKTQESGVLLNK | | | | |
| | | KNAYTIADNGDMVRVDVFCKVDKKGKNQYFIVPIYAWQVAENILPDIDCKG | | | | |
| | | YRIDDSYTFCFSLHKYDLIAFQKDEKSKVEFAYYINCDSSNGRFYLAWHDKGS | | | | |
| | | KEQQFRISTQNLVLIQKYQVNELGKEIRPCRLKKRPPVR | | | | |
| PpnCas9 | Pasteurella | MQNNPLNYILGLDLGIASIGWAVVEIDEESSPIRLIDVGVRTFERAEVAKTGE | N605A | H582A | D13A | 4557 |
| | pneumotropica | SLALSRRLARSSRRLIKRRAERLKKAKRLLKAEKILHSIDEKLPINVWQLRVKGL | | | | |
| | | KEKLERQEWAAVLLHLSKHRGYLSQRKNEGKSDNKELGALLSGIASNHQML | | | | |
| | | QSSEYRTPAEIAVKKFQVEEGHIRNQRGSYTHTFSRLDLLAEMELLFQRQAEL | | | | |
| | | GNSYTSTTLLENLTALLMWQKPALAGDAILKMLGKCTFEPSEYKAAKNSYSA | | | | |
| | | ERFVWLTKLNNLRILENGTERALNDNERFALLEQPYEKSKLTYAQVRAMLAL | | | | |
| | | SDNAIFKGVRYLGEDKKTVESKTTLIEMKFYHQIRKTLGSAELKKEWNELKGN | | | | |
| | | SDLLDEIGTAFSLYKTDDDICRYLEGKLPERVLNALLENLNFDKFIQLSLKALHQ | | | | |
| | | ILPLMLQGQRYDEAVSAIYGDHYGKKSTETTRLLPTIPADEIRNPVVLRTLTQA | | | | |
| | | RKVINAVVRLYGSPARIHIETAREVGKSYQDRKKLEKQQEDNRKQRESAVKK | | | | |
| | | FKEMFPHFVGEPKGKDILKMRLYELQQAKCLYSGKSLELHRLLEKGYVEVDH | | | | |
| | | ALPFSRTWDDSFNNKVLVLANENQNKGNLTPYEWLDGKNNSERWQHFVV | | | | |
| | | RVQTSGFSYAKKQRILNHKLDEKGFIERNLNDTRYVARFLCNFIADNMLLVG | | | | |
| | | KGKRNVFASNGQITALLRHRWGLQKVREQNDRHHALDAVVVACSTVAMQ | | | | |
| | | QKITRFVRYNEGNVFSGERIDRETGEIIPLHFPSPWAFFKENVEIRIFSENPKLE | | | | |
| | | LENRLPDYPQYNHEWVQPLFVSRMPTRKMTGQGHMETVKSAKRLNEGLS | | | | |
| | | VLKVPLTQLKLSDLERMVNRDREIALYESLKARLEQFGNDPAKAFAEPFYKKG | | | | |
| | | GALVKAVRLEQTQKSGVLVRDGNGVADNASMVRVDVFTKGGKYFLVPIYT | | | | |
| | | WQVAKGILPNRAATQGKDENDWDIMDEMATFQFSLCQNDLIKLVTKKKTI | | | | |
| | | FGYFNGLNRATSNINIKEHDLDKSKGKLGIYLEVGVKLAISLEKYQVDELGKNI | | | | |
| | | RPCRPTKRQHVR | | | | |
| SauCas9 | Staphylococcus | MKRNYILGLDIGITSVGYGIIDYETRDVIDAGVRLFKEANVENNEGRRSKRGA | N580A | H557A | D10A | 4558 |
| | aureus | RRLKRRRRHRIQRVKKLLFDYNLLTDHSELSGINPYEARVKGLSQKLSEEEFSA | | | | |
| | | ALLHLAKRRGVHNVNEVEEDTGNELSTKEQISRNSKALEEKYVAELQLERLKK | | | | |
| | | DGEVRGSINRFKTSDYVKEAKQLLKVQKAYHQLDQSFIDTYIDLLETRRTYYE | | | | |
| | | GPGEGSPFGWKDIKEWYEMLMGHCTYFPEELRSVKYAYNADLYNALNDLN | | | | |
| | | NLVITRDENEKLEYYEKFQIIENVFKQKKKPTLKQIAKEILVNEEDIKGYRVTST | | | | |
| | | GKPEFTNLKVYHDIKDITARKEIIENAELLDQIAKILTIYQSSEDIQEELTNLNSE | | | | |
| | | LTQEEIEQISNLKGYTGTHNLSLKAINLILDELWHTNDNQIAIFNRLKLVPKKV | | | | |
| | | DLSQQKEIPTTLVDDFILSPVVKRSFIQSIKVINAIIKKYGLPNDIIIELAREKNSK | | | | |
| | | DAQKMINEMQKRNRQTNERIEEIIRTTGKENAKYLIEKIKLHDMQEGKCLYS | | | | |
| | | LEAIPLEDLLNNPFNYEVDHIIPRSVSFDNSFNNKVLVKQEENSKKGNRTPFQ | | | | |
| | | YLSSSDSKISYETFKKHILNLAKGKGRISKTKKEYLLEERDINRFSVQKDFINRNL | | | | |
| | | VDTRYATRGLMNLLRSYFRVNNLDVKVKSINGGFTSFLRRKWKFKKERNKG | | | | |
| | | YKHHAEDALIIANADFIFKEWKKLDKAKKVMENQMFEEKQAESMPEIETEQ | | | | |
| | | EYKEIFITPHQIKHIKDFKDYKYSHRVDKKPNRELINDTLYSTRKDDKGNTLIVN | | | | |
| | | NLNGLYDKDNDKLKKLINKSPEKLLMYHHDPQTYQKLKLIMEQYGDEKNPL | | | | |
| | | YKYYEETGNYLTKYSKKDNGPVIKKIKYYGNKLNAHLDITDDYPNSRNKVVKL | | | | |
| | | SLKPYRFDVYLDNGVYKFVTVKNLDVIKKENYYEVNSKCYEEAKKLKKISNQA | | | | |
| | | EFIASFYNNDLIKINGELYRVIGVNNDLLNRIEVNMIDITYREYLENMNDKRPP | | | | |
| | | RIIKTIASKTQSIKKYSTDILGNLYEVKSKKHPQIIKKG | | | | |
| SauCas9- | Staphylococcus | MKRNYILGLDIGITSVGYGIIDYETRDVIDAGVRLFKEANVENNEGRRSKRGA | N580A | H557A | D10A | 4559 |
| KKH | aureus | RRLKRRRRHRIQRVKKLLFDYNLLTDHSELSGINPYEARVKGLSQKLSEEEFSA | | | | |
| | | ALLHLAKRRGVHNVNEVEEDTGNELSTKEQISRNSKALEEKYVAELQLERLKK | | | | |
| | | DGEVRGSINRFKTSDYVKEAKQLLKVQKAYHQLDQSFIDTYIDLLETRRTYYE | | | | |
| | | GPGEGSPFGWKDIKEWYEMLMGHCTYFPEELRSVKYAYNADLYNALNDLN | | | | |
| | | NLVITRDENEKLEYYEKFQIIENVFKQKKKPTLKQIAKEILVNEEDIKGYRVTST | | | | |
| | | GKPEFTNLKVYHDIKDITARKEIIENAELLDQIAKILTIYQSSEDIQEELTNLNSE | | | | |
| | | LTQEEIEQISNLKGYTGTHNLSLKAINLILDELWHTNDNQIAIFNRLKLVPKKV | | | | |
| | | DLSQQKEIPTTLVDDFILSPVVKRSFIQSIKVINAIIKKYGLPNDIIIELAREKNSK | | | | |
| | | DAQKMINEMQKRNRQTNERIEEIIRTTGKENAKYLIEKIKLHDMQEGKCLYS | | | | |
| | | LEAIPLEDLLNNPFNYEVDHIIPRSVSFDNSFNNKVLVKQEENSKKGNRTPFQ | | | | |
| | | YLSSSDSKISYETFKKHILNLAKGKGRISKTKKEYLLEERDINRFSVQKDFINRNL | | | | |
| | | VDTRYATRGLMNLLRSYFRVNNLDVKVKSINGGFTSFLRRKWKFKKERNKG | | | | |
| | | YKHHAEDALIIANADFIFKEWKKLDKAKKVMENQMFEEKQAESMPEIETEQ | | | | |
| | | EYKEIFITPHQIKHIKDFKDYKYSHRVDKKPNRKLINDTLYSTRKDDKGNTLIV | | | | |
| | | NNLNGLYDKDNDKLKKLINKSPEKLLMYHHDPQTYQKLKLIMEQYGDEKNP | | | | |
| | | LYKYYEETGNYLTKYSKKDNGPVIKKIKYYGNKLNAHLDITDDYPNSRNKVVK | | | | |
| | | LSLKPYRFDVYLDNGVYKFVTVKNLDVIKKENYYEVNSKCYEEAKKLKKISNQ | | | | |
| | | AEFIASFYKNDLIKINGELYRVIGVNNDLLNRIEVNMIDITYREYLENMNDKRP | | | | |
| | | PHIIKTIASKTQSIKKYSTDILGNLYEVKSKKHPQIIKKG | | | | |
| SauriCas9 | Staphylococcus | MQENQQKQNYILGLDIGITSVGYGLIDSKTREVIDAGVRLFPEADSENNSNR | N588A | H565A | D15A | 4560 |
| | auricularis | RSKRGARRLKRRRIHRLNRVKDLLADYQMIDLNNVPKSTDPYTIRVKGLREPL | | | | |
| | | TKEEFAIALLHIAKRRGLHNISVSMGDEEQDNELSTKQQLQKNAQQLQDKY | | | | |
| | | VCELQLERLTNINKVRGEKNRFKTEDFVKEVKQLCETQRQYHNIDDQFIQQY | | | | |
| | | IDLVSTRREYFEGPGNGSPYGWDGDLLKWYEKLMGRCTYFPEELRSVKYAYS | | | | |
| | | ADLFNALNDLNNLVVTRDDNPKLEYYEKYHIIENVFKQKKNPTLKQIAKEIGV | | | | |
| | | QDYDIRGYRITKSGKPQFTSFKLYHDLKNIFEQAKYLEDVEMLDEIAKILTIYQ | | | | |
| | | DEISIKKALDQLPELLTESEKSQIAQLTGYTGTHRLSLKCIHIVIDELWESPENQ | | | | |
| | | MEIFTRLNLKPKKVEMSEIDSIPTTLVDEFILSPVVKRAFIQSIKVINAVINRFGL | | | | |
| | | PEDIIIELAREKNSKDRRKFINKLQKQNEATRKKIEQLLAKYGNTNAKYMIEKI | | | | |
| | | KLHDMQEGKCLYSLEAIPLEDLLSNPTHYEVDHIIPRSVSFDNSLNNKVLVKQ | | | | |
| | | SENSKKGNRTPYQYLSSNESKISYNQFKQHILNLSKAKDRISKKKRDMLLEER | | | | |
| | | DINKFEVQKEFINRNLVDTRYATRELSNLLKTYFSTHDYAVKVKTINGGFTNH | | | | |
| | | LRKVWDFKKHRNHGYKHHAEDALVIANADFLFKTHKALRRTDKILEQPGLE | | | | |
| | | VNDTTVKVDTEEKYQELFETPKQVKNIKQFRDFKYSHRVDKKPNRQLINDTL | | | | |
| | | YSTREIDGETYVVQTLKDLYAKDNEKVKKLFTERPQKILMYQHDPKTFEKLM | | | | |
| | | TILNQYAEAKNPLAAYYEDKGEYVTKYAKKGNGPAIHKIKYIDKKLGSYLDVS | | | | |
| | | NKYPETQNKLVKLSLKSFRFDIYKCEQGYKMVSIGYLDVLKKDNYYYIPKDKYE | | | | |
| | | AEKQKKKIKESDLFVGSFYYNDLIMYEDELFRVIGVNSDINNLVELNMVDITY | | | | |
| | | KDFCEVNNVTGEKRIKKTIGKRVVLIEKYTTDILGNLYKTPLPKKPQLIFKRGEL | | | | |
| SauriCas9- | Staphylococcus | MQENQQKQNYILGLDIGITSVGYGLIDSKTREVIDAGVRLFPEADSENNSNR | N588A | H565A | D15A | 4561 |
| KKH | auricularis | RSKRGARRLKRRRIHRLNRVKDLLADYQMIDLNNVPKSTDPYTIRVKGLREPL | | | | |
| | | TKEEFAIALLHIAKRRGLHNISVSMGDEEQDNELSTKQQLQKNAQQLQDKY | | | | |
| | | VCELQLERLTNINKVRGEKNRFKTEDFVKEVKQLCETQRQYHNIDDQFIQQY | | | | |
| | | IDLVSTRREYFEGPGNGSPYGWDGDLLKWYEKLMGRCTYFPEELRSVKYAYS | | | | |
| | | ADLFNALNDLNNLVVTRDDNPKLEYYEKYHIIENVFKQKKNPTLKQIAKEIGV | | | | |
| | | QDYDIRGYRITKSGKPQFTSFKLYHDLKNIFEQAKYLEDVEMLDEIAKILTIYQ | | | | |
| | | DEISIKKALDQLPELLTESEKSQIAQLTGYTGTHRLSLKCIHIVIDELWESPENQ | | | | |
| | | MEIFTRLNLKPKKVEMSEIDSIPTTLVDEFILSPVVKRAFIQSIKVINAVINRFGL | | | | |
| | | PEDIIIELAREKNSKDRRKFINKLQKQNEATRKKIEQLLAKYGNTNAKYMIEKI | | | | |
| | | KLHDMQEGKCLYSLEAIPLEDLLSNPTHYEVDHIIPRSVSFDNSLNNKVLVKQ | | | | |
| | | SENSKKGNRTPYQYLSSNESKISYNQFKQHILNLSKAKDRISKKKRDMLLEER | | | | |
| | | DINKFEVQKEFINRNLVDTRYATRELSNLLKTYFSTHDYAVKVKTINGGFTNH | | | | |
| | | LRKVWDFKKHRNHGYKHHAEDALVIANADFLFKTHKALRRTDKILEQPGLE | | | | |
| | | VNDTTVKVDTEEKYQELFETPKQVKNIKQFRDFKYSHRVDKKPNRKLINDTL | | | | |
| | | YSTREIDGETYVVQTLKDLYAKDNEKVKKLFTERPQKILMYQHDPKTFEKLM | | | | |
| | | TILNQYAEAKNPLAAYYEDKGEYVTKYAKKGNGPAIHKIKYIDKKLGSYLDVS | | | | |
| | | NKYPETQNKLVKLSLKSFRFDIYKCEQGYKMVSIGYLDVLKKDNYYYIPKDKYE | | | | |
| | | AEKQKKKIKESDLFVGSFYKNDLIMYEDELFRVIGVNSDINNLVELNMVDITY | | | | |
| | | KDFCEVNNVTGEKHIKKTIGKRVVLIEKYTTDILGNLYKTPLPKKPQLIFKRGEL | | | | |
| ScaCas9- | Streptococcus | MEKKYSIGLDIGTNSVGWAVITDDYKVPSKKFKVLGNTNRKSIKKNLMGALL | N872A | H849A | D10A | 4562 |
| Sc++ | canis | FDSGETAEATRLKRTARRRYTRRKNRIRYLQEIFANEMAKLDDSFFQRLEESF | | | | |
| | | LVEEDKKNERHPIFGNLADEVAYHRNYPTIYHLRKKLADSPEKADLRLIYLALA | | | | |
| | | HIIKFRGHFLIEGKLNAENSDVAKLFYQLIQTYNQLFEESPLDEIEVDAKGILSA | | | | |
| | | RLSKSKRLEKLIAVFPNEKKNGLFGNIIALALGLTPNFKSNFDLTEDAKLQLSKD | | | | |
| | | TYDDDLDELLGQIGDQYADLFSAAKNLSDAILLSDILRSNSEVTKAPLSASMV | | | | |
| | | KRYDEHHQDLALLKTLVRQQFPEKYAEIFKDDTKNGYAGYVGADKKLRKRS | | | | |
| | | GKLATEEEFYKFIKPILEKMDGAEELLAKLNRDDLLRKQRTFDNGSIPHQIHLK | | | | |
| | | ELHAILRRQEEFYPFLKENREKIEKILTFRIPYYVGPLARGNSRFAWLTRKSEEA | | | | |
| | | ITPWNFEEVVDKGASAQSFIERMTNFDEQLPNKKVLPKHSLLYEYFTVYNEL | | | | |
| | | TKVKYVTERMRKPEFLSGEQKKAIVDLLFKTNRKVTVKQLKEDYFKKIECFDS | | | | |
| | | VEIIGVEDRFNASLGTYHDLLKIIKDKDFLDNEENEDILEDIVLTLTLFEDREMIE | | | | |
| | | ERLKTYAHLFDDKVMKQLKRRHYTGWGRLSRKMINGIRDKQSGKTILDFLKS | | | | |
| | | DGFSNRNFMQLIHDDSLTFKEEIEKAQVSGQGDSLHEQIADLAGSPAIKKGIL | | | | |
| | | QTVKIVDELVKVMGHKPENIVIEMARENQTTTKGLQQSRERKKRIEEGIKELE | | | | |
| | | SQILKENPVENTQLQNEKLYLYYLQNGRDMYVDQELDINRLSDYDVDHIVP | | | | |
| | | QSFIKDDSIDNKVLTRSVENRGKSDNVPSEEVVKKMKNYWRQLLNAKLITQ | | | | |
| | | RKFDNLTKAERGGLSEADKAGFIKRQLVETRQITKHVARILDSRMNTKRDKN | | | | |
| | | DKPIREVKVITLKSKLVSDFRKDFQLYKVRDINNYHHAHDAYLNAVVGTALIK | | | | |
| | | KYPKLESEFVYGDYKVYDVRKMIAKSEQEIGKATAKRFFYSNIMNFFKTEVKL | | | | |
| | | ANGEIRKRPLIETNGETGEVVWNKEKDFATVRKVLAMPQVNIVKKTEVQTG | | | | |
| | | GFSKESILSKRESAKLIPRKKGWDTRKYGGFGSPTVAYSILVVAKVEKGKAKKL | | | | |
| | | KSVKVLVGITIMEKGSYEKDPIGFLEAKGYKDIKKELIFKLPKYSLFELENGRRR | | | | |
| | | MLASAKELQKANELVLPQHLVRLLYYTQNISATTGSNNLGYIEQHREEFKEIF | | | | |
| | | EKIIDFSEKYILKNKVNSNLKSSFDEQFAVSDSILLSNSFVSLLKYTSFGASGGFT | | | | |
| | | FLDLDVKQGRLRYQTVTEVLDATLIYQSITGLYETRTDLSQLGGD | | | | |
| SpyCas9 | Streptococcus | MDKKYSIGLDIGTNSVGWAVITDEYKVPSKKFKVLGNTDRHSIKKNLIGALLF | N863A | H840A | D10A | 4563 |
| | pyogenes | DSGETAEATRLKRTARRRYTRRKNRICYLQEIFSNEMAKVDDSFFHRLEESFL | | | | |
| | | VEEDKKHERHPIFGNIVDEVAYHEKYPTIYHLRKKLVDSTDKADLRLIYLALAH | | | | |
| | | MIKFRGHFLIEGDLNPDNSDVDKLFIQLVQTYNQLFEENPINASGVDAKAILS | | | | |
| | | ARLSKSRRLENLIAQLPGEKKNGLFGNLIALSLGLTPNFKSNFDLAEDAKLQLS | | | | |
| | | KDTYDDDLDNLLAQIGDQYADLFLAAKNLSDAILLSDILRVNTEITKAPLSAS | | | | |
| | | MIKRYDEHHQDLTLLKALVRQQLPEKYKEIFFDQSKNGYAGYIDGGASQEEF | | | | |
| | | YKFIKPILEKMDGTEELLVKLNREDLLRKQRTFDNGSIPHQIHLGELHAILRRQ | | | | |
| | | EDFYPFLKDNREKIEKILTFRIPYYVGPLARGNSRFAWMTRKSEETITPWNFE | | | | |
| | | EVVDKGASAQSFIERMTNFDKNLPNEKVLPKHSLLYEYFTVYNELTKVKYVTE | | | | |
| | | GMRKPAFLSGEQKKAIVDLLFKTNRKVTVKQLKEDYFKKIECFDSVEISGVED | | | | |
| | | RFNASLGTYHDLLKIIKDKDFLDNEENEDILEDIVLTLTLFEDREMIEERLKTYA | | | | |
| | | HLFDDKVMKQLKRRRYTGWGRLSRKLINGIRDKQSGKTILDFLKSDGFANR | | | | |
| | | NFMQLIHDDSLTFKEDIQKAQVSGQGDSLHEHIANLAGSPAIKKGILQTVKV | | | | |
| | | VDELVKVMGRHKPENIVIEMARENQTTQKGQKNSRERMKRIEEGIKELGSQ | | | | |
| | | ILKEHPVENTQLQNEKLYLYYLQNGRDMYVDQELDINRLSDYDVDHIVPQSF | | | | |
| | | LKDDSIDNKVLTRSDKNRGKSDNVPSEEVVKKMKNYWRQLLNAKLITQRKF | | | | |
| | | DNLTKAERGGLSELDKAGFIKRQLVETRQITKHVAQILDSRMNTKYDENDKLI | | | | |
| | | REVKVITLKSKLVSDFRKDFQFYKVREINNYHHAHDAYLNAVVGTALIKKYPK | | | | |
| | | LESEFVYGDYKVYDVRKMIAKSEQEIGKATAKYFFYSNIMNFFKTEITLANGEI | | | | |
| | | RKRPLIETNGETGEIVWDKGRDFATVRKVLSMPQVNIVKKTEVQTGGFSKES | | | | |
| | | ILPKRNSDKLIARKKDWDPKKYGGFDSPTVAYSVLVVAKVEKGKSKKLKSVKE | | | | |
| | | LLGITIMERSSFEKNPIDFLEAKGYKEVKKDLIIKLPKYSLFELENGRKRMLASA | | | | |
| | | GELQKGNELALPSKYVNFLYLASHYEKLKGSPEDNEQKQLFVEQHKHYLDEII | | | | |
| | | EQISEFSKRVILADANLDKVLSAYNKHRDKPIREQAENIIHLFTLTNLGAPAAF | | | | |
| | | KYFDTTIDRKRYTSTKEVLDATLIHQSITGLYETRIDLSQLGGD | | | | |
| SpyCas9- | Streptococcus | MDKKYSIGLDIGTNSVGWAVITDEYKVPSKKFKVLGNTDRHSIKKNLIGALLF | N863A | H840A | D10A | 4564 |
| NG | pyogenes | DSGETAEATRLKRTARRRYTRRKNRICYLQEIFSNEMAKVDDSFFHRLEESFL | | | | |
| | | VEEDKKHERHPIFGNIVDEVAYHEKYPTIYHLRKKLVDSTDKADLRLIYLALAH | | | | |
| | | MIKFRGHFLIEGDLNPDNSDVDKLFIQLVQTYNQLFEENPINASGVDAKAILS | | | | |
| | | ARLSKSRRLENLIAQLPGEKKNGLFGNLIALSLGLTPNFKSNFDLAEDAKLQLS | | | | |
| | | KDTYDDDLDNLLAQIGDQYADLFLAAKNLSDAILLSDILRVNTEITKAPLSAS | | | | |
| | | MIKRYDEHHQDLTLLKALVRQQLPEKYKEIFFDQSKNGYAGYIDGGASQEEF | | | | |
| | | YKFIKPILEKMDGTEELLVKLNREDLLRKQRTFDNGSIPHQIHLGELHAILRRQ | | | | |
| | | EDFYPFLKDNREKIEKILTFRIPYYVGPLARGNSRFAWMTRKSEETITPWNFE | | | | |
| | | EVVDKGASAQSFIERMTNFDKNLPNEKVLPKHSLLYEYFTVYNELTKVKYVTE | | | | |
| | | GMRKPAFLSGEQKKAIVDLLFKTNRKVTVKQLKEDYFKKIECFDSVEISGVED | | | | |
| | | RFNASLGTYHDLLKIIKDKDFLDNEENEDILEDIVLTLTLFEDREMIEERLKTYA | | | | |
| | | HLFDDKVMKQLKRRRYTGWGRLSRKLINGIRDKQSGKTILDFLKSDGFANR | | | | |
| | | NFMQLIHDDSLTFKEDIQKAQVSGQGDSLHEHIANLAGSPAIKKGILQTVKV | | | | |
| | | VDELVKVMGRHKPENIVIEMARENQTTQKGQKNSRERMKRIEEGIKELGSQ | | | | |
| | | ILKEHPVENTQLQNEKLYLYYLQNGRDMYVDQELDINRLSDYDVDHIVPQSF | | | | |
| | | LKDDSIDNKVLTRSDKNRGKSDNVPSEEVVKKMKNYWRQLLNAKLITQRKF | | | | |
| | | DNLTKAERGGLSELDKAGFIKRQLVETRQITKHVAQILDSRMNTKYDENDKLI | | | | |
| | | REVKVITLKSKLVSDFRKDFQFYKVREINNYHHAHDAYLNAVVGTALIKKYPK | | | | |
| | | LESEFVYGDYKVYDVRKMIAKSEQEIGKATAKYFFYSNIMNFFKTEITLANGEI | | | | |
| | | RKRPLIETNGETGEIVWDKGRDFATVRKVLSMPQVNIVKKTEVQTGGFSKES | | | | |
| | | IRPKRNSDKLIARKKDWDPKKYGGFVSPTVAYSVLVVAKVEKGKSKKLKSVKE | | | | |
| | | LLGITIMERSSFEKNPIDFLEAKGYKEVKKDLIIKLPKYSLFELENGRKRMLASA | | | | |
| | | RFLQKGNELALPSKYVNFLYLASHYEKLKGSPEDNEQKQLFVEQHKHYLDEII | | | | |
| | | EQISEFSKRVILADANLDKVLSAYNKHRDKPIREQAENIIHLFTLTNLGAPRAF | | | | |
| | | KYFDTTIDRKVYRSTKEVLDATLIHQSITGLYETRIDLSQLGGD | | | | |
| SpyCas9- | Streptococcus | MDKKYSIGLDIGTNSVGWAVITDEYKVPSKKFKVLGNTDRHSIKKNLIGALLF | N863A | H840A | D10A | 4565 |
| SpRY | pyogenes | DSGETAERTRLKRTARRRYTRRKNRICYLQEIFSNEMAKVDDSFFHRLEESFL | | | | |
| | | VEEDKKHERHPIFGNIVDEVAYHEKYPTIYHLRKKLVDSTDKADLRLIYLALAH | | | | |
| | | MIKFRGHFLIEGDLNPDNSDVDKLFIQLVQTYNQLFEENPINASGVDAKAILS | | | | |
| | | ARLSKSRRLENLIAQLPGEKKNGLFGNLIALSLGLTPNFKSNFDLAEDAKLQLS | | | | |
| | | KDTYDDDLDNLLAQIGDQYADLFLAAKNLSDAILLSDILRVNTEITKAPLSAS | | | | |
| | | MIKRYDEHHQDLTLLKALVRQQLPEKYKEIFFDQSKNGYAGYIDGGASQEEF | | | | |
| | | YKFIKPILEKMDGTEELLVKLNREDLLRKQRTFDNGSIPHQIHLGELHAILRRQ | | | | |
| | | EDFYPFLKDNREKIEKILTFRIPYYVGPLARGNSRFAWMTRKSEETITPWNFE | | | | |
| | | EVVDKGASAQSFIERMTNFDKNLPNEKVLPKHSLLYEYFTVYNELTKVKYVTE | | | | |
| | | GMRKPAFLSGEQKKAIVDLLFKTNRKVTVKQLKEDYFKKIECFDSVEISGVED | | | | |
| | | RFNASLGTYHDLLKIIKDKDFLDNEENEDILEDIVLTLTLFEDREMIEERLKTYA | | | | |
| | | HLFDDKVMKQLKRRRYTGWGRLSRKLINGIRDKQSGKTILDFLKSDGFANR | | | | |
| | | NFMQLIHDDSLTFKEDIQKAQVSGQGDSLHEHIANLAGSPAIKKGILQTVKV | | | | |
| | | VDELVKVMGRHKPENIVIEMARENQTTQKGQKNSRERMKRIEEGIKELGSQ | | | | |
| | | ILKEHPVENTQLQNEKLYLYYLQNGRDMYVDQELDINRLSDYDVDHIVPQSF | | | | |
| | | LKDDSIDNKVLTRSDKNRGKSDNVPSEEVVKKMKNYWRQLLNAKLITQRKF | | | | |
| | | DNLTKAERGGLSELDKAGFIKRQLVETRQITKHVAQILDSRMNTKYDENDKLI | | | | |
| | | REVKVITLKSKLVSDFRKDFQFYKVREINNYHHAHDAYLNAVVGTALIKKYPK | | | | |
| | | LESEFVYGDYKVYDVRKMIAKSEQEIGKATAKYFFYSNIMNFFKTEITLANGEI | | | | |
| | | RKRPLIETNGETGEIVWDKGRDFATVRKVLSMPQVNIVKKTEVQTGGFSKES | | | | |
| | | IRPKRNSDKLIARKKDWDPKKYGGFLWPTVAYSVLVVAKVEKGKSKKLKSVK | | | | |
| | | ELLGITIMERSSFEKNPIDFLEAKGYKEVKKDLIIKLPKYSLFELENGRKRMLAS | | | | |
| | | AKQLQKGNELALPSKYVNFLYLASHYEKLKGSPEDNEQKQLFVEQHKHYLDE | | | | |
| | | IIEQISEFSKRVILADANLDKVLSAYNKHRDKPIREQAENIIHLFTLTRLGAPRAF | | | | |
| | | KYFDTTIDPKQYRSTKEVLDATLIHQSITGLYETRIDLSQLGGD | | | | |
| St1Cas9 | Streptococcus | MSDLVLGLDIGIGSVGVGILNKVTGEIIHKNSRIFPAAQAENNLVRRTNRQG | N622A | H599A | D9A | 4566 |
| | thermophilus | RRLARRKKHRRVRLNRLFEESGLITDFTKISINLNPYQLRVKGLTDELSNEELFI | | | | |
| | | ALKNMVKHRGISYLDDASDDGNSSVGDYAQIVKENSKQLETKTPGQIQLER | | | | |
| | | YQTYGQLRGDFTVEKDGKKHRLINVFPTSAYRSEALRILQTQQEFNPQITDEF | | | | |
| | | INRYLEILTGKRKYYHGPGNEKSRTDYGRYRTSGETLDNIFGILIGKCTFYPDEF | | | | |
| | | RAAKASYTAQEFNLLNDLNNLTVPTETKKLSKEQKNQIINYVKNEKAMGPAK | | | | |
| | | LFKYIAKLLSCDVADIKGYRIDKSGKAEIHTFEAYRKMKTLETLDIEQMDRETL | | | | |
| | | DKLAYVLTLNTEREGIQEALEHEFADGSFSQKQVDELVQFRKANSSIFGKGW | | | | |
| | | HNFSVKLMMELIPELYETSEEQMTILTRLGKQKTTSSSNKTKYIDEKLLTEEIY | | | | |
| | | NPVVAKSVRQAIKIVNAAIKEYGDFDNIVIEMARETNEDDEKKAIQKIQKAN | | | | |
| | | KDEKDAAMLKAANQYNGKAELPHSVFHGHKQLATKIRLWHQQGERCLYT | | | | |
| | | GKTISIHDLINNSNQFEVDHILPLSITFDDSLANKVLVYATANQEKGQRTPYQ | | | | |
| | | ALDSMDDAWSFRELKAFVRESKTLSNKKKEYLLTEEDISKFDVRKKFIERNLV | | | | |
| | | DTRYASRVVLNALQEHFRAHKIDTKVSVVRGQFTSQLRRHWGIEKTRDTYH | | | | |
| | | HHAVDALIIAASSQLNLWKKQKNTLVSYSEDQLLDIETGELISDDEYKESVFK | | | | |
| | | APYQHFVDTLKSKEFEDSILFSYQVDSKFNRKISDATIYATRQAKVGKDKADE | | | | |
| | | TYVLGKIKDIYTQDGYDAFMKIYKKDKSKFLMYRHDPQTFEKVIEPILENYPN | | | | |
| | | KQINEKGKEVPCNPFLKYKEEHGYIRKYSKKGNGPEIKSLKYYDSKLGNHIDIT | | | | |
| | | PKDSNNKVVLQSVSPWRADVYFNKTTGKYEILGLKYADLQFEKGTGTYKISQ | | | | |
| | | EKYNDIKKKEGVDSDSEFKFTLYKNDLLLVKDTETKEQQLFRFLSRTMPKQKH | | | | |
| | | YVELKPYDKQKFEGGEALIKVLGNVANSGQCKKGLGKSNISIYKVRTDVLGN | | | | |
| | | QHIIKNEGDKPKLDF | | | | |
| BlatCas9 | Brevibacillus | MAYTMGIDVGIASCGWAIVDLERQRIIDIGVRTFEKAENPKNGEALAVPRRE | N607A | H584A | D8A | 4567 |
| | laterosporus | ARSSRRRLRRKKHRIERLKHMFVRNGLAVDIQHLEQTLRSQNEIDVWQLRV | | | | |
| | | DGLDRMLTQKEWLRVLIHLAQRRGFQSNRKTDGSSEDGQVLVNVTENDRL | | | | |
| | | MEEKDYRTVAEMMVKDEKFSDHKRNKNGNYHGVVSRSSLLVEIHTLFETQ | | | | |
| | | RQHHNSLASKDFELEYVNIWSAQRPVATKDQIEKMIGTCTFLPKEKRAPKAS | | | | |
| | | WHFQYFMLLQTINHIRITNVQGTRSLNKEEIEQVVNMALTKSKVSYHDTRKI | | | | |
| | | LDLSEEYQFVGLDYGKEDEKKKVESKETIIKLDDYHKLNKIFNEVELAKGETWE | | | | |
| | | ADDYDTVAYALTFFKDDEDIRDYLQNKYKDSKNRLVKNLANKEYTNELIGKV | | | | |
| | | STLSFRKVGHLSLKALRKIIPFLEQGMTYDKACQAAGFDFQGISKKKRSVVLP | | | | |
| | | VIDQISNPVVNRALTQTRKVINALIKKYGSPETIHIETARELSKTFDERKNITKD | | | | |
| | | YKENRDKNEHAKKHLSELGIINPTGLDIVKYKLWCEQQGRCMYSNQPISFER | | | | |
| | | LKESGYTEVDHIIPYSRSMNDSYNNRVLVMTRENREKGNQTPFEYMGNDT | | | | |
| | | QRWYEFEQRVTTNPQIKKEKRQNLLLKGFTNRRELEMLERNLNDTRYITKYL | | | | |
| | | SHFISTNLEFSPSDKKKKVVNTSGRITSHLRSRWGLEKNRGQNDLHHAMDAI | | | | |
| | | VIAVTSDSFIQQVTNYYKRKERRELNGDDKFPLPWKFFREEVIARLSPNPKEQ | | | | |
| | | IEALPNHFYSEDELADLQPIFVSRMPKRSITGEAHQAQFRRVVGKTKEGKNIT | | | | |
| | | AKKTALVDISYDKNGDFNMYGRETDPATYEAIKERYLEFGGNVKKAFSTDLH | | | | |
| | | KPKKDGTKGPLIKSVRIMENKTLVHPVNKGKGVVYNSSIVRTDVFQRKEKYY | | | | |
| | | LLPVYVTDVTKGKLPNKVIVAKKGYHDWIEVDDSFTFLFSLYPNDLIFIRQNPK | | | | |
| | | KKISLKKRIESHSISDSKEVQEIHAYYKGVDSSTAAIEFIIHDGSYYAKGVGVQN | | | | |
| | | LDCFEKYQVDILGNYFKVKGEKRLELETSDSNHKGKDVNSIKSTSR | | | | |
| cCas9-v16 | Staphylococcus | MKRNYILGLDIGITSVGYGIIDYETRDVIDAGVRLFKEANVENNEGRRSKRGA | N580A | H557A | D10A | 4568 |
| | aureus | RRLKRRRRHRIQRVKKLLFDYNLLTDHSELSGINPYEARVKGLSQKLSEEEFSA | | | | |
| | | ALLHLAKRRGVHNVNEVEEDTGNELSTKEQISRNSKALEEKYVAELQLERLKK | | | | |
| | | DGEVRGSINRFKTSDYVKEAKQLLKVQKAYHQLDQSFIDTYIDLLETRRTYYE | | | | |
| | | GPGEGSPFGWKDIKEWYEMLMGHCTYFPEELRSVKYAYNADLYNALNDLN | | | | |
| | | NLVITRDENEKLEYYEKFQIIENVFKQKKKPTLKQIAKEILVNEEDIKGYRVTST | | | | |
| | | GKPEFTNLKVYHDIKDITARKEIIENAELLDQIAKILTIYQSSEDIQEELTNLNSE | | | | |
| | | LTQEEIEQISNLKGYTGTHNLSLKAINLILDELWHTNDNQIAIFNRLKLVPKKV | | | | |
| | | DLSQQKEIPTTLVDDFILSPVVKRSFIQSIKVINAIIKKYGLPNDIIIELAREKNSK | | | | |
| | | DAQKMINEMQKRNRQTNERIEEIIRTTGKENAKYLIEKIKLHDMQEGKCLYS | | | | |
| | | LEAIPLEDLLNNPFNYEVDHIIPRSVSFDNSFNNKVLVKQEENSKKGNRTPFQ | | | | |
| | | YLSSSDSKISYETFKKHILNLAKGKGRISKTKKEYLLEERDINRFSVQKDFINRNL | | | | |
| | | VDTRYATRGLMNLLRSYFRVNNLDVKVKSINGGFTSFLRRKWKFKKERNKG | | | | |
| | | YKHHAEDALIIANADFIFKEWKKLDKAKKVMENQMFEEKQAESMPEIETEQ | | | | |
| | | EYKEIFITPHQIKHIKDFKDYKYSHRVDKKPNRKLINDTLYSTRKDDKGNTLIV | | | | |
| | | NNLNGLYDKDNDKLKKLINKSPEKLLMYHHDPQTYQKLKLIMEQYGDEKNP | | | | |
| | | LYKYYEETGNYLTKYSKKDNGPVIKKIKYYGNKLNAHLDITDDYPNSRNKVVK | | | | |
| | | LSLKPYRFDVYLDNGVYKFVTVKNLDVIKKENYYEVNSKCYEEAKKLKKISNQ | | | | |
| | | AEFIASFYKNDLIKINGELYRVIGVNSDKNNLIEVNMIDITYREYLENMNDKRP | | | | |
| | | PHIIKTIASKTQSIKKYSTDILGNLYEVKSKKHPQIIKKG | | | | |
| cCas9-v17 | Staphylococcus | MKRNYILGLDIGITSVGYGIIDYETRDVIDAGVRLFKEANVENNEGRRSKRGA | N580A | H557A | D10A | 4569 |
| | aureus | RRLKRRRRHRIQRVKKLLFDYNLLTDHSELSGINPYEARVKGLSQKLSEEEFSA | | | | |
| | | ALLHLAKRRGVHNVNEVEEDTGNELSTKEQISRNSKALEEKYVAELQLERLKK | | | | |
| | | DGEVRGSINRFKTSDYVKEAKQLLKVQKAYHQLDQSFIDTYIDLLETRRTYYE | | | | |
| | | GPGEGSPFGWKDIKEWYEMLMGHCTYFPEELRSVKYAYNADLYNALNDLN | | | | |
| | | NLVITRDENEKLEYYEKFQIIENVFKQKKKPTLKQIAKEILVNEEDIKGYRVTST | | | | |
| | | GKPEFTNLKVYHDIKDITARKEIIENAELLDQIAKILTIYQSSEDIQEELTNLNSE | | | | |
| | | LTQEEIEQISNLKGYTGTHNLSLKAINLILDELWHTNDNQIAIFNRLKLVPKKV | | | | |
| | | DLSQQKEIPTTLVDDFILSPVVKRSFIQSIKVINAIIKKYGLPNDIIIELAREKNSK | | | | |
| | | DAQKMINEMQKRNRQTNERIEEIIRTTGKENAKYLIEKIKLHDMQEGKCLYS | | | | |
| | | LEAIPLEDLLNNPFNYEVDHIIPRSVSFDNSFNNKVLVKQEENSKKGNRTPFQ | | | | |
| | | YLSSSDSKISYETFKKHILNLAKGKGRISKTKKEYLLEERDINRFSVQKDFINRNL | | | | |
| | | VDTRYATRGLMNLLRSYFRVNNLDVKVKSINGGFTSFLRRKWKFKKERNKG | | | | |
| | | YKHHAEDALIIANADFIFKEWKKLDKAKKVMENQMFEEKQAESMPEIETEQ | | | | |
| | | EYKEIFITPHQIKHIKDFKDYKYSHRVDKKPNRKLINDTLYSTRKDDKGNTLIV | | | | |
| | | NNLNGLYDKDNDKLKKLINKSPEKLLMYHHDPQTYQKLKLIMEQYGDEKNP | | | | |
| | | LYKYYEETGNYLTKYSKKDNGPVIKKIKYYGNKLNAHLDITDDYPNSRNKVVK | | | | |
| | | LSLKPYRFDVYLDNGVYKFVTVKNLDVIKKENYYEVNSKCYEEAKKLKKISNQ | | | | |
| | | AEFIASFYKNDLIKINGELYRVIGVNNSTRNIVELNMIDITYREYLENMNDKRP | | | | |
| | | PHIIKTIASKTQSIKKYSTDILGNLYEVKSKKHPQIIKKG | | | | |
| cCas9-v21 | Staphylococcus | MKRNYILGLDIGITSVGYGIIDYETRDVIDAGVRLFKEANVENNEGRRSKRGA | N580A | H557A | D10A | 4570 |
| | aureus | RRLKRRRRHRIQRVKKLLFDYNLLTDHSELSGINPYEARVKGLSQKLSEEEFSA | | | | |
| | | ALLHLAKRRGVHNVNEVEEDTGNELSTKEQISRNSKALEEKYVAELQLERLKK | | | | |
| | | DGEVRGSINRFKTSDYVKEAKQLLKVQKAYHQLDQSFIDTYIDLLETRRTYYE | | | | |
| | | GPGEGSPFGWKDIKEWYEMLMGHCTYFPEELRSVKYAYNADLYNALNDLN | | | | |
| | | NLVITRDENEKLEYYEKFQIIENVFKQKKKPTLKQIAKEILVNEEDIKGYRVTST | | | | |
| | | GKPEFTNLKVYHDIKDITARKEIIENAELLDQIAKILTIYQSSEDIQEELTNLNSE | | | | |
| | | LTQEEIEQISNLKGYTGTHNLSLKAINLILDELWHTNDNQIAIFNRLKLVPKKV | | | | |
| | | DLSQQKEIPTTLVDDFILSPVVKRSFIQSIKVINAIIKKYGLPNDIIIELAREKNSK | | | | |
| | | DAQKMINEMQKRNRQTNERIEEIIRTTGKENAKYLIEKIKLHDMQEGKCLYS | | | | |
| | | LEAIPLEDLLNNPFNYEVDHIIPRSVSFDNSFNNKVLVKQEENSKKGNRTPFQ | | | | |
| | | YLSSSDSKISYETFKKHILNLAKGKGRISKTKKEYLLEERDINRFSVQKDFINRNL | | | | |
| | | VDTRYATRGLMNLLRSYFRVNNLDVKVKSINGGFTSFLRRKWKFKKERNKG | | | | |
| | | YKHHAEDALIIANADFIFKEWKKLDKAKKVMENQMFEEKQAESMPEIETEQ | | | | |
| | | EYKEIFITPHQIKHIKDFKDYKYSHRVDKKPNRKLINDTLYSTRKDDKGNTLIV | | | | |
| | | NNLNGLYDKDNDKLKKLINKSPEKLLMYHHDPQTYQKLKLIMEQYGDEKNP | | | | |
| | | LYKYYEETGNYLTKYSKKDNGPVIKKIKYYGNKLNAHLDITDDYPNSRNKVVK | | | | |
| | | LSLKPYRFDVYLDNGVYKFVTVKNLDVIKKENYYEVNSKCYEEAKKLKKISNQ | | | | |
| | | AEFIASFYKNDLIKINGELYRVIGVNSDDRNIIELNMIDITYREYLENMNDKRP | | | | |
| | | PHIIKTIASKTQSIKKYSTDILGNLYEVKSKKHPQIIKKG | | | | |
| cCas9-v42 | Staphylococcus | MKRNYILGLDIGITSVGYGIIDYETRDVIDAGVRLFKEANVENNEGRRSKRGA | N580A | H557A | D10A | 4571 |
| | aureus | RRLKRRRRHRIQRVKKLLFDYNLLTDHSELSGINPYEARVKGLSQKLSEEEFSA | | | | |
| | | ALLHLAKRRGVHNVNEVEEDTGNELSTKEQISRNSKALEEKYVAELQLERLKK | | | | |
| | | DGEVRGSINRFKTSDYVKEAKQLLKVQKAYHQLDQSFIDTYIDLLETRRTYYE | | | | |
| | | GPGEGSPFGWKDIKEWYEMLMGHCTYFPEELRSVKYAYNADLYNALNDLN | | | | |
| | | NLVITRDENEKLEYYEKFQIIENVFKQKKKPTLKQIAKEILVNEEDIKGYRVTST | | | | |
| | | GKPEFTNLKVYHDIKDITARKEIIENAELLDQIAKILTIYQSSEDIQEELTNLNSE | | | | |
| | | LTQEEIEQISNLKGYTGTHNLSLKAINLILDELWHTNDNQIAIFNRLKLVPKKV | | | | |
| | | DLSQQKEIPTTLVDDFILSPVVKRSFIQSIKVINAIIKKYGLPNDIIIELAREKNSK | | | | |
| | | DAQKMINEMQKRNRQTNERIEEIIRTTGKENAKYLIEKIKLHDMQEGKCLYS | | | | |
| | | LEAIPLEDLLNNPFNYEVDHIIPRSVSFDNSFNNKVLVKQEENSKKGNRTPFQ | | | | |
| | | YLSSSDSKISYETFKKHILNLAKGKGRISKTKKEYLLEERDINRFSVQKDFINRNL | | | | |
| | | VDTRYATRGLMNLLRSYFRVNNLDVKVKSINGGFTSFLRRKWKFKKERNKG | | | | |
| | | YKHHAEDALIIANADFIFKEWKKLDKAKKVMENQMFEEKQAESMPEIETEQ | | | | |
| | | EYKEIFITPHQIKHIKDFKDYKYSHRVDKKPNRKLINDTLYSTRKDDKGNTLIV | | | | |
| | | NNLNGLYDKDNDKLKKLINKSPEKLLMYHHDPQTYQKLKLIMEQYGDEKNP | | | | |
| | | LYKYYEETGNYLTKYSKKDNGPVIKKIKYYGNKLNAHLDITDDYPNSRNKVVK | | | | |
| | | LSLKPYRFDVYLDNGVYKFVTVKNLDVIKKENYYEVNSKCYEEAKKLKKISNQ | | | | |
| | | AEFIASFYKNDLIKINGELYRVIGVNNNRLNKIELNMIDITYREYLENMNDKRP | | | | |
| | | PHIIKTIASKTQSIKKYSTDILGNLYEVKSKKHPQIIKKG | | | | |
| CdiCas9 | Corynebacterium | MKYHVGIDVGTFSVGLAAIEVDDAGMPIKTLSLVSHIHDSGLDPDEIKSAVT | N597A | H573A | D8A | 4572 |
| | diphtheriae | RLASSGIARRTRRLYRRKRRRLQQLDKFIQRQGWPVIELEDYSDPLYPWKVR | | | | |
| | | AELAASYIADEKERGEKLSVALRHIARHRGWRNPYAKVSSLYLPDGPSDAFK | | | | |
| | | AIREEIKRASGQPVPETATVGQMVTLCELGTLKLRGEGGVLSARLQQSDYAR | | | | |
| | | EIQEICRMQEIGQELYRKIIDVVFAAESPKGSASSRVGKDPLQPGKNRALKAS | | | | |
| | | DAFQRYRIAALIGNLRVRVDGEKRILSVEEKNLVFDHLVNLTPKKEPEWVTIA | | | | |
| | | EILGIDRGQLIGTATMTDDGERAGARPPTHDTNRSIVNSRIAPLVDWWKTA | | | | |
| | | SALEQHAMVKALSNAEVDDFDSPEGAKVQAFFADLDDDVHAKLDSLHLPV | | | | |
| | | GRAAYSEDTLVRLTRRMLSDGVDLYTARLQEFGIEPSWTPPTPRIGEPVGNP | | | | |
| | | AVDRVLKTVSRWLESATKTWGAPERVIIEHVREGFVTEKRAREMDGDMRR | | | | |
| | | RAARNAKLFQEMQEKLNVQGKPSRADLWRYQSVQRQNCQCAYCGSPITF | | | | |
| | | SNSEMDHIVPRAGQGSTNTRENLVAVCHRCNQSKGNTPFAIWAKNTSIEG | | | | |
| | | VSVKEAVERTRHWVTDTGMRSTDFKKFTKAVVERFQRATMDEEIDARSME | | | | |
| | | SVAWMANELRSRVAQHFASHGTTVRVYRGSLTAEARRASGISGKLKFFDGV | | | | |
| | | GKSRLDRRHHAIDAAVIAFTSDYVAETLAVRSNLKQSQAHRQEAPQWREFT | | | | |
| | | GKDAEHRAAWRVWCQKMEKLSALLTEDLRDDRVVVMSNVRLRLGNGSA | | | | |
| | | HKETIGKLSKVKLSSQLSVSDIDKASSEALWCALTREPGFDPKEGLPANPERHI | | | | |
| | | RVNGTHVYAGDNIGLFPVSAGSIALRGGYAELGSSFHHARVYKITSGKKPAF | | | | |
| | | AMLRVYTIDLLPYRNQDLFSVELKPQTMSMRQAEKKLRDALATGNAEYLG | | | | |
| | | WLVVDDELVVDTSKIATDQVKAVEAELGTIRRWRVDGFFSPSKLRLRPLQM | | | | |
| | | SKEGIKKESAPELSKIIDRPGWLPAVNKLFSDGNVTVVRRDSLGRVRLESTAH | | | | |
| | | LPVTWKVQ | | | | |
| CjeCas9 | Campylobacter | MARILAFDIGISSIGWAFSENDELKDCGVRIFTKVENPKTGESLALPRRLARSA | N582A | H559A | D8A | 4573 |
| | jejuni | RKRLARRKARLNHLKHLIANEFKLNYEDYQSFDESLAKAYKGSLISPYELRFRA | | | | |
| | | LNELLSKQDFARVILHIAKRRGYDDIKNSDDKEKGAILKAIKQNEEKLANYQS | | | | |
| | | VGEYLYKEYFQKFKENSKEFTNVRNKKESYERCIAQSFLKDELKLIFKKQREFG | | | | |
| | | FSFSKKFEEEVLSVAFYKRALKDFSHLVGNCSFFTDEKRAPKNSPLAFMFVAL | | | | |
| | | TRIINLLNNLKNTEGILYTKDDLNALLNEVLKNGTLTYKQTKKLLGLSDDYEFK | | | | |
| | | GEKGTYFIEFKKYKEFIKALGEHNLSQDDLNEIAKDITLIKDEIKLKKALAKYDLN | | | | |
| | | QNQIDSLSKLEFKDHLNISFKALKLVTPLMLEGKKYDEACNELNLKVAINEDK | | | | |
| | | KDFLPAFNETYYKDEVTNPVVLRAIKEYRKVLNALLKKYGKVHKINIELAREVG | | | | |
| | | KNHSQRAKIEKEQNENYKAKKDAELECEKLGLKINSKNILKLRLFKEQKEFCAY | | | | |
| | | SGEKIKISDLQDEKMLEIDHIYPYSRSFDDSYMNKVLVFTKQNQEKLNQTPFE | | | | |
| | | AFGNDSAKWQKIEVLAKNLPTKKQKRILDKNYKDKEQKNFKDRNLNDTRYI | | | | |
| | | ARLVLNYTKDYLDFLPLSDDENTKLNDTQKGSKVHVEAKSGMLTSALRHTW | | | | |
| | | GFSAKDRNNHLHHAIDAVIIAYANNSIVKAFSDFKKEQESNSAELYAKKISELD | | | | |
| | | YKNKRKFFEPFSGFRQKVLDKIDEIFVSKPERKKPSGALHEETFRKEEEFYQSY | | | | |
| | | GGKEGVLKALELGKIRKVNGKIVKNGDMFRVDIFKHKKTNKFYAVPIYTMDF | | | | |
| | | ALKVLPNKAVARSKKGEIKDWILMDENYEFCFSLYKDSLILIQTKDMQEPEFV | | | | |
| | | YYNAFTSSTVSLIVSKHDNKFETLSKNQKILFKNANEKEVIAKSIGIQNLKVFEK | | | | |
| | | YIVSALGEVTKAEFRQREDFKK | | | | |
| GeoCas9 | Geobacillus | MRYKIGLDIGITSVGWAVMNLDIPRIEDLGVRIFDRAENPQTGESLALPRRLA | N605A | H582A | D8A | 4574 |
| | stearothermophilus | RSARRRLRRRKHRLERIRRLVIREGILTKEELDKLFEEKHEIDVWQLRVEALDR | | | | |
| | | KLNNDELARVLLHLAKRRGFKSNRKSERSNKENSTMLKHIEENRAILSSYRTV | | | | |
| | | GEMIVKDPKFALHKRNKGENYTNTIARDDLEREIRLIFSKQREFGNMSCTEEF | | | | |
| | | ENEYITIWASQRPVASKDDIEKKVGFCTFEPKEKRAPKATYTFQSFIAWEHIN | | | | |
| | | KLRLISPSGARGLTDEERRLLYEQAFQKNKITYHDIRTLLHLPDDTYFKGIVYDR | | | | |
| | | GESRKQNENIRFLELDAYHQIRKAVDKVYGKGKSSSFLPIDFDTFGYALTLFKD | | | | |
| | | DADIHSYLRNEYEQNGKRMPNLANKVYDNELIEELLNLSFTKFGHLSLKALRS | | | | |
| | | ILPYMEQGEVYSSACERAGYTFTGPKKKQKTMLLPNIPPIANPVVMRALTQA | | | | |
| | | RKVVNAIIKKYGSPVSIHIELARDLSQTFDERRKTKKEQDENRKKNETAIRQL | | | | |
| | | MEYGLTLNPTGHDIVKFKLWSEQNGRCAYSLQPIEIERLLEPGYVEVDHVIPY | | | | |
| | | SRSLDDSYTNKVLVLTRENREKGNRIPAEYLGVGTERWQQFETFVLTNKQFS | | | | |
| | | KKKRDRLLRLHYDENEETEFKNRNLNDTRYISRFFANFIREHLKFAESDDKQK | | | | |
| | | VYTVNGRVTAHLRSRWEFNKNREESDLHHAVDAVIVACTTPSDIAKVTAFY | | | | |
| | | QRREQNKELAKKTEPHFPQPWPHFADELRARLSKHPKESIKALNLGNYDDQ | | | | |
| | | KLESLQPVFVSRMPKRSVTGAAHQETLRRYVGIDERSGKIQTVVKTKLSEIKL | | | | |
| | | DASGHFPMYGKESDPRTYEAIRQRLLEHNNDPKKAFQEPLYKPKKNGEPGP | | | | |
| | | VIRTVKIIDTKNQVIPLNDGKTVAYNSNIVRVDVFEKDGKYYCVPVYTMDIM | | | | |
| | | KGILPNKAIEPNKPYSEWKEMTEDYTFRFSLYPNDLIRIELPREKTVKTAAGEE | | | | |
| | | INVKDVFVYYKTIDSANGGLELISHDHRFSLRGVGSRTLKRFEKYQVDVLGNI | | | | |
| | | YKVRGEKRVGLASSAHSKPGKTIRPLQSTRD | | | | |
| iSpyMacCas9 | Streptococcus | MDKKYSIGLDIGTNSVGWAVITDEYKVPSKKFKVLGNTDRHSIKKNLIGALLF | N863A | H840A | D10A | 4575 |
| | spp. | DSGETAEATRLKRTARRRYTRRKNRICYLQEIFSNEMAKVDDSFFHRLEESFL | | | | |
| | | VEEDKKHERHPIFGNIVDEVAYHEKYPTIYHLRKKLVDSTDKADLRLIYLALAH | | | | |
| | | MIKFRGHFLIEGDLNPDNSDVDKLFIQLVQTYNQLFEENPINASGVDAKAILS | | | | |
| | | ARLSKSRKLENLIAQLPGEKKNGLFGNLIALSLGLTPNFKSNFDLAEDAKLQLS | | | | |
| | | KDTYDDDLDNLLAQIGDQYADLFLAAKNLSDAILLSDILRVNTEITKAPLSAS | | | | |
| | | MIKRYDEHHQDLTLLKALVRQQLPEKYKEIFFDQSKNGYAGYIDGGASQEEF | | | | |
| | | YKFIKPILEKMDGTEELLVKLKREDLLRKQRTFDNGSIPHQIHLGELHAILRRQ | | | | |
| | | EDFYPFLKDNREKIEKILTFRIPYYVGPLARGNSRFAWMTRKSEETITPWNFE | | | | |
| | | EVVDKGASAQSFIERMTNFDKNLPNEKVLPKHSLLYEYFTVYNELTKVKYVTE | | | | |
| | | GMRKPAFLSGEQKKAIVDLLFKTNRKVTVKQLKEDYFKKIECFDSVEISGVED | | | | |
| | | RFNASLGTYHDLLKIIKDKDFLDNEENEDILEDIVLTLTLFEDREMIEERLKTYA | | | | |
| | | HLFDDKVMKQLKRRRYTGWGRLSRKLINGIRDKQSGKTILDFLKSDGFANR | | | | |
| | | NFMQLIHDDSLTFKEDIQKAQVSGQGDSLHEHIANLAGSPAIKKGILQTVKV | | | | |
| | | VDELVKVMGRHKPENIVIEMARENQTTQKGQKNSRERMKRIEEGIKELGSQ | | | | |
| | | ILKEHPVENTQLQNEKLYLYYLQNGRDMYVDQELDINRLSDYDVDHIVPQSF | | | | |
| | | LKDDSIDNKVLTRSDKNRGKSDNVPSEEVVKKMKNYWRQLLNAKLITQRKF | | | | |
| | | DNLTKAERGGLSELDKAGFIKRQLVETRQITKHVAQILDSRMNTKYDENDKLI | | | | |
| | | REVKVITLKSKLVSDFRKDFQFYKVREINNYHHAHDAYLNAVVGTALIKKYPK | | | | |
| | | LESEFVYGDYKVYDVRKMIAKSEQEIGKATAKYFFYSNIMNFFKTEITLANGEI | | | | |
| | | RKRPLIETNGETGEIVWDKGRDFATVRKVLSMPQVNIVKKTEIQTVGQNGG | | | | |
| | | LFDDNPKSPLEVTPSKLVPLKKELNPKKYGGYQKPTTAYPVLLITDTKQLIPISV | | | | |
| | | MNKKQFEQNPVKFLRDRGYQQVGKNDFIKLPKYTLVDIGDGIKRLWASSKEI | | | | |
| | | HKGNQLVVSKKSQILLYHAHHLDSDLSNDYLQNHNQQFDVLFNEIISFSKKC | | | | |
| | | KLGKEHIQKIENVYSNKKNSASIEELAESFIKLLGFTQLGATSPFNFLGVKLNQ | | | | |
| | | KQYKGKKDYILPCTEGTLIRQSITGLYETRVDLSKIGEDSGGSGGSKRTADGSE | | | | |
| | | FES | | | | |
| NmeCas9 | Neisseria | MAAFKPNSINYILGLDIGIASVGWAMVEIDEEENPIRLIDLGVRVFERAEVPK | N611A | H588A | D16A | 4576 |
| | meningitidis | TGDSLAMARRLARSVRRLTRRRAHRLLRTRRLLKREGVLQAANFDENGLIKS | | | | |
| | | LPNTPWQLRAAALDRKLTPLEWSAVLLHLIKHRGYLSQRKNEGETADKELG | | | | |
| | | ALLKGVAGNAHALQTGDFRTPAELALNKFEKESGHIRNQRSDYSHTFSRKDL | | | | |
| | | QAELILLFEKQKEFGNPHVSGGLKEGIETLLMTQRPALSGDAVQKMLGHCTF | | | | |
| | | EPAEPKAAKNTYTAERFIWLTKLNNLRILEQGSERPLTDTERATLMDEPYRKS | | | | |
| | | KLTYAQARKLLGLEDTAFFKGLRYGKDNAEASTLMEMKAYHAISRALEKEGL | | | | |
| | | KDKKSPLNLSPELQDEIGTAFSLFKTDEDITGRLKDRIQPEILEALLKHISFDKFV | | | | |
| | | QISLKALRRIVPLMEQGKRYDEACAEIYGDHYGKKNTEEKIYLPPIPADEIRNP | | | | |
| | | VVLRALSQARKVINGVVRRYGSPARIHIETAREVGKSFKDRKEIEKRQEENRK | | | | |
| | | DREKAAAKFREYFPNFVGEPKSKDILKLRLYEQQHGKCLYSGKEINLGRLNEK | | | | |
| | | GYVEIDHALPFSRTWDDSFNNKVLVLGSENQNKGNQTPYEYFNGKDNSRE | | | | |
| | | WQEFKARVETSRFPRSKKQRILLQKFDEDGFKERNLNDTRYVNRFLCQFVA | | | | |
| | | DRMRLTGKGKKRVFASNGQITNLLRGFWGLRKVRAENDRHHALDAVVVA | | | | |
| | | CSTVAMQQKITRFVRYKEMNAFDGKTIDKETGEVLHQKTHFPQPWEFFAQ | | | | |
| | | EVMIRVFGKPDGKPEFEEADTLEKLRTLLAEKLSSRPEAVHEYVTPLFVSRAP | | | | |
| | | NRKMSGQGHMETVKSAKRLDEGVSVLRVPLTQLKLKDLEKMVNREREPKL | | | | |
| | | YEALKARLEAHKDDPAKAFAEPFYKYDKAGNRTQQVKAVRVEQVQKTGVW | | | | |
| | | VRNHNGIADNATMVRVDVFEKGDKYYLVPIYSWQVAKGILPDRAVVQGKD | | | | |
| | | EEDWQLIDDSFNFKFSLHPNDLVEVITKKARMFGYFASCHRGTGNINIRIHD | | | | |
| | | LDHKIGKNGILEGIGVKTALSFQKYQIDELGKEIRPCRLKKRPPVR | | | | |
| ScaCas9 | Streptococcus | MEKKYSIGLDIGTNSVGWAVITDDYKVPSKKFKVLGNTNRKSIKKNLMGALL | N872A | H849A | D10A | 4577 |
| | canis | FDSGETAEATRLKRTARRRYTRRKNRIRYLQEIFANEMAKLDDSFFQRLEESF | | | | |
| | | LVEEDKKNERHPIFGNLADEVAYHRNYPTIYHLRKKLADSPEKADLRLIYLALA | | | | |
| | | HIIKFRGHFLIEGKLNAENSDVAKLFYQLIQTYNQLFEESPLDEIEVDAKGILSA | | | | |
| | | RLSKSKRLEKLIAVFPNEKKNGLFGNIIALALGLTPNFKSNFDLTEDAKLQLSKD | | | | |
| | | TYDDDLDELLGQIGDQYADLFSAAKNLSDAILLSDILRSNSEVTKAPLSASMV | | | | |
| | | KRYDEHHQDLALLKTLVRQQFPEKYAEIFKDDTKNGYAGYVGIGIKHRKRTT | | | | |
| | | KLATQEEFYKFIKPILEKMDGAEELLAKLNRDDLLRKQRTFDNGSIPHQIHLKE | | | | |
| | | LHAILRRQEEFYPFLKENREKIEKILTFRIPYYVGPLARGNSRFAWLTRKSEEAI | | | | |
| | | TPWNFEEVVDKGASAQSFIERMTNFDEQLPNKKVLPKHSLLYEYFTVYNELT | | | | |
| | | KVKYVTERMRKPEFLSGEQKKAIVDLLFKTNRKVTVKQLKEDYFKKIECFDSV | | | | |
| | | EIIGVEDRFNASLGTYHDLLKIIKDKDFLDNEENEDILEDIVLTLTLFEDREMIEE | | | | |
| | | RLKTYAHLFDDKVMKQLKRRHYTGWGRLSRKMINGIRDKQSGKTILDFLKS | | | | |
| | | DGFSNRNFMQLIHDDSLTFKEEIEKAQVSGQGDSLHEQIADLAGSPAIKKGIL | | | | |
| | | QTVKIVDELVKVMGHKPENIVIEMARENQTTTKGLQQSRERKKRIEEGIKELE | | | | |
| | | SQILKENPVENTQLQNEKLYLYYLQNGRDMYVDQELDINRLSDYDVDHIVP | | | | |
| | | QSFIKDDSIDNKVLTRSVENRGKSDNVPSEEVVKKMKNYWRQLLNAKLITQ | | | | |
| | | RKFDNLTKAERGGLSEADKAGFIKRQLVETRQITKHVARILDSRMNTKRDKN | | | | |
| | | DKPIREVKVITLKSKLVSDFRKDFQLYKVRDINNYHHAHDAYLNAVVGTALIK | | | | |
| | | KYPKLESEFVYGDYKVYDVRKMIAKSEQEIGKATAKRFFYSNIMNFFKTEVKL | | | | |
| | | ANGEIRKRPLIETNGETGEVVWNKEKDFATVRKVLAMPQVNIVKKTEVQTG | | | | |
| | | GFSKESILSKRESAKLIPRKKGWDTRKYGGFGSPTVAYSILVVAKVEKGKAKKL | | | | |
| | | KSVKVLVGITIMEKGSYEKDPIGFLEAKGYKDIKKELIFKLPKYSLFELENGRRR | | | | |
| | | MLASATELQKANELVLPQHLVRLLYYTQNISATTGSNNLGYIEQHREEFKEIF | | | | |
| | | EKIIDFSEKYILKNKVNSNLKSSFDEQFAVSDSILLSNSFVSLLKYTSFGASGGFT | | | | |
| | | FLDLDVKQGRLRYQTVTEVLDATLIYQSITGLYETRTDLSQLGGD | | | | |
| ScaCas9- | Streptococcus | MEKKYSIGLDIGTNSVGWAVITDDYKVPSKKFKVLGNTNRKSIKKNLMGALL | N872A | H849A | D10A | 4578 |
| HiFi-Sc++ | canis | FDSGETAEATRLKRTARRRYTRRKNRIRYLQEIFANEMAKLDDSFFQRLEESF | | | | |
| | | LVEEDKKNERHPIFGNLADEVAYHRNYPTIYHLRKKLADSPEKADLRLIYLALA | | | | |
| | | HIIKFRGHFLIEGKLNAENSDVAKLFYQLIQTYNQLFEESPLDEIEVDAKGILSA | | | | |
| | | RLSKSKRLEKLIAVFPNEKKNGLFGNIIALALGLTPNFKSNFDLTEDAKLQLSKD | | | | |
| | | TYDDDLDELLGQIGDQYADLFSAAKNLSDAILLSDILRSNSEVTKAPLSASMV | | | | |
| | | KRYDEHHQDLALLKTLVRQQFPEKYAEIFKDDTKNGYAGYVGADKKLRKRS | | | | |
| | | GKLATEEEFYKFIKPILEKMDGAEELLAKLNRDDLLRKQRTFDNGSIPHQIHLK | | | | |
| | | ELHAILRRQEEFYPFLKENREKIEKILTFRIPYYVGPLARGNSRFAWLTRKSEEA | | | | |
| | | ITPWNFEEVVDKGASAQSFIERMTNFDEQLPNKKVLPKHSLLYEYFTVYNEL | | | | |
| | | TKVKYVTERMRKPEFLSGEQKKAIVDLLFKTNRKVTVKQLKEDYFKKIECFDS | | | | |
| | | VEIIGVEDRFNASLGTYHDLLKIIKDKDFLDNEENEDILEDIVLTLTLFEDREMIE | | | | |
| | | ERLKTYAHLFDDKVMKQLKRRHYTGWGRLSRKMINGIRDKQSGKTILDFLKS | | | | |
| | | DGFSNANFMQLIHDDSLTFKEEIEKAQVSGQGDSLHEQIADLAGSPAIKKGIL | | | | |
| | | QTVKIVDELVKVMGHKPENIVIEMARENQTTTKGLQQSRERKKRIEEGIKELE | | | | |
| | | SQILKENPVENTQLQNEKLYLYYLQNGRDMYVDQELDINRLSDYDVDHIVP | | | | |
| | | QSFIKDDSIDNKVLTRSVENRGKSDNVPSEEVVKKMKNYWRQLLNAKLITQ | | | | |
| | | RKFDNLTKAERGGLSEADKAGFIKRQLVETRQITKHVARILDSRMNTKRDKN | | | | |
| | | DKPIREVKVITLKSKLVSDFRKDFQLYKVRDINNYHHAHDAYLNAVVGTALIK | | | | |
| | | KYPKLESEFVYGDYKVYDVRKMIAKSEQEIGKATAKRFFYSNIMNFFKTEVKL | | | | |
| | | ANGEIRKRPLIETNGETGEVVWNKEKDFATVRKVLAMPQVNIVKKTEVQTG | | | | |
| | | GFSKESILSKRESAKLIPRKKGWDTRKYGGFGSPTVAYSILVVAKVEKGKAKKL | | | | |
| | | KSVKVLVGITIMEKGSYEKDPIGFLEAKGYKDIKKELIFKLPKYSLFELENGRRR | | | | |
| | | MLASAKELQKANELVLPQHLVRLLYYTQNISATTGSNNLGYIEQHREEFKEIF | | | | |
| | | EKIIDFSEKYILKNKVNSNLKSSFDEQFAVSDSILLSNSFVSLLKYTSFGASGGFT | | | | |
| | | FLDLDVKQGRLRYQTVTEVLDATLIYQSITGLYETRTDLSQLGGD | | | | |
| SpyCas9- | Streptococcus | MDKKYSIGLDIGTNSVGWAVITDEYKVPSKKFKVLGNTDRHSIKKNLIGALLF | N863A | H840A | D10A | 4579 |
| 3var-NRRH | pyogenes | DSGETAEATRLKRTARRRYTRRKNRICYLQEIFSNEMAKVDDSFFHRLEESFL | | | | |
| | | VEEDKKHERHPIFGNIVDEVAYHEKYPTIYHLRKKLVDSTDKADLRLIYLALAH | | | | |
| | | MIKFRGHFLIEGDLNPDNSDVDKLFIQLVQTYNQLFEENPINASGVDAKAILS | | | | |
| | | ARLSKSRRLENLIAQLPGEKKNGLFGNLIALSLGLTPNFKSNFDLAEDAKLQLS | | | | |
| | | KDTYDDDLDNLLAQIGDQYADLFLAAKNLSDAILLSDILRVNTEITKAPLSAS | | | | |
| | | MVKRYDEHHQDLTLLKALVRQQLPEKYKEIFFDQSKNGYAGYIDGGASQEE | | | | |
| | | FYKFIKPILEKMDGTEELLVKLNREDLLRKQRTFDNGIIPHQIHLGELHAILRRQ | | | | |
| | | GDFYPFLKDNREKIEKILTFRIPYYVGPLARGNSRFAWMTRKSEETITPWNFE | | | | |
| | | EVVDKGASAQSFIERMTNFDKNLPNEKVLPKHSLLYEYFTVYNELTKVKYVTE | | | | |
| | | GMRKPAFLSGEQKKAIVDLLFKTNRKVTVKQLKEDYFKKIECFDSVEISGVED | | | | |
| | | RFNASLGTYHDLLKIIKDKDFLDNEENEDILEDIVLTLTLFEDREMIEERLKTYA | | | | |
| | | HLFDDKVMKQLKRLRYTGWGRLSRKLINGIRDKQSGKTILDFLKSDGFANRN | | | | |
| | | FMQLIHDDSLTFKEDIQKAQVSGQGDSLHEHIANLAGSPAIKKGILQTVKVV | | | | |
| | | DELVKVMGGHKPENIVIEMARENQTTQKGQKNSRERMKRIEEGIKELGSQI | | | | |
| | | LKEHPVENTQLQNEKLYLYYLQNGRDMYVDQELDINRLSDYDVDHIVPQSF | | | | |
| | | LKDDSIDNKVLTRSDKNRGKSDNVPSEEVVKKMKNYWRQLLNAKLITQRKF | | | | |
| | | DNLTKAERGGLSELDKAGFIKRQLVETRQITKHVAQILDSRMNTKYDENDKLI | | | | |
| | | REVKVITLKSKLVSDFRKDFQFYKVREINNYHHAHDAYLNAVVGTALIKKYPK | | | | |
| | | LESEFVYGDYKVYDVRKMIAKSEQEIGKATAKYFFYSNIMNFFKTEITLANGEI | | | | |
| | | RKRPLIETNGETGEIVWDKGRDFATVRKVLSMPQVNIVKKTEVQTGGFSKES | | | | |
| | | ILPKGNSDKLIARKKDWDPKKYGGFNSPTAAYSVLVVAKVEKGKSKKLKSVK | | | | |
| | | ELLGITIMERSSFEKNPIGFLEAKGYKEVKKDLIIKLPKYSLFELENGRKRMLAS | | | | |
| | | AGVLHKGNELALPSKYVNFLYLASHYEKLKGSPEDNEQKQLFVEQHKHYLDE | | | | |
| | | IIEQISEFSKRVILADANLDKVLSAYNKHRDKPIREQAENIIHLFTLTNLGVPAA | | | | |
| | | FKYFDTTIDKKRYTSTKEVLDATLIHQSITGLYETRIDLSQLGGD | | | | |
| SpyCas9- | Streptococcus | MDKKYSIGLDIGTNSVGWAVITDEYKVPSKKFKVLGNTDRHSIKKNLIGALLF | N863A | H840A | D10A | 4580 |
| 3var-NRTH | pyogenes | DSGETAEATRLKRTARRRYTRRKNRICYLQEIFSNEMAKVDDSFFHRLEESFL | | | | |
| | | VEEDKKHERHPIFGNIVDEVAYHEKYPTIYHLRKKLVDSTDKADLRLIYLALAH | | | | |
| | | MIKFRGHFLIEGDLNPDNSDVDKLFIQLVQTYNQLFEENPINASGVDAKAILS | | | | |
| | | ARLSKSRRLENLIAQLPGEKKNGLFGNLIALSLGLTPNFKSNFDLAEDAKLQLS | | | | |
| | | KDTYDDDLDNLLAQIGDQYADLFLAAKNLSDAILLSDILRVNTEITKAPLSAS | | | | |
| | | MVKRYDEHHQDLTLLKALVRQQLPEKYKEIFFDQSKNGYAGYIDGGASQEE | | | | |
| | | FYKFIKPILEKMDGTEELLVKLNREDLLRKQRTFDNGIIPHQIHLGELHAILRRQ | | | | |
| | | GDFYPFLKDNREKIEKILTFRIPYYVGPLARGNSRFAWMTRKSEETITPWNFE | | | | |
| | | EVVDKGASAQSFIERMTNFDKNLPNEKVLPKHSLLYEYFTVYNELTKVKYVTE | | | | |
| | | GMRKPAFLSGEQKKAIVDLLFKTNRKVTVKQLKEDYFKKIECFDSVEISGVED | | | | |
| | | RFNASLGTYHDLLKIIKDKDFLDNEENEDILEDIVLTLTLFEDREMIEERLKTYA | | | | |
| | | HLFDDKVMKQLKRLRYTGWGRLSRKLINGIRDKQSGKTILDFLKSDGFANRN | | | | |
| | | FMQLIHDDSLTFKEDIQKAQVSGQGDSLHEHIANLAGSPAIKKGILQTVKVV | | | | |
| | | DELVKVMGGHKPENIVIEMARENQTTQKGQKNSRERMKRIEEGIKELGSQI | | | | |
| | | LKEHPVENTQLQNEKLYLYYLQNGRDMYVDQELDINRLSDYDVDHIVPQSF | | | | |
| | | LKDDSIDNKVLTRSDKNRGKSDNVPSEEVVKKMKNYWRQLLNAKLITQRKF | | | | |
| | | DNLTKAERGGLSELDKAGFIKRQLVETRQITKHVAQILDSRMNTKYDENDKLI | | | | |
| | | REVKVITLKSKLVSDFRKDFQFYKVREINNYHHAHDAYLNAVVGTALIKKYPK | | | | |
| | | LESEFVYGDYKVYDVRKMIAKSEQEIGKATAKYFFYSNIMNFFKTEITLANGEI | | | | |
| | | RKRPLIETNGETGEIVWDKGRDFATVRKVLSMPQVNIVKKTEVQTGGFSKES | | | | |
| | | ILPKGNSDKLIARKKDWDPKKYGGFNSPTVAYSVLVVAKVEKGKSKKLKSVK | | | | |
| | | ELLGITIMERSSFEKNPIGFLEAKGYKEVKKDLIIKLPKYSLFELENGRKRMLAS | | | | |
| | | ASVLHKGNELALPSKYVNFLYLASHYEKLKGSSEDNKQKQLFVEQHKHYLDEI | | | | |
| | | IEQISEFSKRVILADANLDKVLSAYNKHRDKPIREQAENIIHLFTLTNLGASAAF | | | | |
| | | KYFDTTIGRKLYTSTKEVLDATLIHQSITGLYETRIDLSQLGGD | | | | |
| SpyCas9- | Streptococcus | MDKKYSIGLDIGTNSVGWAVITDEYKVPSKKFKVLGNTDRHSIKKNLIGALLF | N863A | H840A | D10A | 4581 |
| 3var-NRCH | pyogenes | DSGETAEATRLKRTARRRYTRRKNRICYLQEIFSNEMAKVDDSFFHRLEESFL | | | | |
| | | VEEDKKHERHPIFGNIVDEVAYHEKYPTIYHLRKKLVDSTDKADLRLIYLALAH | | | | |
| | | MIKFRGHFLIEGDLNPDNSDVDKLFIQLVQTYNQLFEENPINASGVDAKAILS | | | | |
| | | ARLSKSRRLENLIAQLPGEKKNGLFGNLIALSLGLTPNFKSNFDLAEDAKLQLS | | | | |
| | | KDTYDDDLDNLLAQIGDQYADLFLAAKNLSDAILLSDILRVNTEITKAPLSAS | | | | |
| | | MVKRYDEHHQDLTLLKALVRQQLPEKYKEIFFDQSKNGYAGYIDGGASQEE | | | | |
| | | FYKFIKPILEKMDGTEELLVKLNREDLLRKQRTFDNGIIPHQIHLGELHAILRRQ | | | | |
| | | GDFYPFLKDNREKIEKILTFRIPYYVGPLARGNSRFAWMTRKSEETITPWNFE | | | | |
| | | EVVDKGASAQSFIERMTNFDKNLPNEKVLPKHSLLYEYFTVYNELTKVKYVTE | | | | |
| | | GMRKPAFLSGEQKKAIVDLLFKTNRKVTVKQLKEDYFKKIECFDSVEISGVED | | | | |
| | | RFNASLGTYHDLLKIIKDKDFLDNEENEDILEDIVLTLTLFEDREMIEERLKTYA | | | | |
| | | HLFDDKVMKQLKRLRYTGWGRLSRKLINGIRDKQSGKTILDFLKSDGFANRN | | | | |
| | | FMQLIHDDSLTFKEDIQKAQVSGQGDSLHEHIANLAGSPAIKKGILQTVKVV | | | | |
| | | DELVKVMGGHKPENIVIEMARENQTTQKGQKNSRERMKRIEEGIKELGSQI | | | | |
| | | LKEHPVENTQLQNEKLYLYYLQNGRDMYVDQELDINRLSDYDVDHIVPQSF | | | | |
| | | LKDDSIDNKVLTRSDKNRGKSDNVPSEEVVKKMKNYWRQLLNAKLITQRKF | | | | |
| | | DNLTKAERGGLSELDKAGFIKRQLVETRQITKHVAQILDSRMNTKYDENDKLI | | | | |
| | | REVKVITLKSKLVSDFRKDFQFYKVREINNYHHAHDAYLNAVVGTALIKKYPK | | | | |
| | | LESEFVYGDYKVYDVRKMIAKSEQEIGKATAKYFFYSNIMNFFKTEITLANGEI | | | | |
| | | RKRPLIETNGETGEIVWDKGRDFATVRKVLSMPQVNIVKKTEVQTGGFSKES | | | | |
| | | ILPKGNSDKLIARKKDWDPKKYGGFNSPTVAYSVLVVAKVEKGKSKKLKSVK | | | | |
| | | ELLGITIMERSSFEKNPIDFLEAKGYKEVKKDLIIKLPKYSLFELENGRKRMLAS | | | | |
| | | AGVLQKGNELALPSKYVNFLYLASHYEKLKGSPEDNEQKQLFVEQHKHYLDE | | | | |
| | | IIEQISEFSKRVILADANLDKVLSAYNKHRDKPIREQAENIIHLFTLTNLGAPAA | | | | |
| | | FKYFDTTINRKQYNTTKEVLDATLIRQSITGLYETRIDLSQLGGD | | | | |
| SpyCas9- | Streptococcus | MDKKYSIGLDIGTNSVGWAVITDEYKVPSKKFKVLGNTDRHSIKKNLIGALLF | N863A | H840A | D10A | 4563 |
| HF1 | pyogenes | DSGETAEATRLKRTARRRYTRRKNRICYLQEIFSNEMAKVDDSFFHRLEESFL | | | | |
| | | VEEDKKHERHPIFGNIVDEVAYHEKYPTIYHLRKKLVDSTDKADLRLIYLALAH | | | | |
| | | MIKFRGHFLIEGDLNPDNSDVDKLFIQLVQTYNQLFEENPINASGVDAKAILS | | | | |
| | | ARLSKSRRLENLIAQLPGEKKNGLFGNLIALSLGLTPNFKSNFDLAEDAKLQLS | | | | |
| | | KDTYDDDLDNLLAQIGDQYADLFLAAKNLSDAILLSDILRVNTEITKAPLSAS | | | | |
| | | MIKRYDEHHQDLTLLKALVRQQLPEKYKEIFFDQSKNGYAGYIDGGASQEEF | | | | |
| | | YKFIKPILEKMDGTEELLVKLNREDLLRKQRTFDNGSIPHQIHLGELHAILRRQ | | | | |
| | | EDFYPFLKDNREKIEKILTFRIPYYVGPLARGNSRFAWMTRKSEETITPWNFE | | | | |
| | | EVVDKGASAQSFIERMTNFDKNLPNEKVLPKHSLLYEYFTVYNELTKVKYVTE | | | | |
| | | GMRKPAFLSGEQKKAIVDLLFKTNRKVTVKQLKEDYFKKIECFDSVEISGVED | | | | |
| | | RFNASLGTYHDLLKIIKDKDFLDNEENEDILEDIVLTLTLFEDREMIEERLKTYA | | | | |
| | | HLFDDKVMKQLKRRRYTGWGRLSRKLINGIRDKQSGKTILDFLKSDGFANR | | | | |
| | | NFMQLIHDDSLTFKEDIQKAQVSGQGDSLHEHIANLAGSPAIKKGILQTVKV | | | | |
| | | VDELVKVMGRHKPENIVIEMARENQTTQKGQKNSRERMKRIEEGIKELGSQ | | | | |
| | | ILKEHPVENTQLQNEKLYLYYLQNGRDMYVDQELDINRLSDYDVDHIVPQSF | | | | |
| | | LKDDSIDNKVLTRSDKNRGKSDNVPSEEVVKKMKNYWRQLLNAKLITQRKF | | | | |
| | | DNLTKAERGGLSELDKAGFIKRQLVETRQITKHVAQILDSRMNTKYDENDKLI | | | | |
| | | REVKVITLKSKLVSDFRKDFQFYKVREINNYHHAHDAYLNAVVGTALIKKYPK | | | | |
| | | LESEFVYGDYKVYDVRKMIAKSEQEIGKATAKYFFYSNIMNFFKTEITLANGEI | | | | |
| | | RKRPLIETNGETGEIVWDKGRDFATVRKVLSMPQVNIVKKTEVQTGGFSKES | | | | |
| | | ILPKRNSDKLIARKKDWDPKKYGGFDSPTVAYSVLVVAKVEKGKSKKLKSVKE | | | | |
| | | LLGITIMERSSFEKNPIDFLEAKGYKEVKKDLIIKLPKYSLFELENGRKRMLASA | | | | |
| | | GELQKGNELALPSKYVNFLYLASHYEKLKGSPEDNEQKQLFVEQHKHYLDEII | | | | |
| | | EQISEFSKRVILADANLDKVLSAYNKHRDKPIREQAENIIHLFTLTNLGAPAAF | | | | |
| | | KYFDTTIDRKRYTSTKEVLDATLIHQSITGLYETRIDLSQLGGD | | | | |
| SpyCas9- | Streptococcus | MDKKYSIGLDIGTNSVGWAVITDEYKVPSKKFKVLGNTDRHSIKKNLIGALLF | N863A | H840A | D10A | 4582 |
| QQR1 | pyogenes | DSGETAEATRLKRTARRRYTRRKNRICYLQEIFSNEMAKVDDSFFHRLEESFL | | | | |
| | | VEEDKKHERHPIFGNIVDEVAYHEKYPTIYHLRKKLVDSTDKADLRLIYLALAH | | | | |
| | | MIKFRGHFLIEGDLNPDNSDVDKLFIQLVQTYNQLFEENPINASGVDAKAILS | | | | |
| | | ARLSKSRRLENLIAQLPGEKKNGLFGNLIALSLGLTPNFKSNFDLAEDAKLQLS | | | | |
| | | KDTYDDDLDNLLAQIGDQYADLFLAAKNLSDAILLSDILRVNTEITKAPLSAS | | | | |
| | | MIKRYDEHHQDLTLLKALVRQQLPEKYKEIFFDQSKNGYAGYIDGGASQEEF | | | | |
| | | YKFIKPILEKMDGTEELLVKLNREDLLRKQRTFDNGSIPHQIHLGELHAILRRQ | | | | |
| | | EDFYPFLKDNREKIEKILTFRIPYYVGPLARGNSRFAWMTRKSEETITPWNFE | | | | |
| | | EVVDKGASAQSFIERMTNFDKNLPNEKVLPKHSLLYEYFTVYNELTKVKYVTE | | | | |
| | | GMRKPAFLSGEQKKAIVDLLFKTNRKVTVKQLKEDYFKKIECFDSVEISGVED | | | | |
| | | RFNASLGTYHDLLKIIKDKDFLDNEENEDILEDIVLTLTLFEDREMIEERLKTYA | | | | |
| | | HLFDDKVMKQLKRRRYTGWGRLSRKLINGIRDKQSGKTILDFLKSDGFANR | | | | |
| | | NFMQLIHDDSLTFKEDIQKAQVSGQGDSLHEHIANLAGSPAIKKGILQTVKV | | | | |
| | | VDELVKVMGRHKPENIVIEMARENQTTQKGQKNSRERMKRIEEGIKELGSQ | | | | |
| | | ILKEHPVENTQLQNEKLYLYYLQNGRDMYVDQELDINRLSDYDVDHIVPQSF | | | | |
| | | LKDDSIDNKVLTRSDKNRGKSDNVPSEEVVKKMKNYWRQLLNAKLITQRKF | | | | |
| | | DNLTKAERGGLSELDKAGFIKRQLVETRQITKHVAQILDSRMNTKYDENDKLI | | | | |
| | | REVKVITLKSKLVSDFRKDFQFYKVREINNYHHAHDAYLNAVVGTALIKKYPK | | | | |
| | | LESEFVYGDYKVYDVRKMIAKSEQEIGKATAKYFFYSNIMNFFKTEITLANGEI | | | | |
| | | RKRPLIETNGETGEIVWDKGRDFATVRKVLSMPQVNIVKKTEVQTGGFSKES | | | | |
| | | ILPKRNSDKLIARKKDWDPKKYGGFDSPTVAYSVLVVAKVEKGKSKKLKSVKE | | | | |
| | | LLGITIMERSSFEKNPIDFLEAKGYKEVKKDLIIKLPKYSLFELENGRKRMLASA | | | | |
| | | RELQKGNELALPSKYVNFLYLASHYEKLKGSPEDNEQKQLFVEQHKHYLDEII | | | | |
| | | EQISEFSKRVILADAQLDKVLSAYNKHRDKPIREQAENIIHLFTLTNLGAPAAF | | | | |
| | | KYFDTTFKQKQYRSTKEVLDATLIHQSITGLYETRIDLSQLGGD | | | | |
| SpyCas9- | Streptococcus | MDKKYSIGLDIGTNSVGWAVITDEYKVPSKKFKVLGNTDRHSIKKNLIGALLF | N863A | H840A | D10A | 4583 |
| SpG | pyogenes | DSGETAEATRLKRTARRRYTRRKNRICYLQEIFSNEMAKVDDSFFHRLEESFL | | | | |
| | | VEEDKKHERHPIFGNIVDEVAYHEKYPTIYHLRKKLVDSTDKADLRLIYLALAH | | | | |
| | | MIKFRGHFLIEGDLNPDNSDVDKLFIQLVQTYNQLFEENPINASGVDAKAILS | | | | |
| | | ARLSKSRRLENLIAQLPGEKKNGLFGNLIALSLGLTPNFKSNFDLAEDAKLQLS | | | | |
| | | KDTYDDDLDNLLAQIGDQYADLFLAAKNLSDAILLSDILRVNTEITKAPLSAS | | | | |
| | | MIKRYDEHHQDLTLLKALVRQQLPEKYKEIFFDQSKNGYAGYIDGGASQEEF | | | | |
| | | YKFIKPILEKMDGTEELLVKLNREDLLRKQRTFDNGSIPHQIHLGELHAILRRQ | | | | |
| | | EDFYPFLKDNREKIEKILTFRIPYYVGPLARGNSRFAWMTRKSEETITPWNFE | | | | |
| | | EVVDKGASAQSFIERMTNFDKNLPNEKVLPKHSLLYEYFTVYNELTKVKYVTE | | | | |
| | | GMRKPAFLSGEQKKAIVDLLFKTNRKVTVKQLKEDYFKKIECFDSVEISGVED | | | | |
| | | RFNASLGTYHDLLKIIKDKDFLDNEENEDILEDIVLTLTLFEDREMIEERLKTYA | | | | |
| | | HLFDDKVMKQLKRRRYTGWGRLSRKLINGIRDKQSGKTILDFLKSDGFANR | | | | |
| | | NFMQLIHDDSLTFKEDIQKAQVSGQGDSLHEHIANLAGSPAIKKGILQTVKV | | | | |
| | | VDELVKVMGRHKPENIVIEMARENQTTQKGQKNSRERMKRIEEGIKELGSQ | | | | |
| | | ILKEHPVENTQLQNEKLYLYYLQNGRDMYVDQELDINRLSDYDVDHIVPQSF | | | | |
| | | LKDDSIDNKVLTRSDKNRGKSDNVPSEEVVKKMKNYWRQLLNAKLITQRKF | | | | |
| | | DNLTKAERGGLSELDKAGFIKRQLVETRQITKHVAQILDSRMNTKYDENDKLI | | | | |
| | | REVKVITLKSKLVSDFRKDFQFYKVREINNYHHAHDAYLNAVVGTALIKKYPK | | | | |
| | | LESEFVYGDYKVYDVRKMIAKSEQEIGKATAKYFFYSNIMNFFKTEITLANGEI | | | | |
| | | RKRPLIETNGETGEIVWDKGRDFATVRKVLSMPQVNIVKKTEVQTGGFSKES | | | | |
| | | ILPKRNSDKLIARKKDWDPKKYGGFLWPTVAYSVLVVAKVEKGKSKKLKSVK | | | | |
| | | ELLGITIMERSSFEKNPIDFLEAKGYKEVKKDLIIKLPKYSLFELENGRKRMLAS | | | | |
| | | AKQLQKGNELALPSKYVNFLYLASHYEKLKGSPEDNEQKQLFVEQHKHYLDE | | | | |
| | | IIEQISEFSKRVILADANLDKVLSAYNKHRDKPIREQAENIIHLFTLTNLGAPAA | | | | |
| | | FKYFDTTIDRKQYRSTKEVLDATLIHQSITGLYETRIDLSQLGGD | | | | |
| SpyCas9- | Streptococcus | MDKKYSIGLDIGTNSVGWAVITDEYKVPSKKFKVLGNTDRHSIKKNLIGALLF | N863A | H840A | D10A | 4584 |
| VQR | pyogenes | DSGETAEATRLKRTARRRYTRRKNRICYLQEIFSNEMAKVDDSFFHRLEESFL | | | | |
| | | VEEDKKHERHPIFGNIVDEVAYHEKYPTIYHLRKKLVDSTDKADLRLIYLALAH | | | | |
| | | MIKFRGHFLIEGDLNPDNSDVDKLFIQLVQTYNQLFEENPINASGVDAKAILS | | | | |
| | | ARLSKSRRLENLIAQLPGEKKNGLFGNLIALSLGLTPNFKSNFDLAEDAKLQLS | | | | |
| | | KDTYDDDLDNLLAQIGDQYADLFLAAKNLSDAILLSDILRVNTEITKAPLSAS | | | | |
| | | MIKRYDEHHQDLTLLKALVRQQLPEKYKEIFFDQSKNGYAGYIDGGASQEEF | | | | |
| | | YKFIKPILEKMDGTEELLVKLNREDLLRKQRTFDNGSIPHQIHLGELHAILRRQ | | | | |
| | | EDFYPFLKDNREKIEKILTFRIPYYVGPLARGNSRFAWMTRKSEETITPWNFE | | | | |
| | | EVVDKGASAQSFIERMTNFDKNLPNEKVLPKHSLLYEYFTVYNELTKVKYVTE | | | | |
| | | GMRKPAFLSGEQKKAIVDLLFKTNRKVTVKQLKEDYFKKIECFDSVEISGVED | | | | |
| | | RFNASLGTYHDLLKIIKDKDFLDNEENEDILEDIVLTLTLFEDREMIEERLKTYA | | | | |
| | | HLFDDKVMKQLKRRRYTGWGRLSRKLINGIRDKQSGKTILDFLKSDGFANR | | | | |
| | | NFMQLIHDDSLTFKEDIQKAQVSGQGDSLHEHIANLAGSPAIKKGILQTVKV | | | | |
| | | VDELVKVMGRHKPENIVIEMARENQTTQKGQKNSRERMKRIEEGIKELGSQ | | | | |
| | | ILKEHPVENTQLQNEKLYLYYLQNGRDMYVDQELDINRLSDYDVDHIVPQSF | | | | |
| | | LKDDSIDNKVLTRSDKNRGKSDNVPSEEVVKKMKNYWRQLLNAKLITQRKF | | | | |
| | | DNLTKAERGGLSELDKAGFIKRQLVETRQITKHVAQILDSRMNTKYDENDKLI | | | | |
| | | REVKVITLKSKLVSDFRKDFQFYKVREINNYHHAHDAYLNAVVGTALIKKYPK | | | | |
| | | LESEFVYGDYKVYDVRKMIAKSEQEIGKATAKYFFYSNIMNFFKTEITLANGEI | | | | |
| | | RKRPLIETNGETGEIVWDKGRDFATVRKVLSMPQVNIVKKTEVQTGGFSKES | | | | |
| | | ILPKRNSDKLIARKKDWDPKKYGGFVSPTVAYSVLVVAKVEKGKSKKLKSVKE | | | | |
| | | LLGITIMERSSFEKNPIDFLEAKGYKEVKKDLIIKLPKYSLFELENGRKRMLASA | | | | |
| | | GELQKGNELALPSKYVNFLYLASHYEKLKGSPEDNEQKQLFVEQHKHYLDEII | | | | |
| | | EQISEFSKRVILADANLDKVLSAYNKHRDKPIREQAENIIHLFTLTNLGAPAAF | | | | |
| | | KYFDTTIDRKQYRSTKEVLDATLIHQSITGLYETRIDLSQLGGD | | | | |
| SpyCas9- | Streptococcus | MDKKYSIGLDIGTNSVGWAVITDEYKVPSKKFKVLGNTDRHSIKKNLIGALLF | N863A | H840A | D10A | 4585 |
| VRER | pyogenes | DSGETAEATRLKRTARRRYTRRKNRICYLQEIFSNEMAKVDDSFFHRLEESFL | | | | |
| | | VEEDKKHERHPIFGNIVDEVAYHEKYPTIYHLRKKLVDSTDKADLRLIYLALAH | | | | |
| | | MIKFRGHFLIEGDLNPDNSDVDKLFIQLVQTYNQLFEENPINASGVDAKAILS | | | | |
| | | ARLSKSRRLENLIAQLPGEKKNGLFGNLIALSLGLTPNFKSNFDLAEDAKLQLS | | | | |
| | | KDTYDDDLDNLLAQIGDQYADLFLAAKNLSDAILLSDILRVNTEITKAPLSAS | | | | |
| | | MIKRYDEHHQDLTLLKALVRQQLPEKYKEIFFDQSKNGYAGYIDGGASQEEF | | | | |
| | | YKFIKPILEKMDGTEELLVKLNREDLLRKQRTFDNGSIPHQIHLGELHAILRRQ | | | | |
| | | EDFYPFLKDNREKIEKILTFRIPYYVGPLARGNSRFAWMTRKSEETITPWNFE | | | | |
| | | EVVDKGASAQSFIERMTNFDKNLPNEKVLPKHSLLYEYFTVYNELTKVKYVTE | | | | |
| | | GMRKPAFLSGEQKKAIVDLLFKTNRKVTVKQLKEDYFKKIECFDSVEISGVED | | | | |
| | | RFNASLGTYHDLLKIIKDKDFLDNEENEDILEDIVLTLTLFEDREMIEERLKTYA | | | | |
| | | HLFDDKVMKQLKRRRYTGWGRLSRKLINGIRDKQSGKTILDFLKSDGFANR | | | | |
| | | NFMQLIHDDSLTFKEDIQKAQVSGQGDSLHEHIANLAGSPAIKKGILQTVKV | | | | |
| | | VDELVKVMGRHKPENIVIEMARENQTTQKGQKNSRERMKRIEEGIKELGSQ | | | | |
| | | ILKEHPVENTQLQNEKLYLYYLQNGRDMYVDQELDINRLSDYDVDHIVPQSF | | | | |
| | | LKDDSIDNKVLTRSDKNRGKSDNVPSEEVVKKMKNYWRQLLNAKLITQRKF | | | | |
| | | DNLTKAERGGLSELDKAGFIKRQLVETRQITKHVAQILDSRMNTKYDENDKLI | | | | |
| | | REVKVITLKSKLVSDFRKDFQFYKVREINNYHHAHDAYLNAVVGTALIKKYPK | | | | |
| | | LESEFVYGDYKVYDVRKMIAKSEQEIGKATAKYFFYSNIMNFFKTEITLANGEI | | | | |
| | | RKRPLIETNGETGEIVWDKGRDFATVRKVLSMPQVNIVKKTEVQTGGFSKES | | | | |
| | | ILPKRNSDKLIARKKDWDPKKYGGFVSPTVAYSVLVVAKVEKGKSKKLKSVKE | | | | |
| | | LLGITIMERSSFEKNPIDFLEAKGYKEVKKDLIIKLPKYSLFELENGRKRMLASA | | | | |
| | | RELQKGNELALPSKYVNFLYLASHYEKLKGSPEDNEQKQLFVEQHKHYLDEII | | | | |
| | | EQISEFSKRVILADANLDKVLSAYNKHRDKPIREQAENIIHLFTLTNLGAPAAF | | | | |
| | | KYFDTTIDRKEYRSTKEVLDATLIHQSITGLYETRIDLSQLGGD | | | | |
| SpyCas9- | Streptococcus | MDKKYSIGLDIGTNSVGWAVITDEYKVPSKKFKVLGNTDRHSIKKNLIGALLF | N863A | H840A | D10A | 4586 |
| xCas | pyogenes | DSGETAEATRLKRTARRRYTRRKNRICYLQEIFSNEMAKVDDSFFHRLEESFL | | | | |
| | | VEEDKKHERHPIFGNIVDEVAYHEKYPTIYHLRKKLVDSTDKADLRLIYLALAH | | | | |
| | | MIKFRGHFLIEGDLNPDNSDVDKLFIQLVQTYNQLFEENPINASGVDAKAILS | | | | |
| | | ARLSKSRRLENLIAQLPGEKKNGLFGNLIALSLGLTPNFKSNFDLAEDTKLQLS | | | | |
| | | KDTYDDDLDNLLAQIGDQYADLFLAAKNLSDAILLSDILRVNTEITKAPLSAS | | | | |
| | | MIKLYDEHHQDLTLLKALVRQQLPEKYKEIFFDQSKNGYAGYIDGGASQEEF | | | | |
| | | YKFIKPILEKMDGTEELLVKLNREDLLRKQRTFDNGIIPHQIHLGELHAILRRQE | | | | |
| | | DFYPFLKDNREKIEKILTFRIPYYVGPLARGNSRFAWMTRKSEETITPWNFEK | | | | |
| | | VVDKGASAQSFIERMTNFDKNLPNEKVLPKHSLLYEYFTVYNELTKVKYVTE | | | | |
| | | GMRKPAFLSGDQKKAIVDLLFKTNRKVTVKQLKEDYFKKIECFDSVEISGVED | | | | |
| | | RFNASLGTYHDLLKIIKDKDFLDNEENEDILEDIVLTLTLFEDREMIEERLKTYA | | | | |
| | | HLFDDKVMKQLKRRRYTGWGRLSRKLINGIRDKQSGKTILDFLKSDGFANR | | | | |
| | | NFIQLIHDDSLTFKEDIQKAQVSGQGDSLHEHIANLAGSPAIKKGILQTVKVV | | | | |
| | | DELVKVMGRHKPENIVIEMARENQTTQKGQKNSRERMKRIEEGIKELGSQI | | | | |
| | | LKEHPVENTQLQNEKLYLYYLQNGRDMYVDQELDINRLSDYDVDHIVPQSF | | | | |
| | | LKDDSIDNKVLTRSDKNRGKSDNVPSEEVVKKMKNYWRQLLNAKLITQRKF | | | | |
| | | DNLTKAERGGLSELDKAGFIKRQLVETRQITKHVAQILDSRMNTKYDENDKLI | | | | |
| | | REVKVITLKSKLVSDFRKDFQFYKVREINNYHHAHDAYLNAVVGTALIKKYPK | | | | |
| | | LESEFVYGDYKVYDVRKMIAKSEQEIGKATAKYFFYSNIMNFFKTEITLANGEI | | | | |
| | | RKRPLIETNGETGEIVWDKGRDFATVRKVLSMPQVNIVKKTEVQTGGFSKES | | | | |
| | | ILPKRNSDKLIARKKDWDPKKYGGFDSPTVAYSVLVVAKVEKGKSKKLKSVKE | | | | |
| | | LLGITIMERSSFEKNPIDFLEAKGYKEVKKDLIIKLPKYSLFELENGRKRMLASA | | | | |
| | | GVLQKGNELALPSKYVNFLYLASHYEKLKGSPEDNEQKQLFVEQHKHYLDEII | | | | |
| | | EQISEFSKRVILADANLDKVLSAYNKHRDKPIREQAENIIHLFTLTNLGAPAAF | | | | |
| | | KYFDTTIDRKRYTSTKEVLDATLIHQSITGLYETRIDLSQLGGD | | | | |
| SpyCas9- | Streptococcus | MDKKYSIGLDIGTNSVGWAVITDEYKVPSKKFKVLGNTDRHSIKKNLIGALLF | N863A | H840A | D10A | 4587 |
| xCas-NG | pyogenes | DSGETAEATRLKRTARRRYTRRKNRICYLQEIFSNEMAKVDDSFFHRLEESFL | | | | |
| | | VEEDKKHERHPIFGNIVDEVAYHEKYPTIYHLRKKLVDSTDKADLRLIYLALAH | | | | |
| | | MIKFRGHFLIEGDLNPDNSDVDKLFIQLVQTYNQLFEENPINASGVDAKAILS | | | | |
| | | ARLSKSRRLENLIAQLPGEKKNGLFGNLIALSLGLTPNFKSNFDLAEDTKLQLS | | | | |
| | | KDTYDDDLDNLLAQIGDQYADLFLAAKNLSDAILLSDILRVNTEITKAPLSAS | | | | |
| | | MIKLYDEHHQDLTLLKALVRQQLPEKYKEIFFDQSKNGYAGYIDGGASQEEF | | | | |
| | | YKFIKPILEKMDGTEELLVKLNREDLLRKQRTFDNGIIPHQIHLGELHAILRRQE | | | | |
| | | DFYPFLKDNREKIEKILTFRIPYYVGPLARGNSRFAWMTRKSEETITPWNFEK | | | | |
| | | VVDKGASAQSFIERMTNFDKNLPNEKVLPKHSLLYEYFTVYNELTKVKYVTE | | | | |
| | | GMRKPAFLSGDQKKAIVDLLFKTNRKVTVKQLKEDYFKKIECFDSVEISGVED | | | | |
| | | RFNASLGTYHDLLKIIKDKDFLDNEENEDILEDIVLTLTLFEDREMIEERLKTYA | | | | |
| | | HLFDDKVMKQLKRRRYTGWGRLSRKLINGIRDKQSGKTILDFLKSDGFANR | | | | |
| | | NFIQLIHDDSLTFKEDIQKAQVSGQGDSLHEHIANLAGSPAIKKGILQTVKVV | | | | |
| | | DELVKVMGRHKPENIVIEMARENQTTQKGQKNSRERMKRIEEGIKELGSQI | | | | |
| | | LKEHPVENTQLQNEKLYLYYLQNGRDMYVDQELDINRLSDYDVDHIVPQSF | | | | |
| | | LKDDSIDNKVLTRSDKNRGKSDNVPSEEVVKKMKNYWRQLLNAKLITQRKF | | | | |
| | | DNLTKAERGGLSELDKAGFIKRQLVETRQITKHVAQILDSRMNTKYDENDKLI | | | | |
| | | REVKVITLKSKLVSDFRKDFQFYKVREINNYHHAHDAYLNAVVGTALIKKYPK | | | | |
| | | LESEFVYGDYKVYDVRKMIAKSEQEIGKATAKYFFYSNIMNFFKTEITLANGEI | | | | |
| | | RKRPLIETNGETGEIVWDKGRDFATVRKVLSMPQVNIVKKTEVQTGGFSKES | | | | |
| | | IRPKRNSDKLIARKKDWDPKKYGGFVSPTVAYSVLVVAKVEKGKSKKLKSVKE | | | | |
| | | LLGITIMERSSFEKNPIDFLEAKGYKEVKKDLIIKLPKYSLFELENGRKRMLASA | | | | |
| | | RFLQKGNELALPSKYVNFLYLASHYEKLKGSPEDNEQKQLFVEQHKHYLDEII | | | | |
| | | EQISEFSKRVILADANLDKVLSAYNKHRDKPIREQAENIIHLFTLTNLGAPRAF | | | | |
| | | KYFDTTIDRKVYRSTKEVLDATLIHQSITGLYETRIDLSQLGGD | | | | |
| St1Cas9- | Streptococcus | MSDLVLGLDIGIGSVGVGILNKVTGEIIHKNSRIFPAAQAENNLVRRTNRQG | N622A | H599A | D9A | 4588 |
| CNRZ1066 | thermophilus | RRLARRKKHRRVRLNRLFEESGLITDFTKISINLNPYQLRVKGLTDELSNEELFI | | | | |
| | | ALKNMVKHRGISYLDDASDDGNSSVGDYAQIVKENSKQLETKTPGQIQLER | | | | |
| | | YQTYGQLRGDFTVEKDGKKHRLINVFPTSAYRSEALRILQTQQEFNPQITDEF | | | | |
| | | INRYLEILTGKRKYYHGPGNEKSRTDYGRYRTSGETLDNIFGILIGKCTFYPDEF | | | | |
| | | RAAKASYTAQEFNLLNDLNNLTVPTETKKLSKEQKNQIINYVKNEKAMGPAK | | | | |
| | | LFKYIAKLLSCDVADIKGYRIDKSGKAEIHTFEAYRKMKTLETLDIEQMDRETL | | | | |
| | | DKLAYVLTLNTEREGIQEALEHEFADGSFSQKQVDELVQFRKANSSIFGKGW | | | | |
| | | HNFSVKLMMELIPELYETSEEQMTILTRLGKQKTTSSSNKTKYIDEKLLTEEIY | | | | |
| | | NPVVAKSVRQAIKIVNAAIKEYGDFDNIVIEMARETNEDDEKKAIQKIQKAN | | | | |
| | | KDEKDAAMLKAANQYNGKAELPHSVFHGHKQLATKIRLWHQQGERCLYT | | | | |
| | | GKTISIHDLINNSNQFEVDHILPLSITFDDSLANKVLVYATANQEKGQRTPYQ | | | | |
| | | ALDSMDDAWSFRELKAFVRESKTLSNKKKEYLLTEEDISKFDVRKKFIERNLV | | | | |
| | | DTRYASRVVLNALQEHFRAHKIDTKVSVVRGQFTSQLRRHWGIEKTRDTYH | | | | |
| | | HHAVDALIIAASSQLNLWKKQKNTLVSYSEEQLLDIETGELISDDEYKESVFKA | | | | |
| | | PYQHFVDTLKSKEFEDSILFSYQVDSKFNRKISDATIYATRQAKVGKDKKDET | | | | |
| | | YVLGKIKDIYTQDGYDAFMKIYKKDKSKFLMYRHDPQTFEKVIEPILENYPNK | | | | |
| | | QMNEKGKEVPCNPFLKYKEEHGYIRKYSKKGNGPEIKSLKYYDSKLLGNPIDI | | | | |
| | | TPENSKNKVVLQSLKPWRTDVYFNKATGKYEILGLKYADLQFEKGTGTYKIS | | | | |
| | | QEKYNDIKKKEGVDSDSEFKFTLYKNDLLLVKDTETKEQQLFRFLSRTLPKQK | | | | |
| | | HYVELKPYDKQKFEGGEALIKVLGNVANGGQCIKGLAKSNISIYKVRTDVLG | | | | |
| | | NQHIIKNEGDKPKLDF | | | | |
| St1Cas9- | Streptococcus | MSDLVLGLDIGIGSVGVGILNKVTGEIIHKNSRIFPAAQAENNLVRRTNRQG | N622A | H599A | D9A | 4589 |
| LMG1831 | thermophilus | RRLARRKKHRRVRLNRLFEESGLITDFTKISINLNPYQLRVKGLTDELSNEELFI | | | | |
| | | ALKNMVKHRGISYLDDASDDGNSSVGDYAQIVKENSKQLETKTPGQIQLER | | | | |
| | | YQTYGQLRGDFTVEKDGKKHRLINVFPTSAYRSEALRILQTQQEFNPQITDEF | | | | |
| | | INRYLEILTGKRKYYHGPGNEKSRTDYGRYRTSGETLDNIFGILIGKCTFYPDEF | | | | |
| | | RAAKASYTAQEFNLLNDLNNLTVPTETKKLSKEQKNQIINYVKNEKAMGPAK | | | | |
| | | LFKYIAKLLSCDVADIKGYRIDKSGKAEIHTFEAYRKMKTLETLDIEQMDRETL | | | | |
| | | DKLAYVLTLNTEREGIQEALEHEFADGSFSQKQVDELVQFRKANSSIFGKGW | | | | |
| | | HNFSVKLMMELIPELYETSEEQMTILTRLGKQKTTSSSNKTKYIDEKLLTEEIY | | | | |
| | | NPVVAKSVRQAIKIVNAAIKEYGDFDNIVIEMARETNEDDEKKAIQKIQKAN | | | | |
| | | KDEKDAAMLKAANQYNGKAELPHSVFHGHKQLATKIRLWHQQGERCLYT | | | | |
| | | GKTISIHDLINNSNQFEVDHILPLSITFDDSLANKVLVYATANQEKGQRTPYQ | | | | |
| | | ALDSMDDAWSFRELKAFVRESKTLSNKKKEYLLTEEDISKFDVRKKFIERNLV | | | | |
| | | DTRYASRVVLNALQEHFRAHKIDTKVSVVRGQFTSQLRRHWGIEKTRDTYH | | | | |
| | | HHAVDALIIAASSQLNLWKKQKNTLVSYSEEQLLDIETGELISDDEYKESVFKA | | | | |
| | | PYQHFVDTLKSKEFEDSILFSYQVDSKFNRKISDATIYATRQAKVGKDKKDET | | | | |
| | | YVLGKIKDIYTQDGYDAFMKIYKKDKSKFLMYRHDPQTFEKVIEPILENYPNK | | | | |
| | | QMNEKGKEVPCNPFLKYKEEHGYIRKYSKKGNGPEIKSLKYYDSKLLGNPIDI | | | | |
| | | TPENSKNKVVLQSLKPWRTDVYFNKNTGKYEILGLKYADLQFEKKTGTYKISQ | | | | |
| | | EKYNGIMKEEGVDSDSEFKFTLYKNDLLLVKDTETKEQQLFRFLSRTMPNVK | | | | |
| | | YYVELKPYSKDKFEKNESLIEILGSADKSGRCIKGLGKSNISIYKVRTDVLGNQH | | | | |
| | | IIKNEGDKPKLDF | | | | |
| St1Cas9- | Streptococcus | MSDLVLGLDIGIGSVGVGILNKVTGEIIHKNSRIFPAAQAENNLVRRTNRQG | N622A | H599A | D9A | 4590 |
| MTH17CL396 | thermophilus | RRLARRKKHRRVRLNRLFEESGLITDFTKISINLNPYQLRVKGLTDELSNEELFI | | | | |
| | | ALKNMVKHRGISYLDDASDDGNSSVGDYAQIVKENSKQLETKTPGQIQLER | | | | |
| | | YQTYGQLRGDFTVEKDGKKHRLINVFPTSAYRSEALRILQTQQEFNPQITDEF | | | | |
| | | INRYLEILTGKRKYYHGPGNEKSRTDYGRYRTSGETLDNIFGILIGKCTFYPDEF | | | | |
| | | RAAKASYTAQEFNLLNDLNNLTVPTETKKLSKEQKNQIINYVKNEKAMGPAK | | | | |
| | | LFKYIAKLLSCDVADIKGYRIDKSGKAEIHTFEAYRKMKTLETLDIEQMDRETL | | | | |
| | | DKLAYVLTLNTEREGIQEALEHEFADGSFSQKQVDELVQFRKANSSIFGKGW | | | | |
| | | HNFSVKLMMELIPELYETSEEQMTILTRLGKQKTTSSSNKTKYIDEKLLTEEIY | | | | |
| | | NPVVAKSVRQAIKIVNAAIKEYGDFDNIVIEMARETNEDDEKKAIQKIQKAN | | | | |
| | | KDEKDAAMLKAANQYNGKAELPHSVFHGHKQLATKIRLWHQQGERCLYT | | | | |
| | | GKTISIHDLINNSNQFEVDHILPLSITFDDSLANKVLVYATANQEKGQRTPYQ | | | | |
| | | ALDSMDDAWSFRELKAFVRESKTLSNKKKEYLLTEEDISKFDVRKKFIERNLV | | | | |
| | | DTRYASRVVLNALQEHFRAHKIDTKVSVVRGQFTSQLRRHWGIEKTRDTYH | | | | |
| | | HHAVDALIIAASSQLNLWKKQKNTLVSYSEDQLLDIETGELISDDEYKESVFK | | | | |
| | | APYQHFVDTLKSKEFEDSILFSYQVDSKFNRKISDATIYATRQAKVGKDKADE | | | | |
| | | TYVLGKIKDIYTQDGYDAFMKIYKKDKSKFLMYRHDPQTFEKVIEPILENYPN | | | | |
| | | KQINEKGKEVPCNPFLKYKEEHGYIRKYSKKGNGPEIKSLKYYDSKLGNHIDIT | | | | |
| | | PKDSNNKVVLQSLKPWRTDVYFNKNTGKYEILGLKYSDMQFEKGTGKYSISK | | | | |
| | | EQYENIKVREGVDENSEFKFTLYKNDLLLLKDSENGEQILLRFTSRNDTSKHYV | | | | |
| | | ELKPYNRQKFEGSEYLIKSLGTVAKGGQCIKGLGKSNISIYKVRTDVLGNQHII | | | | |
| | | KNEGDKPKLDF | | | | |
| St1Cas9- | Streptococcus | MSDLVLGLDIGIGSVGVGILNKVTGEIIHKNSRIFPAAQAENNLVRRTNRQG | N622A | H599A | D9A | 4591 |
| TH1477 | thermophilus | RRLARRKKHRRVRLNRLFEESGLITDFTKISINLNPYQLRVKGLTDELSNEELFI | | | | |
| | | ALKNMVKHRGISYLDDASDDGNSSVGDYAQIVKENSKQLETKTPGQIQLER | | | | |
| | | YQTYGQLRGDFTVEKDGKKHRLINVFPTSAYRSEALRILQTQQEFNPQITDEF | | | | |
| | | INRYLEILTGKRKYYHGPGNEKSRTDYGRYRTSGETLDNIFGILIGKCTFYPDEF | | | | |
| | | RAAKASYTAQEFNLLNDLNNLTVPTETKKLSKEQKNQIINYVKNEKAMGPAK | | | | |
| | | LFKYIAKLLSCDVADIKGYRIDKSGKAEIHTFEAYRKMKTLETLDIEQMDRETL | | | | |
| | | DKLAYVLTLNTEREGIQEALEHEFADGSFSQKQVDELVQFRKANSSIFGKGW | | | | |
| | | HNFSVKLMMELIPELYETSEEQMTILTRLGKQKTTSSSNKTKYIDEKLLTEEIY | | | | |
| | | NPVVAKSVRQAIKIVNAAIKEYGDFDNIVIEMARETNEDDEKKAIQKIQKAN | | | | |
| | | KDEKDAAMLKAANQYNGKAELPHSVFHGHKQLATKIRLWHQQGERCLYT | | | | |
| | | GKTISIHDLINNSNQFEVDHILPLSITFDDSLANKVLVYATANQEKGQRTPYQ | | | | |
| | | ALDSMDDAWSFRELKAFVRESKTLSNKKKEYLLTEEDISKFDVRKKFIERNLV | | | | |
| | | DTRYASRVVLNALQEHFRAHKIDTKVSVVRGQFTSQLRRHWGIEKTRDTYH | | | | |
| | | HHAVDALIIAASSQLNLWKKQKNTLVSYSEDQLLDIETGELISDDEYKESVFK | | | | |
| | | APYQHFVDTLKSKEFEDSILFSYQVDSKFNRKISDATIYATRQAKVGKDKADE | | | | |
| | | TYVLGKIKDIYTQDGYDAFMKIYKKDKSKFLMYRHDPQTFEKVIEPILENYPN | | | | |
| | | KQINEKGKEVPCNPFLKYKEEHGYIRKYSKKGNGPEIKSLKYYDSKLGNHIDIT | | | | |
| | | PKDSNNKVVLQSLKPWRTDVYFNKNTGKYEILGLKYSDMQFEKGTGKYSISK | | | | |
| | | EQYENIKVREGVDENSEFKFTLYKNDLLLLKDSENGEQILLRFTSRNDTSKHYV | | | | |
| | | ELKPYNRQKFEGSEYLIKSLGTVVKGGRCIKGLGKSNISIYKVRTDVLGNQHIIK | | | | |
| | | NEGDKPKLDF | | | | |
| sRGN3.1 | Staphylococcus | MNQKFILGLDIGITSVGYGLIDYETKNIIDAGVRLFPEANVENNEGRRSKRGS | N585A | H562A | D10A | 4592 |
| | spp. | RRLKRRRIHRLERVKLLLTEYDLINKEQIPTSNNPYQIRVKGLSEILSKDELAIAL | | | | |
| | | LHLAKRRGIHNVDVAADKEETASDSLSTKDQINKNAKFLESRYVCELQKERLE | | | | |
| | | NEGHVRGVENRFLTKDIVREAKKIIDTQMQYYPEIDETFKEKYISLVETRREYF | | | | |
| | | EGPGQGSPFGWNGDLKKWYEMLMGHCTYFPQELRSVKYAYSADLFNALN | | | | |
| | | DLNNLIIQRDNSEKLEYHEKYHIIENVFKQKKKPTLKQIAKEIGVNPEDIKGYRI | | | | |
| | | TKSGTPEFTSFKLFHDLKKVVKDHAILDDIDLLNQIAEILTIYQDKDSIVAELGQ | | | | |
| | | LEYLMSEADKQSISELTGYTGTHSLSLKCMNMIIDELWHSSMNQMEVFTYL | | | | |
| | | NMRPKKYELKGYQRIPTDMIDDAILSPVVKRTFIQSINVINKVIEKYGIPEDIIIE | | | | |
| | | LARENNSDDRKKFINNLQKKNEATRKRINEIIGQTGNQNAKRIVEKIRLHDQ | | | | |
| | | QEGKCLYSLESIPLEDLLNNPNHYEVDHIIPRSVSFDNSYHNKVLVKQSENSK | | | | |
| | | KSNLTPYQYFNSGKSKLSYNQFKQHILNLSKSQDRISKKKKEYLLEERDINKFE | | | | |
| | | VQKEFINRNLVDTRYATRELTNYLKAYFSANNMNVKVKTINGSFTDYLRKV | | | | |
| | | WKFKKERNHGYKHHAEDALIIANADFLFKENKKLKAVNSVLEKPEIETKQLDI | | | | |
| | | QVDSEDNYSEMFIIPKQVQDIKDFRNFKYSHRVDKKPNRQLINDTLYSTRKK | | | | |
| | | DNSTYIVQTIKDIYAKDNTTLKKQFDKSPEKFLMYQHDPRTFEKLEVIMKQYA | | | | |
| | | NEKNPLAKYHEETGEYLTKYSKKNNGPIVKSLKYIGNKLGSHLDVTHQFKSST | | | | |
| | | KKLVKLSIKNYRFDVYLTEKGYKFVTIAYLNVFKKDNYYYIPKDKYQELKEKKKI | | | | |
| | | KDTDQFIASFYKNDLIKLNGDLYKIIGVNSDDRNIIELDYYDIKYKDYCEINNIK | | | | |
| | | GEPRIKKTIGKKTESIEKFTTDVLGNLYLHSTEKAPQLIFKRGL | | | | |
| sRGN3.3 | Staphylococcus | MNQKFILGLDIGITSVGYGLIDYETKNIIDAGVRLFPEANVENNEGRRSKRGS | N585A | H562A | D10A | 4593 |
| | spp. | RRLKRRRIHRLERVKLLLTEYDLINKEQIPTSNNPYQIRVKGLSEILSKDELAIAL | | | | |
| | | LHLAKRRGIHNVDVAADKEETASDSLSTKDQINKNAKFLESRYVCELQKERLE | | | | |
| | | NEGHVRGVENRFLTKDIVREAKKIIDTQMQYYPEIDETFKEKYISLVETRREYF | | | | |
| | | EGPGQGSPFGWNGDLKKWYEMLMGHCTYFPQELRSVKYAYSADLFNALN | | | | |
| | | DLNNLIIQRDNSEKLEYHEKYHIIENVFKQKKKPTLKQIAKEIGVNPEDIKGYRI | | | | |
| | | TKSGTPEFTSFKLFHDLKKVVKDHAILDDIDLLNQIAEILTIYQDKDSIVAELGQ | | | | |
| | | LEYLMSEADKQSISELTGYTGTHSLSLKCMNMIIDELWHSSMNQMEVFTYL | | | | |
| | | NMRPKKYELKGYQRIPTDMIDDAILSPVVKRTFIQSINVINKVIEKYGIPEDIIIE | | | | |
| | | LARENNSDDRKKFINNLQKKNEATRKRINEIIGQTGNQNAKRIVEKIRLHDQ | | | | |
| | | QEGKCLYSLESIPLEDLLNNPNHYEVDHIIPRSVSFDNSYHNKVLVKQSENSK | | | | |
| | | KSNLTPYQYFNSGKSKLSYNQFKQHILNLSKSQDRISKKKKEYLLEERDINKFE | | | | |
| | | VQKEFINRNLVDTRYATRELTSYLKAYFSANNMDVKVKTINGSFTNHLRKV | | | | |
| | | WRFDKYRNHGYKHHAEDALIIANADFLFKENKKLQNTNKILEKPTIENNTKK | | | | |
| | | VTVEKEEDYNNVFETPKLVEDIKQYRDYKFSHRVDKKPNRQLINDTLYSTRM | | | | |
| | | KDEHDYIVQTITDIYGKDNTNLKKQFNKNPEKFLMYQNDPKTFEKLSIIMKQ | | | | |
| | | YSDEKNPLAKYYEETGEYLTKYSKKNNGPIVKKIKLLGNKVGNHLDVTNKYEN | | | | |
| | | STKKLVKLSIKNYRFDVYLTEKGYKFVTIAYLNVFKKDNYYYIPKDKYQELKEKK | | | | |
| | | KIKDTDQFIASFYKNDLIKLNGDLYKIIGVNSDDRNIIELDYYDIKYKDYCEINNI | | | | |
| | | KGEPRIKKTIGKKTESIEKFTTDVLGNLYLHSTEKAPQLIFKRGL | | | | |

[0150] In some embodiments, a Cas protein requires a protospacer adjacent motif (PAM) to be present in or adjacent to a target DNA sequence for the Cas protein to bind and/or function. In some embodiments, the PAM is or comprises, from 5′ to 3′, NGG, YG, NNGRRT, NNNRRT, NGA, TYCV, TATV, NTTN, or NNNGATT, where N stands for any nucleotide, Y stands for C or T, R stands for A or G, and V stands for A or C or G. In some embodiments, a Cas protein is a protein listed in Table 3 or 4. In some embodiments, a Cas protein comprises one or more mutations altering its PAM. In some embodiments, a Cas protein comprises E1369R, E1449H, and R1556A mutations or analogous substitutions to the amino acids corresponding to said positions. In some embodiments, a Cas protein comprises E782K, N968K, and R1015H mutations or analogous substitutions to the amino acids corresponding to said positions. In some embodiments, a Cas protein comprises D1135V, R1335Q, and T1337R mutations or analogous substitutions to the amino acids corresponding to said positions. In some embodiments, a Cas protein comprises S542R and K607R mutations or analogous substitutions to the amino acids corresponding to said positions. In some embodiments, a Cas protein comprises S542R, K548V, and N552R mutations or analogous substitutions to the amino acids corresponding to said positions. Exemplary advances in the engineering of Cas enzymes to recognize altered PAM sequences are reviewed in Collias et al Nature Communications 12:555 (2021), incorporated herein by reference in its entirety.

[0151] In some embodiments, the Cas protein is catalytically active and cuts one or both strands of the target DNA site. In some embodiments, cutting the target DNA site is followed by formation of an alteration, e.g., an insertion or deletion, e.g., by the cellular repair machinery.

[0152] In some embodiments, the Cas protein is modified to deactivate or partially deactivate the nuclease, e.g., nuclease-deficient Cas9. Whereas wild-type Cas9 generates double-strand breaks (DSBs) at specific DNA sequences targeted by a gRNA, a number of CRISPR endonucleases having modified functionalities are available, for example: a “nickase” version of Cas9 that has been partially deactivated generates only a single-strand break; a catalytically inactive Cas9 (“dCas9”) does not cut target DNA. In some embodiments, dCas9 binding to a DNA sequence may interfere with transcription at that site by steric hindrance. In some embodiments, dCas9 binding to an anchor sequence may interfere with (e.g., decrease or prevent) genomic complex (e.g., ASMC) formation and/or maintenance. In some embodiments, a DNA-binding domain comprises a catalytically inactive Cas9, e.g., dCas9. Many catalytically inactive Cas9 proteins are known in the art. In some embodiments, dCas9 comprises mutations in each endonuclease domain of the Cas protein, e.g., D10A and H840A or N863A mutations. In some embodiments, a catalytically inactive or partially inactive CRISPR/Cas domain comprises a Cas protein comprising one or more mutations, e.g., one or more of the mutations listed in Table 3. In some embodiments, a Cas protein described on a given row of Table 3 comprises one, two, three, or all of the mutations listed in the same row of Table 3. In some embodiments, a Cas protein, e.g., not described in Table 3, comprises one, two, three, or all of the mutations listed in a row of Table 3 or a corresponding mutation at a corresponding site in that Cas protein.

[0153] In some embodiments, a catalytically inactive, e.g., dCas9, or partially deactivated Cas9 protein comprises a D11 mutation (e.g., D11A mutation) or an analogous substitution to the amino acid corresponding to said position. In some embodiments, a catalytically inactive Cas9 protein, e.g., dCas9, or partially deactivated Cas9 protein comprises a H969 mutation (e.g., H969A mutation) or an analogous substitution to the amino acid corresponding to said position. In some embodiments, a catalytically inactive Cas9 protein, e.g., dCas9, or partially deactivated Cas9 protein comprises a N995 mutation (e.g., N995A mutation) or an analogous substitution to the amino acid corresponding to said position. In some embodiments, a catalytically inactive Cas9 protein, e.g., dCas9, comprises mutations at one, two, or three of positions D11, H969, and N995 (e.g., D11A, H969A, and N995A mutations) or analogous substitutions to the amino acids corresponding to said positions.

[0154] In some embodiments, a catalytically inactive Cas9 protein, e.g., dCas9, or partially deactivated Cas9 protein comprises a D10 mutation (e.g., a D10A mutation) or an analogous substitution to the amino acid corresponding to said position. In some embodiments, a catalytically inactive Cas9 protein, e.g., dCas9, or partially deactivated Cas9 protein comprises a H557 mutation (e.g., a H557A mutation) or an analogous substitution to the amino acid corresponding to said position. In some embodiments, a catalytically inactive Cas9 protein, e.g., dCas9, comprises a D10 mutation (e.g., a D10A mutation) and a H557 mutation (e.g., a H557A mutation) or analogous substitutions to the amino acids corresponding to said positions.

[0155] In some embodiments, a catalytically inactive Cas9 protein, e.g., dCas9, or partially deactivated Cas9 protein comprises a D839 mutation (e.g., a D839A mutation) or an analogous substitution to the amino acid corresponding to said position. In some embodiments, a catalytically inactive Cas9 protein, e.g., dCas9, or partially deactivated Cas9 protein comprises a H840 mutation (e.g., a H840A mutation) or an analogous substitution to the amino acid corresponding to said position. In some embodiments, a catalytically inactive Cas9 protein, e.g., dCas9, or partially deactivated Cas9 protein comprises a N863 mutation (e.g., a N863A mutation) or an analogous substitution to the amino acid corresponding to said position. In some embodiments, a catalytically inactive Cas9 protein, e.g., dCas9, comprises a D10 mutation (e.g., D10A), a D839 mutation (e.g., D839A), a H840 mutation (e.g., H840A), and a N863 mutation (e.g., N863A) or analogous substitutions to the amino acids corresponding to said positions.

[0156] In some embodiments, a catalytically inactive Cas9 protein, e.g., dCas9, or partially deactivated Cas9 protein comprises a E993 mutation (e.g., a E993A mutation) or an analogous substitution to the amino acid corresponding to said position.

[0157] In some embodiments, a catalytically inactive Cas9 protein, e.g., dCas9, or partially deactivated Cas9 protein comprises a D917 mutation (e.g., a D917A mutation) or an analogous substitution to the amino acid corresponding to said position. In some embodiments, a catalytically inactive Cas9 protein, e.g., dCas9, or partially deactivated Cas9 protein comprises a a E1006 mutation (e.g., a E1006A mutation) or an analogous substitution to the amino acid corresponding to said position. In some embodiments, a catalytically inactive Cas9 protein, e.g., dCas9, or partially deactivated Cas9 protein comprises a D1255 mutation (e.g., a D1255A mutation) or an analogous substitution to the amino acid corresponding to said position. In some embodiments, a catalytically inactive Cas9 protein, e.g., dCas9, comprises a D917 mutation (e.g., D917A), a E1006 mutation (e.g., E1006A), and a D1255 mutation (e.g., D1255A) or analogous substitutions to the amino acids corresponding to said positions.

[0158] In some embodiments, a catalytically inactive Cas9 protein, e.g., dCas9, or partially deactivated Cas9 protein comprises a D16 mutation (e.g., a D16A mutation) or an analogous substitution to the amino acid corresponding to said position. In some embodiments, a catalytically inactive Cas9 protein, e.g., dCas9, or partially deactivated Cas9 protein comprises a D587 mutation (e.g., a D587A mutation) or an analogous substitution to the amino acid corresponding to said position. In some embodiments, a partially deactivated Cas domain has nickase activity. In some embodiments, a partially deactivated Cas9 domain is a Cas9 nickase domain. In some embodiments, the catalytically inactive Cas domain or dead Cas domain produces no detectable double strand break formation. In some embodiments, a catalytically inactive Cas9 protein, e.g., dCas9, or partially deactivated Cas9 protein comprises a H588 mutation (e.g., a H588A mutation) or an analogous substitution to the amino acid corresponding to said position. In some embodiments, a catalytically inactive Cas9 protein, e.g., dCas9, or partially deactivated Cas9 protein comprises a N611 mutation (e.g., a N611A mutation) or an analogous substitution to the amino acid corresponding to said position. In some embodiments, a catalytically inactive Cas9 protein, e.g., dCas9, comprises a D16 mutation (e.g., D16A), a D587 mutation (e.g., D587A), a H588 mutation (e.g., H588A), and a N611 mutation (e.g., N611A) or analogous substitutions to the amino acids corresponding to said positions.

[0159] In some embodiments, a DNA-binding domain or endonuclease domain may comprise a Cas molecule comprising or linked (e.g., covalently) to a gRNA (e.g., a template nucleic acid, e.g., template RNA, comprising a gRNA).

[0160] In some embodiments, an endonuclease domain or DNA binding domain comprises a Streptococcus pyogenes Cas9 (SpCas9) or a functional fragment or variant thereof. In some embodiments, the endonuclease domain or DNA binding domain comprises a modified SpCas9. In embodiments, the modified SpCas9 comprises a modification that alters protospacer-adjacent motif (PAM) specificity. In embodiments, the PAM has specificity for the nucleic acid sequence 5′-NGT-3′. In embodiments, the modified SpCas9 comprises one or more amino acid substitutions, e.g., at one or more of positions L1111, D1135, G1218, E1219, A1322, of R1335, e.g., selected from L1111R, D1135V, G1218R, E1219F, A1322R, R1335V. In embodiments, the modified SpCas9 comprises the amino acid substitution T1337R and one or more additional amino acid substitutions, e.g., selected from L1111, D1135L, S1136R, G1218S, E1219V, D1332A, D1332S, D1332T, D1332V, D1332L, D1332K, D1332R, R1335Q, T1337, T1337L, T1337Q, T1337I, T1337V, T1337F, T1337S, T1337N, T1337K, T1337H, T1337Q, and T1337M, or corresponding amino acid substitutions thereto. In embodiments, the modified SpCas9 comprises: (i) one or more amino acid substitutions selected from D1135L, S1136R, G1218S, E1219V, A1322R, R1335Q, and T1337; and (ii) one or more amino acid substitutions selected from L1111R, G1218R, E1219F, D1332A, D1332S, D1332T, D1332V, D1332L, D1332K, D1332R, T1337L, T1337I, T1337V, T1337F, T1337S, T1337N, T1337K, T1337R, T1337H, T1337Q, and T1337M, or corresponding amino acid substitutions thereto.

[0161] In some embodiments, the endonuclease domain or DNA binding domain comprises a Cas domain, e.g., a Cas9 domain. In embodiments, the endonuclease domain or DNA binding domain comprises a nuclease-active Cas domain, a Cas nickase (nCas) domain, or a nuclease-inactive Cas (dCas) domain. In embodiments, the endonuclease domain or DNA binding domain comprises a nuclease-active Cas9 domain, a Cas9 nickase (nCas9) domain, or a nuclease-inactive Cas9 (dCas9) domain. In some embodiments, the endonuclease domain or DNA binding domain comprises a Cas9 domain of Cas9 (e.g., dCas9 and nCas9), Cas12a/Cpf1, Cas12b/C2c1, Cas12c/C2c3, Cas12d/CasY, Cas12e/CasX, Cas12g, Cas12h, or Cas12i. In some embodiments, the endonuclease domain or DNA binding domain comprises a Cas9 (e.g., dCas9 and nCas9), Cas12a/Cpf1, Cas12b/C2c1, Cas12c/C2c3, Cas12d/CasY, Cas12e/CasX, Cas12g, Cas12h, or Cas12i. In some embodiments, the endonuclease domain or DNA binding domain comprises an S. pyogenes or an S. thermophilus Cas9, or a functional fragment thereof. In some embodiments, the endonuclease domain or DNA binding domain comprises a Cas9 sequence, e.g., as described in Chylinski, Rhun, and Charpentier (2013) RNA Biology 10:5, 726-737; incorporated herein by reference. In some embodiments, the endonuclease domain or DNA binding domain comprises the HNH nuclease subdomain and/or the RuvC1 subdomain of a Cas, e.g., Cas9, e.g., as described herein, or a variant thereof. In some embodiments, the endonuclease domain or DNA binding domain comprises Cas12a/Cpf1, Cas12b/C2c1, Cas12c/C2c3, Cas12d/CasY, Cas12c/CasX, Cas12g, Cas12h, or Cas12i. In some embodiments, the endonuclease domain or DNA binding domain comprises a Cas polypeptide (e.g., enzyme), or a functional fragment thereof. In embodiments, the Cas polypeptide (e.g., enzyme) is selected from Cas1, Cas1B, Cas2, Cas3, Cas4, Cas5, Cas5d, Cas5t, Cas5h, Cas5a, Cas6, Cas7, Cas8, Cas8a, Cas8b, Cas8c, Cas9 (e.g., Csn1 or Csx12), Cas10, Cas10d, Cas12a/Cpf1, Cas12b/C2c1, Cas12c/C2c3, Cas12d/CasY, Cas12c/CasX, Cas12g, Cas12h, Cas12i, Csy1, Csy2, Csy3, Csy4, Cse1, Cse2, Cse3, Cse4, Cse5e, Csc1, Csc2, Csa5, Csn1, Csn2, Csm1, Csm2, Csm3, Csm4, Csm5, Csm6, Cmr1, Cmr3, Cmr4, Cmr5, Cmr6, Csb1, Csb2, Csb3, Csx17, Csx14, Csx10, Csx16, CsaX, Csx3, Csx1, Csx1S, Csx11, Csf1, Csf2, CsO, Csf4, Csd1, Csd2, Cst1, Cst2, Csh1, Csh2, Csa1, Csa2, Csa3, Csa4, Csa5, Type II Cas effector proteins, Type V Cas effector proteins, Type VI Cas effector proteins, CARF, DinG, Cpf1, Cas12b/C2c1, Cas12c/C2c3, Cas12b/C2c1, Cas12c/C2c3, SpCas9 (K855A), cSpCas9 (1.1), SpCas9-HF1, hyper accurate Cas9 variant (HypaCas9), homologues thereof, modified or engineered versions thereof, and/or functional fragments thereof. In embodiments, the Cas9 comprises one or more substitutions, e.g., selected from H840A, D10A, P475A, W476A, N477A, D1125A, W1126A, and D1127A. In embodiments, the Cas9 comprises one or more mutations at positions selected from: D10, G12, G17, E762, H840, N854, N863, H982, H983, A984, D986, and/or A987, e.g., one or more substitutions selected from D10A, G12A, G17A, E762A, H840A, N854A, N863A, H982A, H983A, A984A, and/or D986A. In some embodiments, the endonuclease domain or DNA binding domain comprises a Cas (e.g., Cas9) sequence from Corynebacterium ulcerans, Corynebacterium diphtheria, Spiroplasma syrphidicola, Prevotella intermedia, Spiroplasma taiwanense, Streptococcus iniae, Belliella baltica, Psychroflexus torquis, Streptococcus thermophilus, Listeria innocua, Campylobacter jejuni, Neisseria meningitidis, Streptococcus pyogenes, or Staphylococcus aureus, or a fragment or variant thereof.

[0162] In some embodiments, the endonuclease domain or DNA binding domain comprises a Cpf1 domain, e.g., comprising one or more substitutions, e.g., at position D917, E1006A, D1255 or any combination thereof, e.g., selected from D917A, E1006A, D1255A, D917A/E1006A, D917A/D1255A, E1006A/D1255A, and D917A/E1006A/D1255A.

[0163] In some embodiments, the endonuclease domain or DNA binding domain comprises spCas9, spCas9-VRQR, spCas9-VRER, xCas9 (sp), saCas9, saCas9-KKH, spCas9-MQKSER, spCas9-LRKIQK, or spCas9-LRVSQL.

[0164] In some embodiments, a gene modifying polypeptide has an endonuclease domain comprising a Cas9 nickase, e.g., Cas9 H840A. In embodiments, the Cas9 H840A has the following amino acid sequence:

Cas9 nickase (H840A):
(SEQ ID NO: 4594)
DKKYSIGLDIGTNSVGWAVITDEYKVPSKKFKVLGNTDRHSIKKNLIGALLFDSGETAEA
TRLKRTARRRYTRRKNRICYLQEIFSNEMAKVDDSFFHRLEESFLVEEDKKHERHPIFGN
IVDEVAYHEKYPTIYHLRKKLVDSTDKADLRLIYLALAHMIKFRGHFLIEGDLNPDNSDV
DKLFIQLVQTYNQLFEENPINASGVDAKAILSARLSKSRRLENLIAQLPGEKKNGLFGNLI
ALSLGLTPNFKSNFDLAEDAKLQLSKDTYDDDLDNLLAQIGDQYADLFLAAKNLSDAIL
LSDILRVNTEITKAPLSASMIKRYDEHHQDLTLLKALVRQQLPEKYKEIFFDQSKNGYAG
YIDGGASQEEFYKFIKPILEKMDGTEELLVKLNREDLLRKQRTFDNGSIPHQIHLGELHAI
LRRQEDFYPFLKDNREKIEKILTFRIPYYVGPLARGNSRFAWMTRKSEETITPWNFEEVV
DKGASAQSFIERMTNFDKNLPNEKVLPKHSLLYEYFTVYNELTKVKYVTEGMRKPAFLS
GEQKKAIVDLLFKTNRKVTVKQLKEDYFKKIECFDSVEISGVEDRFNASLGTYHDLLKII
KDKDFLDNEENEDILEDIVLTLTLFEDREMIEERLKTYAHLFDDKVMKQLKRRRYTGWG
RLSRKLINGIRDKQSGKTILDFLKSDGFANRNFMQLIHDDSLTFKEDIQKAQVSGQGDSL
HEHIANLAGSPAIKKGILQTVKVVDELVKVMGRHKPENIVIEMARENQTTQKGQKNSRE
RMKRIEEGIKELGSQILKEHPVENTQLQNEKLYLYYLQNGRDMYVDQELDINRLSDYDV
DAIVPQSFLKDDSIDNKVLTRSDKNRGKSDNVPSEEVVKKMKNYWRQLLNAKLITQRK
FDNLTKAERGGLSELDKAGFIKRQLVETRQITKHVAQILDSRMNTKYDENDKLIREVKVI
TLKSKLVSDFRKDFQFYKVREINNYHHAHDAYLNAVVGTALIKKYPKLESEFVYGDYK
VYDVRKMIAKSEQEIGKATAKYFFYSNIMNFFKTEITLANGEIRKRPLIETNGETGEIVWD
KGRDFATVRKVLSMPQVNIVKKTEVQTGGFSKESILPKRNSDKLIARKKDWDPKKYGG
FDSPTVAYSVLVVAKVEKGKSKKLKSVKELLGITIMERSSFEKNPIDFLEAKGYKEVKK
DLIIKLPKYSLFELENGRKRMLASAGELQKGNELALPSKYVNFLYLASHYEKLKGSPED
NEQKQLFVEQHKHYLDEIIEQISEFSKRVILADANLDKVLSAYNKHRDKPIREQAENIIHL
FTLTNLGAPAAFKYFDTTIDRKRYTSTKEVLDATLIHQSITGLYETRIDLSQLGGD

[0165] In some embodiments, a gene modifying polypeptide comprises a dCas9 sequence comprising a D10A and/or H840A mutation, e.g., the following sequence:

(SEQ ID NO: 4007)
SMDKKYSIGLAIGTNSVGWAVITDDYKVPSKKFKVLGNTDRHSIKKNLIGALLFDSGET
AEATRLKRTARRRYTRRKNRICYLQEIFSNEMAKVDDSFFHRLEESFLVEEDKKHERHPI
FGNIVDEVAYHEKYPTIYHLRKKLVDSTDKADLRLIYLALAHMIKFRGHFLIEGDLNPDN
SDVDKLFIQLVQTYNQLFEENPINASGVDAKAILSARLSKSRRLENLIAQLPGEKKNGLF
GNLIALSLGLTPNFKSNFDLAEDAKLQLSKDTYDDDLDNLLAQIGDQYADLFLAAKNLS
DAILLSDILRVNTEITKAPLSASMIKRYDEHHQDLTLLKALVRQQLPEKYKEIFFDQSKNG
YAGYIDGGASQEEFYKFIKPILEKMDGTEELLVKLNREDLLRKQRTFDNGSIPHQIHLGE
LHAILRRQEDFYPFLKDNREKIEKILTFRIPYYVGPLARGNSRFAWMTRKSEETITPWNFE
EVVDKGASAQSFIERMTNFDKNLPNEKVLPKHSLLYEYFTVYNELTKVKYVTEGMRKP
AFLSGEQKKAIVDLLFKTNRKVTVKQLKEDYFKKIECFDSVEISGVEDRFNASLGTYHDL
LKIIKDKDFLDNEENEDILEDIVLTLTLFEDREMIEERLKTYAHLFDDKVMKQLKRRRYT
GWGRLSRKLINGIRDKQSGKTILDFLKSDGFANRNFMQLIHDDSLTFKEDIQKAQVSGQ
GDSLHEHIANLAGSPAIKKGILQTVKVVDELVKVMGRHKPENIVIEMARENQTTQKGQK
NSRERMKRIEEGIKELGSQILKEHPVENTQLQNEKLYLYYLQNGRDMYVDQELDINRLS
DYDVDAIVPQSFLKDDSIDNKVLTRSDKNRGKSDNVPSEEVVKKMKNYWRQLLNAKLI
TQRKFDNLTKAERGGLSELDKAGFIKRQLVETRQITKHVAQILDSRMNTKYDENDKLIR
EVKVITLKSKLVSDFRKDFQFYKVREINNYHHAHDAYLNAVVGTALIKKYPKLESEFVY
GDYKVYDVRKMIAKSEQEIGKATAKYFFYSNIMNFFKTEITLANGEIRKRPLIETNGETG
EIVWDKGRDFATVRKVLSMPQVNIVKKTEVQTGGFSKESILPKRNSDKLIARKKDWDPK
KYGGFDSPTVAYSVLVVAKVEKGKSKKLKSVKELLGITIMERSSFEKNPIDFLEAKGYK
EVKKDLIIKLPKYSLFELENGRKRMLASAGELQKGNELALPSKYVNFLYLASHYEKLKG
SPEDNEQKQLFVEQHKHYLDEIIEQISEFSKRVILADANLDKVLSAYNKHRDKPIREQAE
NIIHLFTLTNLGAPAAFKYFDTTIDRKRYTSTKEVLDATLIHQSITGLYETRIDLSQLGGD

### TAL Effectors and Zinc Finger Nucleases

[0166] In some embodiments, an endonuclease domain or DNA-binding domain comprises a TAL effector molecule. A TAL effector molecule, e.g., a TAL effector molecule that specifically binds a DNA sequence, typically comprises a plurality of TAL effector domains or fragments thereof, and optionally one or more additional portions of naturally occurring TAL effectors (e.g., N- and/or C-terminal of the plurality of TAL effector domains). Many TAL effectors are known to those of skill in the art and are commercially available, e.g., from Thermo Fisher Scientific.

[0167] Naturally occurring TALEs are natural effector proteins secreted by numerous species of bacterial pathogens including the plant pathogen Xanthomonas which modulates gene expression in host plants and facilitates bacterial colonization and survival. The specific binding of TAL effectors is based on a central repeat domain of tandemly arranged nearly identical repeats of typically 33 or 34 amino acids (the repeat-variable di-residues, RVD domain).

[0168] Members of the TAL effectors family differ mainly in the number and order of their repeats. The number of repeats typically ranges from 1.5 to 33.5 repeats and the C-terminal repeat is usually shorter in length (e.g., about 20 amino acids) and is generally referred to as a “half-repeat.” Each repeat of the TAL effector generally features a one-repeat-to-one-base-pair correlation with different repeat types exhibiting different base-pair specificity (one repeat recognizes one base-pair on the target gene sequence). Generally, the smaller the number of repeats, the weaker the protein-DNA interactions. A number of 6.5 repeats has been shown to be sufficient to activate transcription of a reporter gene (Scholze et al., 2010).

[0169] Repeat to repeat variations occur predominantly at amino acid positions 12 and 13, which have therefore been termed “hypervariable” and which are responsible for the specificity of the interaction with the target DNA promoter sequence, as shown in Table 5 listing exemplary repeat variable diresidues (RVD) and their correspondence to nucleic acid base targets.

TABLE 5
RVDs and Nucleic Acid Base Specificity

| Target | Possible RVD Amino Acid Combinations | | | | | | | | | | | | |
|---|---|---|---|---|---|---|---|---|---|---|---|---|---|
| A | NI | NN | CI | HI | KI | | | | | | | | |
| G | NN | GN | SN | VN | LN | DN | QN | EN | HN | RH | NK | AN | FN |
| C | HD | RD | KD | ND | AD | | | | | | | | |
| T | NG | HG | VG | IG | EG | MG | YG | AA | EP | VA | QG | KG | RG |

[0170] Accordingly, it is possible to modify the repeats of a TAL effector to target specific DNA sequences. Further studies have shown that the RVD NK can target G. Target sites of TAL effectors also tend to include a T flanking the 5′ base targeted by the first repeat, but the exact mechanism of this recognition is not known. More than 113 TAL effector sequences are known to date. Non-limiting examples of TAL effectors from Xanthomonas include, Hax2, Hax3, Hax4, AvrXa7, AvrXa10 and AvrBs3.

[0171] Accordingly, the TAL effector domain of a TAL effector molecule described herein may be derived from a TAL effector from any bacterial species (e.g., Xanthomonas species such as the African strain of Xanthomonas oryzae pv. Oryzae (Yu et al. 2011), Xanthomonas campestris pv. raphani strain 756C and Xanthomonas oryzae pv. oryzicola strain BLS256 (Bogdanove et al. 2011). In some embodiments, the TAL effector domain comprises an RVD domain as well as flanking sequence(s) (sequences on the N-terminal and/or C-terminal side of the RVD domain) also from the naturally occurring TAL effector. It may comprise more or fewer repeats than the RVD of the naturally occurring TAL effector. The TAL effector molecule can be designed to target a given DNA sequence based on the above code and others known in the art. The number of TAL effector domains (e.g., repeats (monomers or modules)) and their specific sequence can be selected based on the desired DNA target sequence. For example, TAL effector domains, e.g., repeats, may be removed or added in order to suit a specific target sequence. In an embodiment, the TAL effector molecule of the present invention comprises between 6.5 and 33.5 TAL effector domains, e.g., repeats. In an embodiment, TAL effector molecule of the present invention comprises between 8 and 33.5 TAL effector domains, e.g., repeats, e.g., between 10 and 25 TAL effector domains, e.g., repeats, e.g., between 10 and 14 TAL effector domains, e.g., repeats.

[0172] In some embodiments, the TAL effector molecule comprises TAL effector domains that correspond to a perfect match to the DNA target sequence. In some embodiments, a mismatch between a repeat and a target base-pair on the DNA target sequence is permitted as along as it allows for the function of the polypeptide comprising the TAL effector molecule. In general, TALE binding is inversely correlated with the number of mismatches. In some embodiments, the TAL effector molecule of a polypeptide of the present invention comprises no more than 7 mismatches, 6 mismatches, 5 mismatches, 4 mismatches, 3 mismatches, 2 mismatches, or 1 mismatch, and optionally no mismatch, with the target DNA sequence. Without wishing to be bound by theory, in general the smaller the number of TAL effector domains in the TAL effector molecule, the smaller the number of mismatches will be tolerated and still allow for the function of the polypeptide comprising the TAL effector molecule. The binding affinity is thought to depend on the sum of matching repeat-DNA combinations. For example, TAL effector molecules having 25 TAL effector domains or more may be able to tolerate up to 7 mismatches.

[0173] In addition to the TAL effector domains, the TAL effector molecule of the present invention may comprise additional sequences derived from a naturally occurring TAL effector. The length of the C-terminal and/or N-terminal sequence(s) included on each side of the TAL effector domain portion of the TAL effector molecule can vary and be selected by one skilled in the art, for example based on the studies of Zhang et al. (2011). Zhang et al., have characterized a number of C-terminal and N-terminal truncation mutants in Hax3 derived TAL-effector based proteins and have identified key elements, which contribute to optimal binding to the target sequence and thus activation of transcription. Generally, it was found that transcriptional activity is inversely correlated with the length of N-terminus. Regarding the C-terminus, an important element for DNA binding residues within the first 68 amino acids of the Hax 3 sequence was identified. Accordingly, in some embodiments, the first 68 amino acids on the C-terminal side of the TAL effector domains of the naturally occurring TAL effector is included in the TAL effector molecule. Accordingly, in an embodiment, a TAL effector molecule comprises 1) one or more TAL effector domains derived from a naturally occurring TAL effector; 2) at least 70, 80, 90, 100, 110, 120, 130, 140, 150, 170, 180, 190, 200, 220, 230, 240, 250, 260, 270, 280 or more amino acids from the naturally occurring TAL effector on the N-terminal side of the TAL effector domains; and/or 3) at least 68, 80, 90, 100, 110, 120, 130, 140, 150, 170, 180, 190, 200, 220, 230, 240, 250, 260 or more amino acids from the naturally occurring TAL effector on the C-terminal side of the TAL effector domains.

[0174] In some embodiments, an endonuclease domain or DNA-binding domain is or comprises a Zn finger molecule. A Zn finger molecule comprises a Zn finger protein, e.g., a naturally occurring Zn finger protein or engineered Zn finger protein, or fragment thereof. Many Zn finger proteins are known to those of skill in the art and are commercially available, e.g., from Sigma-Aldrich.

[0175] In some embodiments, a Zn finger molecule comprises a non-naturally occurring Zn finger protein that is engineered to bind to a target DNA sequence of choice. See, for example, Beerli, et al. (2002) Nature Biotechnol. 20:135-141; Pabo, et al. (2001) Ann. Rev. Biochem. 70:313-340; Isalan, et al. (2001) Nature Biotechnol. 19:656-660; Segal, et al. (2001) Curr. Opin. Biotechnol. 12:632-637; Choo, et al. (2000) Curr. Opin. Struct. Biol. 10:411-416; U.S. Pat. Nos. 6,453,242; 6,534,261; 6,599,692; 6,503,717; 6,689,558; 7,030,215; 6,794,136; 7,067,317; 7,262,054; 7,070,934; 7,361,635; 7,253,273; and U.S. Patent Publication Nos. 2005/0064474; 2007/0218528; 2005/0267061, all incorporated herein by reference in their entireties.

[0176] An engineered Zn finger protein may have a novel binding specificity, compared to a naturally-occurring Zn finger protein. Engineering methods include, but are not limited to, rational design and various types of selection. Rational design includes, for example, using databases comprising triplet (or quadruplet) nucleotide sequences and individual Zn finger amino acid sequences, in which each triplet or quadruplet nucleotide sequence is associated with one or more amino acid sequences of zinc fingers which bind the particular triplet or quadruplet sequence. See, for example, U.S. Pat. Nos. 6,453,242 and 6,534,261, incorporated by reference herein in their entireties.

[0177] Exemplary selection methods, including phage display and two-hybrid systems, are disclosed in U.S. Pat. Nos. 5,789,538; 5,925,523; 6,007,988; 6,013,453; 6,410,248; 6,140,466; 6,200,759; and 6,242,568; as well as International Patent Publication Nos. WO 98/37186; WO 98/53057; WO 00/27878; and WO 01/88197 and GB 2,338,237. In addition, enhancement of binding specificity for zinc finger proteins has been described, for example, in International Patent Publication No. WO 02/077227.

[0178] In addition, as disclosed in these and other references, zinc finger domains and/or multi-fingered zinc finger proteins may be linked together using any suitable linker sequences, including for example, linkers of 5 or more amino acids in length. See, also, U.S. Pat. Nos. 6,479,626; 6,903,185; and 7,153,949 for exemplary linker sequences 6 or more amino acids in length. The proteins described herein may include any combination of suitable linkers between the individual zinc fingers of the protein. In addition, enhancement of binding specificity for zinc finger binding domains has been described, for example, in co-owned International Patent Publication No. WO 02/077227.

[0179] Zn finger proteins and methods for design and construction of fusion proteins (and polynucleotides encoding same) are known to those of skill in the art and described in detail in U.S. Pat. Nos. 6,140,0815; 789,538; 6,453,242; 6,534,261; 5,925,523; 6,007,988; 6,013,453; and 6,200,759; International Patent Publication Nos. WO 95/19431; WO 96/06166; WO 98/53057; WO 98/54311; WO 00/27878; WO 01/60970; WO 01/88197; WO 02/099084; WO 98/53058; WO 98/53059; WO 98/53060; WO 02/016536; and WO 03/016496.

[0180] In addition, as disclosed in these and other references, Zn finger proteins and/or multi-fingered Zn finger proteins may be linked together, e.g., as a fusion protein, using any suitable linker sequences, including for example, linkers of 5 or more amino acids in length. See, also, U.S. Pat. Nos. 6,479,626; 6,903,185; and 7,153,949 for exemplary linker sequences 6 or more amino acids in length. The Zn finger molecules described herein may include any combination of suitable linkers between the individual zinc finger proteins and/or multi-fingered Zn finger proteins of the Zn finger molecule.

[0181] In certain embodiments, the DNA-binding domain or endonuclease domain comprises a Zn finger molecule comprising an engineered zinc finger protein that binds (in a sequence-specific manner) to a target DNA sequence. In some embodiments, the Zn finger molecule comprises one Zn finger protein or fragment thereof. In other embodiments, the Zn finger molecule comprises a plurality of Zn finger proteins (or fragments thereof), e.g., 2, 3, 4, 5, 6 or more Zn finger proteins (and optionally no more than 12, 11, 10, 9, 8, 7, 6, 5, 4, 3, or 2 Zn finger proteins). In some embodiments, the Zn finger molecule comprises at least three Zn finger proteins. In some embodiments, the Zn finger molecule comprises four, five or six fingers. In some embodiments, the Zn finger molecule comprises 8, 9, 10, 11 or 12 fingers. In some embodiments, a Zn finger molecule comprising three Zn finger proteins recognizes a target DNA sequence comprising 9 or 10 nucleotides. In some embodiments, a Zn finger molecule comprising four Zn finger proteins recognizes a target DNA sequence comprising 12 to 14 nucleotides. In some embodiments, a Zn finger molecule comprising six Zn finger proteins recognizes a target DNA sequence comprising 18 to 21 nucleotides.

[0182] In some embodiments, a Zn finger molecule comprises a two-handed Zn finger protein. Two handed zinc finger proteins are those proteins in which two clusters of zinc finger proteins are separated by intervening amino acids so that the two zinc finger domains bind to two discontinuous target DNA sequences. An example of a two handed type of zinc finger binding protein is SIP1, where a cluster of four zinc finger proteins is located at the amino terminus of the protein and a cluster of three Zn finger proteins is located at the carboxyl terminus (see Remade, et al. (1999) EMBO Journal 18 (18): 5073-5084). Each cluster of zinc fingers in these proteins is able to bind to a unique target sequence and the spacing between the two target sequences can comprise many nucleotides.

### Linkers

[0183] In some embodiments, a gene modifying polypeptide may comprise a linker, e.g., a peptide linker, e.g., a linker as described in Table 6. In some embodiments, a gene modifying polypeptide comprises, in an N-terminal to C-terminal direction, a Cas domain (e.g., a Cas domain of Table 3), a linker of Table 6 (or a sequence having at least 70%, 80%, 85%, 90%, 95%, or 99% identity thereto), and an RT domain (e.g., an RT domain of Table 2). In some embodiments, a gene modifying polypeptide comprises a flexible linker between the endonuclease and the RT domain, e.g., a linker comprising the amino acid sequence SGGSSGGSSGSETPGTSESATPESSGGSSGGSS (SEQ ID NO: 4006). In some embodiments, an RT domain of a gene modifying polypeptide may be located C-terminal to the endonuclease domain. In some embodiments, an RT domain of a gene modifying polypeptide may be located N-terminal to the endonuclease domain.

TABLE 6
Exemplary linker sequences

| | SEQ |
|---|---|
| Amino Acid Sequence | ID NO |
| GGS | |
| GGSGGS | 4102 |
| GGSGGSGGS | 4103 |
| GGSGGSGGSGGS | 4104 |
| GGSGGSGGSGGSGGS | 4105 |
| GGSGGSGGSGGSGGSGGS | 4106 |
| GGGGS | 4107 |
| GGGGSGGGGS | 4108 |
| GGGGSGGGGSGGGGS | 4109 |
| GGGGSGGGGSGGGGSGGGGS | 4110 |
| GGGGGGGGSGGGGSGGGGSGGGGS | 4111 |
| GGGGSGGGGSGGGGSGGGGSGGGGSGGGGS | 4112 |
| GGG | |
| GGGG | 4114 |
| GGGGG | 4115 |
| GGGGGG | 4116 |
| GGGGGGG | 4117 |
| GGGGGGGG | 4118 |
| GSS | |
| GSSGSS | 4120 |
| GSSGSSGSS | 4121 |
| GSSGSSGSSGSS | 4122 |
| GSSGSSGSSGSSGSS | 4123 |
| GSSGSSGSSGSSGSSGSS | 4124 |
| EAAAK | 4125 |
| EAAAKEAAAK | 4126 |
| EAAAKEAAAKEAAAK | 4127 |
| EAAAKEAAAKEAAAKEAAAK | 4128 |
| EAAAKEAAAKEAAAKEAAAKEAAAK | 4129 |
| EAAAKEAAAKEAAAKEAAAKEAAAKEAAAK | 4130 |
| PAP | |
| PAPAP | 4132 |
| PAPAPAP | 4133 |
| PAPAPAPAP | 4134 |
| PAPAPAPAPAP | 4135 |
| PAPAPAPAPAPAP | 4136 |
| GGSGGG | 4137 |
| GGGGGS | 4138 |
| GGSGSS | 4139 |
| GSSGGS | 4140 |
| GGSEAAAK | 4141 |
| EAAAKGGS | 4142 |
| GGSPAP | 4143 |
| PAPGGS | 4144 |
| GGGGSS | 4145 |
| GSSGGG | 4146 |
| GGGEAAAK | 4147 |
| EAAAKGGG | 4148 |
| GGGPAP | 4149 |
| PAPGGG | 4150 |
| GSSEAAAK | 4151 |
| EAAAKGSS | 4152 |
| GSSPAP | 4153 |
| PAPGSS | 4154 |
| EAAAKPAP | 4155 |
| PAPEAAAK | 4156 |
| GGSGGGGSS | 4157 |
| GGSGSSGGG | 4158 |
| GGGGGSGSS | 4159 |
| GGGGSSGGS | 4160 |
| GSSGGSGGG | 416 |
| GSSGGGGGS | 4162 |
| GGSGGGEAAAK | 4163 |
| GGSEAAAKGGG | 4164 |
| GGGGGSEAAAK | 4165 |
| GGGEAAAKGGS | 4166 |
| EAAAKGGSGGG | 4167 |
| EAAAKGGGGGS | 4168 |
| GGSGGGPAP | 4169 |
| GGSPAPGGG | 4170 |
| GGGGGSPAP | 4171 |
| GGGPAPGGS | 4172 |
| PAPGGSGGG | 4173 |
| PAPGGGGGS | 4174 |
| GGSGSSEAAAK | 4175 |
| GGSEAAAKGSS | 4176 |
| GSSGGSEAAAK | 4177 |
| GSSEAAAKGGS | 4178 |
| EAAAKGGSGSS | 4179 |
| EAAAKGSSGGS | 4180 |
| GGSGSSPAP | 4181 |
| GGSPAPGSS | 4182 |
| GSSGGSPAP | 4183 |
| GSSPAPGGS | 4184 |
| PAPGGSGSS | 4185 |
| PAPGSSGGS | 4186 |
| GGSEAAAKPAP | 4187 |
| GGSPAPEAAAK | 4188 |
| EAAAKGGSPAP | 4189 |
| EAAAKPAPGGS | 4190 |
| PAPGGSEAAAK | 4191 |
| PAPEAAAKGGS | 4192 |
| GGGGSSEAAAK | 4193 |
| GGGEAAAKGSS | 4194 |
| GSSGGGEAAAK | 4195 |
| GSSEAAAKGGG | 4196 |
| EAAAKGGGGSS | 4197 |
| EAAAKGSSGGG | 4198 |
| GGGGSSPAP | 4199 |
| GGGPAPGSS | 4200 |
| GSSGGGPAP | 4201 |
| GSSPAPGGG | 4202 |
| PAPGGGGSS | 4203 |
| PAPGSSGGG | 4204 |
| GGGEAAAKPAP | 4205 |
| GGGPAPEAAAK | 4206 |
| EAAAKGGGPAP | 4207 |
| EAAAKPAPGGG | 4208 |
| PAPGGGEAAAK | 4209 |
| PAPEAAAKGGG | 4210 |
| GSSEAAAKPAP | 4211 |
| GSSPAPEAAAK | 4212 |
| EAAAKGSSPAP | 4213 |
| EAAAKPAPGSS | 4214 |
| PAPGSSEAAAK | 4215 |
| PAPEAAAKGSS | 4216 |
| AEAAAKEAAAKEAAAKEAAAKALEAEAAAKEAAAKEAAAKE | 4217 |
| AAAKA | |
| GGGGSEAAAKGGGGS | 4218 |
| EAAAKGGGGSEAAAK | 4219 |
| SGSETPGTSESATPES | 4220 |
| GSAGSAAGSGEF | 4221 |
| SGGSSGGSSGSETPGTSESATPESSGGSSGGSS | 4222 |

[0184] In some embodiments, a linker of a gene modifying polypeptide comprises a motif chosen from: (SGGS)ₙ (SEQ ID NO: 4025), (GGGS)ₙ (SEQ ID NO: 4026), (GGGGS)ₙ (SEQ ID NO: 4027), (G)_{n,} (EAAAK)ₙ (SEQ ID NO: 4028), (GGS)_{n,} or (XP)ₙ.

### Gene Modifying Polypeptide Selection by Pooled Screening

[0185] Candidate gene modifying polypeptides may be screened to evaluate a candidate's gene editing ability. For example, an RNA gene modifying system designed for the targeted editing of a coding sequence in the human genome may be used. In certain embodiments, such a gene modifying system may be used in conjunction with a pooled screening approach.

[0186] For example, a library of gene modifying polypeptide candidates and a template guide RNA (tgRNA) may be introduced into mammalian cells to test the candidates' gene editing abilities by a pooled screening approach. In specific embodiments, a library of gene modifying polypeptide candidates is introduced into mammalian cells followed by introduction of the tgRNA into the cells.

[0187] Representative, non-limiting examples of mammalian cells that may be used in screening include HEK293T cells, U2OS cells, HeLa cells, HepG2 cells, Huh7 cells, K562 cells, or iPS cells.

[0188] A gene modifying polypeptide candidate may comprise 1) a Cas-nuclease, for example a wild-type Cas nuclease, e.g., a wild-type Cas9 nuclease, a mutant Cas nuclease, e.g., a Cas nickase, for example, a Cas9 nickase such as a Cas9 N863A nickase, or a Cas nuclease selected from Table 3 or Table 4, 2) a peptide linker, e.g., a sequence from Table D or Table 6, that may exhibit varying degrees of length, flexibility, hydrophobicity, and/or secondary structure; and 3) a reverse transcriptase (RT), e.g. an RT domain from Table D or Table 2. A gene modifying polypeptide candidate library comprises: a plurality of different gene modifying polypeptide candidates that differ from each other with respect to one, two or all three of the Cas nuclease, peptide linker or RT domain components, or a plurality of nucleic acid expression vectors that encode such gene modifying polypeptide candidates.

[0189] For screening of gene modifying polypeptide candidates, a two-component system may be used that comprises a gene modifying polypeptide component and a tgRNA component. A gene modifying component may comprise, for example, an expression vector, e.g., an expression plasmid or lentiviral vector, that encodes a gene modifying polypeptide candidate, for example, comprises a human codon-optimized nucleic acid that encodes a gene modifying polypeptide candidate, e.g., a Cas-linker-RT fusion as described above. In a particular embodiment, a lentiviral cassette is utilized that comprises: (i) a promoter for expression in mammalian cells, e.g., a CMV promoter; (ii) a gene modifying library candidate, e.g. a Cas-linker-RT fusion comprising a Cas nuclease of Table 3 or Table 4, a peptide linker of Table 6, and an RT of Table 2, for example a Cas-linker-RT fusion as in Table D; (iii) a self-cleaving polypeptide, e.g., a T2A peptide; (iv) a marker enabling selection in mammalian cells, e.g., a puromycin resistance gene; and (v) a termination signal, e.g., a poly A tail.

[0190] The tgRNA component may comprise a tgRNA or expression vector, e.g., an expression plasmid, that produces the tgRNA, for example, utilizes a U6 promoter to drive expression of the tgRNA, wherein the tgRNA is a non-coding RNA sequence that is recognized by Cas and localizes it to the genomic locus of interest, and that also templates reverse transcription of the desired edit into the genome by the RT domain.

[0191] To prepare a pool of cells expressing gene modifying polypeptide library candidates, mammalian cells, e.g., HEK293T or U2OS cells, may be transduced with pooled gene modifying polypeptide candidate expression vector preparations, e.g., lentiviral preparations, of the gene modifying candidate polypeptide library. In a particular embodiment, lentiviral plasmids are utilized, and HEK293 Lenti-X cells are seeded in 15 cm plates (˜12×10⁶ cells) prior to lentiviral plasmid transfection. In such an embodiment, lentiviral plasmid transfection may be performed using the Lentiviral Packaging Mix (Biosettia) and transfection of the plasmid DNA for the gene modifying candidate library is performed the following day using Lipofectamine 2000 and Opti-MEM media according to the manufacturer's protocol. In such an embodiment, extracellular DNA may be removed by a full media change the next day and virus-containing media may be harvested 48 hours after. Lentiviral media may be concentrated using Lenti-X Concentrator (TaKaRa Biosciences) and 5 mL lentiviral aliquots may be made and stored at −80° C. Lentiviral titering is performed by enumerating colony forming units post-selection, e.g., post Puromycin selection.

[0192] For monitoring gene editing of a target DNA, mammalian cells, e.g., HEK293T or U2OS cells, carrying a target DNA may be utilized. In other embodiments for monitoring gene editing of a target DNA, mammalian cells, e.g., HEK293T or U2OS cells, carrying a target DNA genomic landing pad may be utilized. In particular embodiments, the target DNA genomic landing pad may comprise a gene to be edited for treatment of a disease or disorder of interest. In other particular embodiments, the target DNA is a gene sequence that expresses a protein that exhibits detectable characteristics that may be monitored to determine whether gene editing has occurred. For example, in certain embodiments, a blue fluorescence protein (BFP)- or green fluorescence protein (GFP)-expressing genomic landing pad is utilized. In certain embodiments, mammalian cells, e.g., HEK293T or U2OS cells, comprising a target DNA, e.g., a target DNA genomic landing pad, are seeded in culture plates at 500×-3000× cells per gene modifying library candidate and transduced at a 0.2-0.3 multiplicity of infection (MOI) to minimize multiple infections per cell. Puromycin (2.5 ug/mL) may be added 48 hours post infection to allow for selection of infected cells. In such an embodiment, cells may be kept under puromycin selection for at least 7 days and then scaled up for tgRNA introduction, e.g., tgRNA electroporation.

[0193] To ascertain whether gene editing occurs, mammalian cells containing a target DNA to be edited may be infected with gene modifying polypeptide library candidates then transfected with tgRNA designed for use in editing of the target DNA. Subsequently, the cells may be analyzed to determine whether editing of the target locus has occurred according to the designed outcome, or whether no editing or imperfect editing has occurred, e.g., by using cell sorting and sequence analysis.

[0194] In a particular embodiment, to ascertain whether genome editing occurs, BFP- or GFP-expressing mammalian cells, e.g., HEK293T or U2OS cells, may be infected with gene modifying library candidates and then transfected or electroporated with tgRNA plasmid or RNA, e.g., by electroporation of 250,000 cells/well with 200 ng of a tgRNA plasmid designed to convert BFP-to-GFP or GFP-to-BFP, at a cell count ensuring >250×-1000× coverage per library candidate. In such an embodiment, the genome-editing capacity of the various constructs in this assay may be assessed by sorting the cells by Fluorescence-Activated Cell Sorting (FACS) for expression of the color-converted fluorescent protein (FP) at 4-10 days post-electroporation. Cells are sorted and harvested as distinct populations of unedited cells (exhibiting original florescence protein signal), edited cells (exhibiting converted fluorescence protein signal), and imperfect edit (exhibiting no florescence protein signal) cells. A sample of unsorted cells may also be harvested as the input population to determine candidate enrichment during analysis.

[0195] To determine which gene modifying library candidates exhibit genome-editing capacity in an assay, genomic DNA (gDNA) is harvested from the sorted cell populations, and analyzed by sequencing the gene modifying library candidates in each population. Briefly, gene modifying candidates may be amplified from the genome using primers specific to the gene modifying polypeptide expression vector, e.g., the lentiviral cassette, amplified in a second round of PCR to dilute genomic DNA, and then sequenced, for example, sequenced by a next-generation sequencing platform. After quality control of sequencing reads, reads of at least about 1500 nucleotides and generally no more than about 3200 nucleotides are mapped to the gene modifying polypeptide library sequences and those containing a minimum of about an 80% match to a library sequence are considered to be successfully aligned to a given candidate for purposes of this pooled screen. In order to identify candidates capable of performing gene editing in the assay, e.g., the BFP-to-GFP or GFP-to-BFP edit, the read count of each library candidate in the edited population is compared to its read count in the initial, unsorted population.

[0196] For purposes of pooled screening, gene modifying candidates with genome-editing capacity are identified based on enrichment in the edited (converted FP) population relative to unsorted (input) cells. In some embodiments, an enrichment of at least 1.0, 1.5, 2.0, 2.5, 3.0, 4.0, 5.0, 6.0, 7.0, 8.0, 9.0, 10, 15, 20, 25, 30, 40, 50, 60, 70, 80, 90, or at least 100-fold over the input indicates potentially useful gene editing activity, e.g., at least 2-fold enrichment. In some embodiments, the enrichment is converted to a log-value by taking the log base 2 of the enrichment ratio. In some embodiments, a log 2 enrichment score of at least 0, 1, 2, 3, 4, 5, 5.5, 6.0, 6.2, 6.3, 6.4, 6.5, or at least 6.6 indicates potentially useful gene editing activity, e.g., a log 2 enrichment score of at least 1.0. In particular embodiments, enrichment values observed for gene modifying candidates may be compared to enrichment values observed under similar conditions utilizing a reference, e.g., Element ID No: 17380.

[0197] In some embodiments, multiple tgRNAs may be used to screen the gene modifying candidate library. In particular embodiments, a plurality of tgRNAs may be utilized to optimize template/Cas-linker-RT fusion pairs, e.g., for gene editing of particular target genes, for example, gene targets for the treatment of disease. In specific embodiments, a pooled approach to screening gene modifying candidates may be performed using a multiplicity of different tgRNAs in an arrayed format.

[0198] In some embodiments, multiple types of edits, e.g., insertions, substitutions, and/or deletions of different lengths, may be used to screen the gene modifying candidate library.

[0199] In some embodiments, multiple target sequences, e.g., different fluorescent proteins, may be used to screen the gene modifying candidate library. In some embodiments, multiple target sequences, e.g., different fluorescent proteins, may be used to screen the gene modifying candidate library. In some embodiments, multiple cell types, e.g., HEK293T or U2OS, may be used to screen the gene modifying candidate library. The person of ordinary skill in the art will appreciate that a given candidate may exhibit altered editing capacity or even the gain or loss of any observable or useful activity across different conditions, including tgRNA sequence (e.g., nucleotide modifications, PBS length, RT template length), target sequence, target location, type of edit, location of mutation relative to the first-strand nick of the gene modifying polypeptide, or cell type. Thus, in some embodiments, gene modifying library candidates are screened across multiple parameters, e.g., with at least two distinct tgRNAs in at least two cell types, and gene editing activity is identified by enrichment in any single condition. In other embodiments, a candidate with more robust activity across different tgRNA and cell types is identified by enrichment in at least two conditions, e.g., in all conditions screened. For clarity, candidates found to exhibit little to no enrichment under any given condition are not assumed to be inactive across all conditions and may be screened with different parameters or reconfigured at the polypeptide level, e.g., by swapping, shuffling, or evolving domains (e.g., RT domain), linkers, or other signals (e.g., NLS).

### Sequences of Exemplary Cas9-Linker-RT Fusions

[0200] In some embodiments, a gene modifying polypeptide comprises a linker sequence and an RT sequence. In some embodiments, a gene modifying polypeptide comprises a linker sequence as listed in Table D, or an amino acid sequence having at least 75%, 80%, 85%, 90%, 95%, 96%, 97%, 98%, or 99% identity thereto. In some embodiments, a gene modifying polypeptide comprises the amino acid sequence of an RT domain as listed in Table D, or an amino acid sequence having at least 75%, 80%, 85%, 90%, 95%, 96%, 97%, 98%, or 99% identity thereto. In some embodiments, a gene modifying polypeptide comprises a linker sequence as listed in Table D, or an amino acid sequence having at least 75%, 80%, 85%, 90%, 95%, 96%, 97%, 98%, or 99% identity thereto; and the amino acid sequence of an RT domain as listed in Table D, or an amino acid sequence having at least 75%, 80%, 85%, 90%, 95%, 96%, 97%, 98%, or 99% identity thereto. In some embodiments, a gene modifying polypeptide comprises: (i) a linker sequence as listed in a row of Table D, or an amino acid sequence having at least 75%, 80%, 85%, 90%, 95%, 96%, 97%, 98%, or 99% identity thereto; and (ii) the amino acid sequence of an RT domain as listed in the same row of Table D, or an amino acid sequence having at least 75%, 80%, 85%, 90%, 95%, 96%, 97%, 98%, or 99% identity thereto.

### Localization Sequences for Gene Modifying Systems

[0201] In certain embodiments, a gene editor system RNA further comprises an intracellular localization sequence, e.g., a nuclear localization sequence (NLS). In some embodiments, a gene modifying polypeptide comprises an NLS as comprised in SEQ ID NO: 4000 and/or SEQ ID NO: 4001, or an NLS having an amino acid sequence having at least 75%, 80%, 85%, 90%, 95%, 96%, 97%, 98%, or 99% identity thereto.

[0202] The nuclear localization sequence may be an RNA sequence that promotes the import of the RNA into the nucleus. In certain embodiments the nuclear localization signal is located on the template RNA. In certain embodiments, the gene modifying polypeptide is encoded on a first RNA, and the template RNA is a second, separate, RNA, and the nuclear localization signal is located on the template RNA and not on an RNA encoding the gene modifying polypeptide. While not wishing to be bound by theory, in some embodiments, the RNA encoding the gene modifying polypeptide is targeted primarily to the cytoplasm to promote its translation, while the template RNA is targeted primarily to the nucleus to promote insertion into the genome. In some embodiments the nuclear localization signal is at the 3′ end, 5′ end, or in an internal region of the template RNA. In some embodiments the nuclear localization signal is 3′ of the heterologous sequence (e.g., is directly 3′ of the heterologous sequence) or is 5′ of the heterologous sequence (e.g., is directly 5′ of the heterologous sequence). In some embodiments the nuclear localization signal is placed outside of the 5′ UTR or outside of the 3′ UTR of the template RNA. In some embodiments the nuclear localization signal is placed between the 5′ UTR and the 3′ UTR, wherein optionally the nuclear localization signal is not transcribed with the transgene (e.g., the nuclear localization signal is an anti-sense orientation or is downstream of a transcriptional termination signal or polyadenylation signal). In some embodiments the nuclear localization sequence is situated inside of an intron. In some embodiments a plurality of the same or different nuclear localization signals are in the RNA, e.g., in the template RNA. In some embodiments the nuclear localization signal is less than 5, 10, 25, 50, 75, 100, 150, 200, 250, 300, 350, 400, 450, 500, 600, 700, 800, 900 or 1000 bp in length. Various RNA nuclear localization sequences can be used. For example, Lubelsky and Ulitsky, Nature 555 (107-111), 2018 describe RNA sequences which drive RNA localization into the nucleus. In some embodiments, the nuclear localization signal is a SINE-derived nuclear RNA localization (SIRLOIN) signal. In some embodiments the nuclear localization signal binds a nuclear-enriched protein. In some embodiments the nuclear localization signal binds the HNRNPK protein. In some embodiments the nuclear localization signal is rich in pyrimidines, e.g., is a C/T rich, C/U rich, C rich, T rich, or U rich region. In some embodiments the nuclear localization signal is derived from a long non-coding RNA. In some embodiments the nuclear localization signal is derived from MALAT1 long non-coding RNA or is the 600 nucleotide M region of MALAT1 (described in Miyagawa et al., RNA 18, (738-751), 2012). In some embodiments the nuclear localization signal is derived from BORG long non-coding RNA or is a AGCCC motif (described in Zhang et al., Molecular and Cellular Biology 34, 2318-2329 (2014). In some embodiments the nuclear localization sequence is described in Shukla et al., The EMBO Journal e98452 (2018). In some embodiments the nuclear localization signal is derived from a retrovirus.

[0203] In some embodiments, a polypeptide described herein comprises one or more (e.g., 2, 3, 4, 5) nuclear targeting sequences, for example a nuclear localization sequence (NLS). In some embodiments, the NLS is a bipartite NLS. In some embodiments, an NLS facilitates the import of a protein comprising an NLS into the cell nucleus. In some embodiments, the NLS is fused to the N-terminus of a gene modifying polypeptide as described herein. In some embodiments, the NLS is fused to the C-terminus of the gene modifying polypeptide. In some embodiments, the NLS is fused to the N-terminus or the C-terminus of a Cas domain. In some embodiments, a linker sequence is disposed between the NLS and the neighboring domain of the gene modifying polypeptide.

[0204] In some embodiments, an NLS comprises the amino acid sequence MDSLLMNRRKFLYQFKNVRWAKGRRETYLC (SEQ ID NO: 4009), PKKRKVEGADKRTADGSEFESPKKKRKV (SEQ ID NO: 4010), RKSGKIAAIWKRPRKPKKKRKV (SEQ ID NO: 4011) KRTADGSEFESPKKKRKV (SEQ ID NO: 4642), KKTELQTTNAENKTKKL (SEQ ID NO: 4643), or KRGINDRNFWRGENGRKTR (SEQ ID NO: 4644), KRPAATKKAGQAKKKK (SEQ ID NO: 4645), or a functional fragment or variant thereof. Exemplary NLS sequences are also described in PCT/EP2000/011690, the contents of which are incorporated herein by reference for their disclosure of exemplary nuclear localization sequences. In some embodiments, an NLS comprises an amino acid sequence as disclosed in Table 7. An NLS of this table may be utilized with one or more copies in a polypeptide in one or more locations in a polypeptide, e.g., 1, 2, 3 or more copies of an NLS in an N-terminal domain, between peptide domains, in a C-terminal domain, or in a combination of locations, in order to improve subcellular localization to the nucleus. Multiple unique sequences may be used within a single polypeptide. Sequences may be naturally monopartite or bipartite, e.g., having one or two stretches of basic amino acids, or may be used as chimeric bipartite sequences. Sequence references correspond to UniProt accession numbers, except where indicated as SeqNLS for sequences mined using a subcellular localization prediction algorithm (Lin et al BMC Bioinformat 13:157 (2012), incorporated herein by reference in its entirety).

TABLE 7
Exemplary nuclear localization signals for use in gene modifying systems

| Sequence | Sequence References | SEQ ID No. |
|---|---|---|
| AHFKISGEKRPSTDPGKKAKNPKKKKKKDP | Q76IQ7 | 4223 |
| AHRAKKMSKTHA | P21827 | 4224 |
| ASPEYVNLPINGNG | SeqNLS | 4225 |
| CTKRPRW | O88622, Q86W56, Q9QYM2, O02776 | 4226 |
| DKAKRVSRNKSEKKRR | O15516, Q5RAK8, Q91YB2, Q91YB0, Q8QGQ6, O08785, | 4227 |
| | Q9WVS9, Q6YGZ4 | |
| EELRLKEELLKGIYA | Q9QY16, Q9UHL0, Q2TBP1, Q9QY15 | 4228 |
| EEQLRRRKNSRLNNTG | G5EFF5 | 4229 |
| EVLKVIRTGKRKKKAWKRMVTKVC | SeqNLS | 4230 |
| HHHHHHHHHHHQPH | Q63934, G3V7L5, Q12837 | 4231 |
| HKKKHPDASVNFSEFSK | P10103, Q4R844, P12682, B0CM99, A9RA84, Q6YKA4, | 4232 |
| | P09429, P63159, Q08IE6, P63158, Q9YH06, B1MTB0 | |
| HKRTKK | Q2R2D5 | 4233 |
| IINGRKLKLKKSRRRSSQTSNNSFTSRRS | SeqNLS | 4234 |
| KAEQERRK | Q8LH59 | 4235 |
| KEKRKRREELFIEQKKRK | SeqNLS | 4236 |
| KKGKDEWFSRGKKP | P30999 | 4237 |
| KKGPSVQKRKKT | Q6ZN17 | 4238 |
| KKKTVINDLLHYKKEK | SeqNLS, P32354 | 4239 |
| KKNGGKGKNKPSAKIKK | SeqNLS | 4240 |
| KKPKWDDFKKKKK | Q15397, Q8BKS9, Q562C7 | 4241 |
| KKRKKD | SeqNLS, Q91Z62, Q1A730, Q969P5, Q2KHT6, Q9CPU7 | 4242 |
| KKRRKRRRK | SeqNLS | 4243 |
| KKRRRRARK | Q9UMS6, D4A702, Q91YE8 | 4244 |
| KKSKRGR | Q9UBS0 | 4245 |
| KKSRKRGS | B4FG96 | 4246 |
| KKSTALSRELGKIMRRR | SeqNLS, P32354 | 4247 |
| KKSYQDPEIIAHSRPRK | Q9U7C9 | 4248 |
| KKTGKNRKLKSKRVKTR | Q9Z301, 054943, Q8K3T2 | 4249 |
| KKVSIAGQSGKLWRWKR | Q6YUL8 | 4250 |
| KKYENVVIKRSPRKRGRPRK | SeqNLS | 4251 |
| KNKKRK | SeqNLS | 4252 |
| KPKKKR | SeqNLS | 4253 |
| KRAMKDDSHGNSTSPKRRK | QUE671 | 4254 |
| KRANSNLVAAYEKAKKK | P23508 | 4255 |
| KRASEDTTSGSPPKKSSAGPKR | Q9BZZ5, Q5R644 | 4256 |
| KRFKRRWMVRKMKTKK | SeqNLS | 4257 |
| KRGLNSSFETSPKKVK | Q8IV63 | 4258 |
| KRGNSSIGPNDLSKRKQRKK | SeqNLS | 4259 |
| KRIHSVSLSQSQIDPSKKVKRAK | SeqNLS | 4260 |
| KRKGKLKNKGSKRKK | O15381 | 4261 |
| KRRRRRRREKRKR | Q96GM8 | 4262 |
| KRSNDRTYSPEEEKQRRA | Q91ZF2 | 4263 |
| KRTVATNGDASGAHRAKKMSK | SeqNLS | 4264 |
| KRVYNKGEDEQEHLPKGKKR | SeqNLS | 4265 |
| KSGKAPRRRAVSMDNSNK | Q9WVH4, O43524 | 4266 |
| KVNFLDMSLDDIIIYKELE | Q9P127 | 4267 |
| KVQHRIAKKTTRRRR | Q9DXE6 | 4268 |
| LSPSLSPL | Q9Y261, P32182, P35583 | 4269 |
| MDSLLMNRRKFLYQFKNVRWAKGRRETYLC | Q9GZX7 | 4270 |
| MPQNEYIELHRKRYGYRLDYHEKKRKKESRE | SeqNLS | 4271 |
| AHERSKKAKKMIGLKAKLYHK | | |
| MVQLRPRASR | SeqNLS | 4272 |
| NNKLLAKRRKGGASPKDDPMDDIK | Q965G5 | 4273 |
| NYKRPMDGTYGPPAKRHEGE | O14497, A2BH40 | 4274 |
| PDTKRAKLDSSETTMVKKK | SeqNLS | 4275 |
| PEKRTKI | SeqNLS | 4276 |
| PGGRGKKK | Q719N1, Q9UBP0, A2VDN5 | 4277 |
| PGKMDKGEHRQERRDRPY | Q01844, Q61545 | 4278 |
| PKKGDKYDKTD | Q45FA5 | 4279 |
| PKKKSRK | O35914, Q01954 | 4280 |
| PKKNKPE | Q22663 | 4281 |
| PKKRAKV | P04295, P89438 | 4282 |
| PKPKKLKVE | P55263, P55262, P55264, Q64640 | 4283 |
| PKRGRGR | Q9FYS5, Q43386 | 4284 |
| PKRRLVDDA | P0C797 | 4285 |
| PKRRRTY | SeqNLS | 4286 |
| PLFKRR | A8X6H4, Q9TXJ0 | 4287 |
| PLRKAKR | Q86WB0, Q5R8V9 | 4288 |
| PPAKRKCIF | Q6AZ28, O75928, Q8C5D8 | 4289 |
| PPARRRRL | Q8NAG6 | 4290 |
| PPKKKRKV | Q3L6L5, P03070, P14999, P03071 | 4291 |
| PPNKRMKVKH | Q8BN78 | 4292 |
| PPRIYPQLPSAPT | P0C799 | 4293 |
| PQRSPFPKSSVKR | SeqNLS | 4294 |
| PRPRKVPR | P0C799 | 4295 |
| PRRRVQRKR | SeqNLS, Q5R448, Q5TAQ9 | 4296 |
| PRRVRLK | Q58DJ0, P56477, Q13568 | 4297 |
| PSRKRPR | Q62315, Q5F363, Q92833 | 4298 |
| PSSKKRKV | SeqNLS | 4299 |
| PTKKRVK | P07664 | 4300 |
| QRPGPYDRP | SeqNLS | 4301 |
| RGKGGKGLGKGGAKRHRK | SeqNLS | 4302 |
| RKAGKGGGGHKTTKKRSAKDEKVP | B4FG96 | 4303 |
| RKIKLKRAK | A1L3G9 | 4304 |
| RKIKRKRAK | B9X187 | 4305 |
| RKKEAPGPREELRSRGR | O35126, P54258, Q5IS70, P54259 | 4306 |
| RKKRKGK | SeqNLS, Q29243, Q62165, Q28685, O18738, Q9TSZ6, | 4307 |
| | Q14118 | |
| RKKRRQRRR | P04326, P69697, P69698, P05907, P20879, P04613, | 4308 |
| | P19553, P0C1J9, P20893, P12506, P04612, Q73370, | |
| | P0C1K0, P05906, P35965, P04609, P04610, P04614, | |
| | P04608, P05905 | |
| RKKSIPLSIKNLKRKHKRKKNKITR | Q9C0C9 | 4309 |
| RKLVKPKNTKMKTKLRTNPY | Q14190 | 4310 |
| RKRLILSDKGQLDWKK | SeqNLS, Q91Z62, Q1A730, Q2KHT6, Q9CPU7 | 4311 |
| RKRLKSK | Q13309 | 4312 |
| RKRRVRDNM | Q8QPH4, Q809M7, A8C8X1, Q2VNC5, Q38SQ0, 089749, | 4313 |
| | Q6DNQ9, Q809L9, Q0A429, Q20NV3, P16509, P16505, | |
| | Q6DNQ5, P16506, Q6XT06, P26118, Q2ICQ2, Q2RCG8, | |
| | Q0A2D0, Q0A2H9, Q9IQ46, Q809M3, Q6J847, Q6J856, | |
| | B4URE4, A4GCM7, Q0A440, P26120, P16511, | |
| RKRSPKDKKEKDLDGAGKRRKT | Q7RTP6 | 4314 |
| RKRTPRVDGQTGENDMNKRRRK | O94851 | 4315 |
| RLPVRRRRRR | P04499, P12541, P03269, P48313, P03270 | 4316 |
| RLRFRKPKSK | P69469 | 4317 |
| RQQRKR | Q14980 | 4318 |
| RRDLNSSFETSPKKVK | Q8K3G5 | 4319 |
| RRDRAKLR | Q9SLB8 | 4320 |
| RRGDGRRR | Q80WE1, Q5R9B4, Q06787, P35922 | 4321 |
| RRGRKRKAEKQ | Q812D1, Q5XXA9, Q99JF8, Q8MJG1, Q66T72, O75475 | 4322 |
| RRKKRR | Q0VD86, Q58DS6, Q5R6G2, Q9ERI5, Q6AYK2, Q6NYC1 | 4323 |
| RRKRSKSEDMDSVESKRRR | Q7TT18 | 4324 |
| RRKRSR | Q99PU7, D3ZHS6, Q92560, A2VDM8 | 4325 |
| RRPKGKTLQKRKPK | Q6ZN17 | 4326 |
| RRRGFERFGPDNMGRKRK | Q63014, Q9DBR0 | 4327 |
| RRRGKNKVAAQNCRK | SeqNLS | 4328 |
| RRRKRR | Q5FVH8, Q6MZT1, Q08DH5, Q8BQP9 | 4329 |
| RRRQKQKGGASRRR | SeqNLS | 4330 |
| RRRREGPRARRRR | P08313, P10231 | 4331 |
| RRTIRLKLVYDKCDRSCKIQKKNRNKCQYCR | SeqNLS | 4332 |
| FHKCLSVGMSHNAIRFGRMPRSEKAKLKAE | | |
| RRVPQRKEVSRCRKCRK | Q5RJN4, Q32L09, Q8CAK3, Q9NUL5 | 4333 |
| RVGGRRQAVECIEDLLNEPGQPLDLSCKRPR | P03255 | 4334 |
| P | | |
| RVVKLRIAP | P52639, Q8JMN0 | 4335 |
| RVVRRR | P70278 | 4336 |
| SKRKTKISRKTR | Q5RAY1, O00443 | 4337 |
| SYVKTVPNRTRTYIKL | P21935 | 4338 |
| TGKNEAKKRKIA | P52739, Q8K3J5, Q5RAU9 | 4339 |
| TLSPASSPSSVSCPVIPASTDESPGSALNI | SeqNLS | 4340 |
| VSKKQRTGKKIH | P52739, Q8K3J5, Q5RAU9 | 4341 |
| SPKKKRKVE | | 4342 |
| KRTAD GSEFE SPKKKRKVE | | 4343 |
| PAAKRVKLD | | 4344 |
| PKKKRKV | | 4345 |
| MDSLLMNRRKFLYQFKNVRWAKGRRETYLC | | 4346 |
| SPKKKRKVEAS | | 4347 |
| MAPKKKRKVGIHRGVP | | 4348 |

[0205] In some embodiments, the NLS is a bipartite NLS. A bipartite NLS typically comprises two basic amino acid clusters separated by a spacer sequence (which may be, e.g., about 10 amino acids in length). A monopartite NLS typically lacks a spacer. An example of a bipartite NLS is the nucleoplasmin NLS, having the sequence KR[PAATKKAGQA]KKKK (SEQ ID NO: 4645), wherein the spacer is bracketed. Another exemplary bipartite NLS has the sequence PKKKRKVEGADKRTADGSEFESPKKKRKV (SEQ ID NO: 4016). Exemplary NLSs are described in International Application WO2020051561, which is herein incorporated by reference in its entirety, including for its disclosures regarding nuclear localization sequences.

[0206] In certain embodiments, a gene editor system polypeptide (e.g., a gene modifying polypeptide as described herein) further comprises an intracellular localization sequence, e.g., a nuclear localization sequence and/or a nucleolar localization sequence. The nuclear localization sequence and/or nucleolar localization sequence may be amino acid sequences that promote the import of the protein into the nucleus and/or nucleolus, where it can promote integration of heterologous sequence into the genome. In certain embodiments, a gene editor system polypeptide (e.g., (e.g., a gene modifying polypeptide as described herein) further comprises a nucleolar localization sequence. In certain embodiments, the gene modifying polypeptide is encoded on a first RNA, and the template RNA is a second, separate, RNA, and the nucleolar localization signal is encoded on the RNA encoding the gene modifying polypeptide and not on the template RNA. In some embodiments, the nucleolar localization signal is located at the N-terminus, C-terminus, or in an internal region of the polypeptide. In some embodiments, a plurality of the same or different nucleolar localization signals are used. In some embodiments, the nuclear localization signal is less than 5, 10, 25, 50, 75, or 100 amino acids in length. Various polypeptide nucleolar localization signals can be used. For example, Yang et al., Journal of Biomedical Science 22, 33 (2015), describe a nuclear localization signal that also functions as a nucleolar localization signal. In some embodiments, the nucleolar localization signal may also be a nuclear localization signal. In some embodiments, the nucleolar localization signal may overlap with a nuclear localization signal. In some embodiments, the nucleolar localization signal may comprise a stretch of basic residues. In some embodiments, the nucleolar localization signal may be rich in arginine and lysine residues. In some embodiments, the nucleolar localization signal may be derived from a protein that is enriched in the nucleolus. In some embodiments, the nucleolar localization signal may be derived from a protein enriched at ribosomal RNA loci. In some embodiments, the nucleolar localization signal may be derived from a protein that binds rRNA. In some embodiments, the nucleolar localization signal may be derived from MSP58. In some embodiments, the nucleolar localization signal may be a monopartite motif. In some embodiments, the nucleolar localization signal may be a bipartite motif. In some embodiments, the nucleolar localization signal may consist of a multiple monopartite or bipartite motifs. In some embodiments, the nucleolar localization signal may consist of a mix of monopartite and bipartite motifs. In some embodiments, the nucleolar localization signal may be a dual bipartite motif. In some embodiments, the nucleolar localization motif may be a KRASSQALGTIPKRRSSSRFIKRKK (SEQ ID NO: 4017). In some embodiments, the nucleolar localization signal may be derived from nuclear factor-KB-inducing kinase. In some embodiments, the nucleolar localization signal may be an RKKRKKK motif (SEQ ID NO: 4018) (described in Birbach et al., Journal of Cell Science, 117 (3615-3624), 2004).

### Evolved Variants of Gene Modifying Polypeptides and Systems

[0207] In some embodiments, the invention provides evolved variants of gene modifying polypeptides as described herein. Evolved variants can, in some embodiments, be produced by mutagenizing a reference gene modifying polypeptide, or one of the fragments or domains comprised therein. In some embodiments, one or more of the domains (e.g., the reverse transcriptase domain) is evolved. One or more of such evolved variant domains can, in some embodiments, be evolved alone or together with other domains. An evolved variant domain or domains may, in some embodiments, be combined with unevolved cognate component(s) or evolved variants of the cognate component(s), e.g., which may have been evolved in either a parallel or serial manner.

[0208] In some embodiments, the process of mutagenizing a reference gene modifying polypeptide, or fragment or domain thereof, comprises mutagenizing the reference gene modifying polypeptide or fragment or domain thereof. In embodiments, the mutagenesis comprises a continuous evolution method (e.g., PACE) or non-continuous evolution method (e.g., PANCE), e.g., as described herein. In some embodiments, the evolved gene modifying polypeptide, or a fragment or domain thereof, comprises one or more amino acid variations introduced into its amino acid sequence relative to the amino acid sequence of the reference gene modifying polypeptide, or fragment or domain thereof. In embodiments, amino acid sequence variations may include one or more mutated residues (e.g., conservative substitutions, non-conservative substitutions, or a combination thereof) within the amino acid sequence of a reference gene modifying polypeptide, e.g., as a result of a change in the nucleotide sequence encoding the gene modifying polypeptide that results in, e.g., a change in the codon at any particular position in the coding sequence, the deletion of one or more amino acids (e.g., a truncated protein), the insertion of one or more amino acids, or any combination of the foregoing. The evolved variant gene modifying polypeptide may include variants in one or more components or domains of the gene modifying polypeptide (e.g., variants introduced into a reverse transcriptase domain).

[0209] In some aspects, the disclosure provides gene modifying polypeptides, systems, kits, and methods using or comprising an evolved variant of a gene modifying polypeptide, e.g., employs an evolved variant of a gene modifying polypeptide or a gene modifying polypeptide produced or producible by PACE or PANCE. In embodiments, the unevolved reference gene modifying polypeptide is a gene modifying polypeptide as disclosed herein.

[0210] The term “phage-assisted continuous evolution (PACE),” as used herein, generally refers to continuous evolution that employs phage as viral vectors. Examples of PACE technology have been described, for example, in International PCT Application No. PCT/US 2009/056194, filed Sep. 8, 2009, published as WO 2010/028347 on Mar. 11, 2010; International PCT Application, PCT/US2011/066747, filed Dec. 22, 2011, published as WO 2012/088381 on Jun. 28, 2012; U.S. Pat. No. 9,023,594, issued May 5, 2015; U.S. Pat. No. 9,771,574, issued Sep. 26, 2017; U.S. Pat. No. 9,394,537, issued Jul. 19, 2016; International PCT Application, PCT/US2015/012022, filed Jan. 20, 2015, published as WO 2015/134121 on Sep. 11, 2015; U.S. Pat. No. 10,179,911, issued Jan. 15, 2019; and International PCT Application, PCT/US2016/027795, filed Apr. 15, 2016, published as WO 2016/168631 on Oct. 20, 2016, the entire contents of each of which are incorporated herein by reference.

[0211] The term “phage-assisted non-continuous evolution (PANCE),” as used herein, generally refers to non-continuous evolution that employs phage as viral vectors. Examples of PANCE technology have been described, for example, in Suzuki T. et al, Crystal structures reveal an elusive functional domain of pyrrolysyl-tRNA synthetase, Nat Chem Biol. 13 (12): 1261-1266 (2017), incorporated herein by reference in its entirety. Briefly, PANCE is a technique for rapid in vivo directed evolution using serial flask transfers of evolving selection phage (SP), which contain a gene of interest to be evolved, across fresh host cells (e.g., E. coli cells). Genes inside the host cell may be held constant while genes contained in the SP continuously evolve. Following phage growth, an aliquot of infected cells may be used to transfect a subsequent flask containing host E. coli. This process can be repeated and/or continued until the desired phenotype is evolved, e.g., for as many transfers as desired.

[0212] Methods of applying PACE and PANCE to gene modifying polypeptides may be readily appreciated by the skilled artisan by reference to, inter alia, the foregoing references. Additional exemplary methods for directing continuous evolution of genome-modifying proteins or systems, e.g., in a population of host cells, e.g., using phage particles, can be applied to generate evolved variants of gene modifying polypeptides, or fragments or subdomains thereof. Non-limiting examples of such methods are described in International PCT Application, PCT/US2009/056194, filed Sep. 8, 2009, published as WO 2010/028347 on Mar. 11, 2010; International PCT Application, PCT/US2011/066747, filed Dec. 22, 2011, published as WO 2012/088381 on Jun. 28, 2012; U.S. Pat. No. 9,023,594, issued May 5, 2015; U.S. Pat. No. 9,771,574, issued Sep. 26, 2017; U.S. Pat. No. 9,394,537, issued Jul. 19, 2016; International PCT Application, PCT/US2015/012022, filed Jan. 20, 2015, published as WO 2015/134121 on Sep. 11, 2015; U.S. Pat. No. 10,179,911, issued Jan. 15, 2019; International Application No. PCT/US2019/37216, filed Jun. 14, 2019, International Patent Publication WO 2019/023680, published Jan. 31, 2019, International PCT Application, PCT/US2016/027795, filed Apr. 15, 2016, published as WO 2016/168631 on Oct. 20, 2016, and International Patent Publication No. PCT/US2019/47996, filed Aug. 23, 2019, each of which is incorporated herein by reference in its entirety.

[0213] In some non-limiting illustrative embodiments, a method of evolution of a evolved variant gene modifying polypeptide, of a fragment or domain thereof, comprises: (a) contacting a population of host cells with a population of viral vectors comprising the gene of interest (the starting gene modifying polypeptide or fragment or domain thereof), wherein: (1) the host cell is amenable to infection by the viral vector; (2) the host cell expresses viral genes required for the generation of viral particles; (3) the expression of at least one viral gene required for the production of an infectious viral particle is dependent on a function of the gene of interest; and/or (4) the viral vector allows for expression of the protein in the host cell, and can be replicated and packaged into a viral particle by the host cell. In some embodiments, the method comprises (b) contacting the host cells with a mutagen, using host cells with mutations that elevate mutation rate (e.g., either by carrying a mutation plasmid or some genome modification—e.g., proofing-impaired DNA polymerase, SOS genes, such as UmuC, UmuD′, and/or RecA, which mutations, if plasmid-bound, may be under control of an inducible promoter), or a combination thereof. In some embodiments, the method comprises (c) incubating the population of host cells under conditions allowing for viral replication and the production of viral particles, wherein host cells are removed from the host cell population, and fresh, uninfected host cells are introduced into the population of host cells, thus replenishing the population of host cells and creating a flow of host cells. In some embodiments, the cells are incubated under conditions allowing for the gene of interest to acquire a mutation. In some embodiments, the method further comprises (d) isolating a mutated version of the viral vector, encoding an evolved gene product (e.g., an evolved variant gene modifying polypeptide, or fragment or domain thereof), from the population of host cells.

[0214] The skilled artisan will appreciate a variety of features employable within the above-described framework. For example, in some embodiments, the viral vector or the phage is a filamentous phage, for example, an M13 phage, e.g., an M13 selection phage. In certain embodiments, the gene required for the production of infectious viral particles is the M13 gene III (gIII). In embodiments, the phage may lack a functional gIII, but otherwise comprise gI, gII, gIV, gV, gVI, gVII, gVIII, gIX, and a gX. In some embodiments, the generation of infectious VSV particles involves the envelope protein VSV-G. Various embodiments can use different retroviral vectors, for example, Murine Leukemia Virus vectors, or Lentiviral vectors. In embodiments, the retroviral vectors can efficiently be packaged with VSV-G envelope protein, e.g., as a substitute for the native envelope protein of the virus.

[0215] In some embodiments, host cells are incubated according to a suitable number of viral life cycles, e.g., at least 10, at least 20, at least 30, at least 40, at least 50, at least 100, at least 200, at least 300, at least 400, at least, 500, at least 600, at least 700, at least 800, at least 900, at least 1000, at least 1250, at least 1500, at least 1750, at least 2000, at least 2500, at least 3000, at least 4000, at least 5000, at least 7500, at least 10000, or more consecutive viral life cycles, which in on illustrative and non-limiting examples of M13 phage is 10-20 minutes per virus life cycle. Similarly, conditions can be modulated to adjust the time a host cell remains in a population of host cells, e.g., about 10, about 11, about 12, about 13, about 14, about 15, about 16, about 17, about 18, about 19, about 20, about 21, about 22, about 23, about 24, about 25, about 30, about 35, about 40, about 45, about 50, about 55, about 60, about 70, about 80, about 90, about 100, about 120, about 150, or about 180 minutes. Host cell populations can be controlled in part by density of the host cells, or, in some embodiments, the host cell density in an inflow, e.g., 10³ cells/ml, about 10⁴ cells/ml, about 10⁵ cells/ml, about 5-10⁵ cells/ml, about 10⁶ cells/ml, about 5-10⁶ cells/ml, about 10⁷ cells/ml, about 5-10⁷ cells/ml, about 10⁸ cells/ml, about 5-10⁸ cells/ml, about 10⁹ cells/ml, about 5·10⁹ cells/ml, about 10¹⁰ cells/ml, or about 5·10¹⁰ cells/ml.

### Inteins

[0216] In some embodiments, as described in more detail below, an intein-N (intN) domain may be fused to the N-terminal portion of a first domain of a gene modifying polypeptide described herein, and an intein-C (intC) domain may be fused to the C-terminal portion of a second domain of a gene modifying polypeptide described herein for the joining of the N-terminal portion to the C-terminal portion, thereby joining the first and second domains. In some embodiments, the first and second domains are each independently chosen from a DNA binding domain, an RNA binding domain, an RT domain, and an endonuclease domain.

[0217] Inteins can occur as self-splicing protein intron (e.g., peptide), e.g., which ligates flanking N-terminal and C-terminal exteins (e.g., fragments to be joined). An intein may, in some instances, comprise a fragment of a protein that is able to excise itself and join the remaining fragments (the exteins) with a peptide bond in a process known as protein splicing. Inteins are also referred to as “protein introns.” The process of an intein excising itself and joining the remaining portions of the protein is herein termed “protein splicing” or “intein-mediated protein splicing.”

[0218] In some embodiments, an intein of a precursor protein (an intein containing protein prior to intein-mediated protein splicing) comes from two genes. Such intein is referred to herein as a split intein (e.g., split intein-N and split intein-C). Accordingly, an intein-based approach may be used to join a first polypeptide sequence and a second polypeptide sequence together. For example, in cyanobacteria, DnaE, the catalytic subunit a of DNA polymerase III, is encoded by two separate genes, dnaE-n and dnaE-c. An intein-N domain, such as that encoded by the dnaE-n gene, when situated as part of a first polypeptide sequence, may join the first polypeptide sequence with a second polypeptide sequence, wherein the second polypeptide sequence comprises an intein-C domain, such as that encoded by the dnaE-c gene. Accordingly, in some embodiments, a protein can be made by providing nucleic acid encoding the first and second polypeptide sequences (e.g., wherein a first nucleic acid molecule encodes the first polypeptide sequence and a second nucleic acid molecule encodes the second polypeptide sequence), and the nucleic acid is introduced into the cell under conditions that allow for production of the first and second polypeptide sequences, and for joining of the first to the second polypeptide sequence via an intein-based mechanism.

[0219] Use of inteins for joining heterologous protein fragments is described, for example, in Wood et al., J. Biol. Chem. 289 (21); 14512-9 (2014) (incorporated herein by reference in its entirety). For example, when fused to separate protein fragments, the inteins IntN and IntC may recognize each other, splice themselves out, and/or simultaneously ligate the flanking N- and C-terminal exteins of the protein fragments to which they were fused, thereby reconstituting a full-length protein from the two protein fragments.

[0220] In some embodiments, a synthetic intein based on the dnaE intein, the Cfa-N (e.g., split intein-N) and Cfa-C (e.g., split intein-C) intein pair, is used. Examples of such inteins have been described, e.g., in Stevens et al., J Am Chem Soc. 2016 Feb. 24; 138 (7): 2162-5 (incorporated herein by reference in its entirety). Non-limiting examples of intein pairs that may be used in accordance with the present disclosure include: Cfa DnaE intein, Ssp GyrB intein, Ssp DnaX intein, Ter DnaE3 intein, Ter ThyX intein, Rma DnaB intein and Cne Prp8 intein (e.g., as described in U.S. Pat. No. 8,394,604, incorporated herein by reference.

[0221] In some embodiments involving a split Cas9, an intein-N domain and an intein-C domain may be fused to the N-terminal portion of the split Cas9 and the C-terminal portion of a split Cas9, respectively, for the joining of the N-terminal portion of the split Cas9 and the C-terminal portion of the split Cas9. For example, in some embodiments, an intein-N is fused to the C-terminus of the N-terminal portion of the split Cas9, i.e., to form a structure of N—[N-terminal portion of the split Cas9]-[intein-N]˜C. In some embodiments, an intein-C is fused to the N-terminus of the C-terminal portion of the split Cas9, i.e., to form a structure of N-[intein-C]˜ [C-terminal portion of the split Cas9]-C. The mechanism of intein-mediated protein splicing for joining the proteins the inteins are fused to (e.g., split Cas9) is described in Shah et al., Chem Sci. 2014; 5 (1): 446-461, incorporated herein by reference. Methods for designing and using inteins are known in the art and described, for example by WO2020051561, WO2014004336, WO2017132580, US20150344549, and US20180127780, each of which is incorporated herein by reference in their entirety.

[0222] In some embodiments, a split refers to a division into two or more fragments. In some embodiments, a split Cas9 protein or split Cas9 comprises a Cas9 protein that is provided as an N-terminal fragment and a C-terminal fragment encoded by two separate nucleotide sequences. The polypeptides corresponding to the N-terminal portion and the C-terminal portion of the Cas9 protein may be spliced to form a reconstituted Cas9 protein. In embodiments, the Cas9 protein is divided into two fragments within a disordered region of the protein, e.g., as described in Nishimasu et al., Cell, Volume 156, Issue 5, pp. 935-949, 2014, or as described in Jiang et al. (2016) Science 351:867-871 and PDB file: 5F9R (each of which is incorporated herein by reference in its entirety). A disordered region may be determined by one or more protein structure determination techniques known in the art, including, without limitation, X-ray crystallography, NMR spectroscopy, electron microscopy (e.g., cryoEM), and/or in silico protein modeling. In some embodiments, the protein is divided into two fragments at any C, T, A, or S, e.g., within a region of SpCas9 between amino acids A292-G364, F445-K483, or E565-T637, or at corresponding positions in any other Cas9, Cas9 variant (e.g., nCas9, dCas9), or other napDNAbp. In some embodiments, protein is divided into two fragments at SpCas9 T310, T313, A456, S469, or C574. In some embodiments, the process of dividing the protein into two fragments is referred to as splitting the protein.

[0223] In some embodiments, a protein fragment ranges from about 2-1000 amino acids (e.g., between 2-10, 10-50, 50-100, 100-200, 200-300, 300-400, 400-500, 500-600, 600-700, 700-800, 800-900, or 900-1000 amino acids) in length. In some embodiments, a protein fragment ranges from about 5-500 amino acids (e.g., between 5-10, 10-50, 50-100, 100-200, 200-300, 300-400, or 400-500 amino acids) in length. In some embodiments, a protein fragment ranges from about 20-200 amino acids (e.g., between 20-30, 30-40, 40-50, 50-100, or 100-200 amino acids) in length.

[0224] In some embodiments, a portion or fragment of a gene modifying polypeptide is fused to an intein. The nuclease can be fused to the N-terminus or the C-terminus of the intein. In some embodiments, a portion or fragment of a fusion protein is fused to an intein and fused to an AAV capsid protein. The intein, nuclease and capsid protein can be fused together in any arrangement (e.g., nuclease-intein-capsid, intein-nuclease-capsid, capsid-intein-nuclease, etc.). In some embodiments, the N-terminus of an intein is fused to the C-terminus of a fusion protein and the C-terminus of the intein is fused to the N-terminus of an AAV capsid protein.

[0225] In some embodiments, an endonuclease domain (e.g., a nickase Cas9 domain) is fused to intein-N and a polypeptide comprising an RT domain is fused to an intein-C.

[0226] Exemplary nucleotide and amino acid sequences of intein-N domains and compatible intein-C domains are provided below:

DnaE Intein-N DNA:
(SEQ ID NO: 4029)
TGCCTGTCATACGAAACCGAGATACTGACAGTAGAATATGGCCTTCTGCCAATCGGG
AAGATTGTGGAGAAACGGATAGAATGCACAGTTTACTCTGTCGATAACAATGGTAA
CATTTATACTCAGCCAGTTGCCCAGTGGCACGACCGGGGAGAGCAGGAAGTATTCG
AATACTGTCTGGAGGATGGAAGTCTCATTAGGGCCACTAAGGACCACAAATTTATG
ACAGTCGATGGCCAGATGCTGCCTATAGACGAAATCTTTGAGCGAGAGTTGGACCTC
ATGCGAGTTGACAACCTTCCTAAT
DnaE Intein-N Protein:
(SEQ ID NO: 4030)
CLSYETEILTVEYGLLPIGKIVEKRIECTVYSVDNNGNIYTQPVAQWHDRGEQEVFEYCL
EDGSLIRATKDHKFMTVDGQMLPIDEIFERELDLMRVDNLPN
DnaE Intein-C DNA:
(SEQ ID NO: 4031)
ATGATCAAGATAGCTACAAGGAAGTATCTTGGCAAACAAAACGTTTATGATATTGG
AGTCGAAAGAGATCACAACTTTGCTCTGAAGAACGGATTCATAGCTTCTAAT
DnaE Intein-C Protein:
(SEQ ID NO: 4032)
MIKIATRKYLGKQNVYDIGVERDHNFALKNGFIASN
Cfa-N DNA:
(SEQ ID NO: 4033)
TGCCTGTCTTATGATACCGAGATACTTACCGTTGAATATGGCTTCTTGCCTATTGGAA
AGATTGTCGAAGAGAGAATTGAATGCACAGTATATACTGTAGACAAGAATGGTTTC
GTTTACACACAGCCCATTGCTCAATGGCACAATCGCGGCGAACAAGAAGTATTTGA
GTACTGTCTCGAGGATGGAAGCATCATACGAGCAACTAAAGATCATAAATTCATGA
CCACTGACGGGCAGATGTTGCCAATAGATGAGATATTCGAGCGGGGCTTGGATCTC
AAACAAGTGGATGGATTG CCA
Cfa-N Protein:
(SEQ ID NO: 4034)
CLSYDTEILTVEYGFLPIGKIVEERIECTVYTVDKNGFVYTQPIAQWHNRGEQEVFEYCL
EDGSIIRATKDHKFMTTDGQMLPIDEIFERGLDLKQVDGLP
Cfa-C DNA:
(SEQ ID NO: 4035)
ATGAAGAGGACTGCCGATGGATCAGAGTTTGAATCTCCCAAGAAGAAGAGGAAAGT
AAAGATAATATCTCGAAAAAGTCTTGGTACCCAAAATGTCTATGATATTGGAGTGGA
GAAAGATCACAACTTCCTTCTCAAGAACGGTCTCGTAGCCAGCAAC
Cfa-C Protein:
(SEQ ID NO: 4036)
MKRTADGSEFESPKKKRKVKIISRKSLGTQNVYDIGVEKDHNFLLKNGLVASN

### Additional Domains

[0227] The gene modifying polypeptide can bind a target DNA sequence and template nucleic acid (e.g., template RNA), nick the target site, and write (e.g., reverse transcribe) the template into DNA, resulting in a modification of the target site. In some embodiments, additional domains may be added to the polypeptide to enhance the efficiency of the process. In some embodiments, the gene modifying polypeptide may contain an additional DNA ligation domain to join reverse transcribed DNA to the DNA of the target site. In some embodiments, the polypeptide may comprise a heterologous RNA-binding domain. In some embodiments, the polypeptide may comprise a domain having 5′ to 3′ exonuclease activity (e.g., wherein the 5′ to 3′ exonuclease activity increases repair of the alteration of the target site, e.g., in favor of alteration over the original genomic sequence). In some embodiments, the polypeptide may comprise a domain having 3′ to 5′ exonuclease activity, e.g., proof-reading activity. In some embodiments, the writing domain, e.g., RT domain, has 3′ to 5′ exonuclease activity, e.g., proof-reading activity.

### Template Nucleic Acids

[0228] The gene modifying systems described herein can modify a host target DNA site using a template nucleic acid sequence. In some embodiments, the gene modifying systems described herein transcribe an RNA sequence template into host target DNA sites by target-primed reverse transcription (TPRT). By modifying DNA sequence(s) via reverse transcription of the RNA sequence template directly into the host genome, the gene modifying system can insert an object sequence into a target genome without the need for exogenous DNA sequences to be introduced into the host cell (unlike, for example, CRISPR systems), as well as eliminate an exogenous DNA insertion step. The gene modifying system can also delete a sequence from the target genome or introduce a substitution using an object sequence. Therefore, the gene modifying system provides a platform for the use of customized RNA sequence templates containing object sequences, e.g., sequences comprising heterologous gene coding and/or function information.

[0229] In some embodiments, the template nucleic acid comprises one or more sequence (e.g., 2 sequences) that binds the gene modifying polypeptide.

[0230] In some embodiments, the template nucleic acid comprises a hybrid having both ribonucleotide and deoxyribonucleotide residues in the same strand.

[0231] In some embodiments a system or method described herein comprises a single template nucleic acid (e.g., template RNA). In some embodiments a system or method described herein comprises a plurality of template nucleic acids (e.g., template RNAs). For example, a system described herein comprises a first RNA comprising (e.g., from 5′ to 3′) a sequence that binds the gene modifying polypeptide (e.g., the DNA-binding domain and/or the endonuclease domain, e.g., a gRNA) and a sequence that binds a target site (e.g., a second strand of a site in a target genome), and a second RNA (e.g., a template RNA) comprising (e.g., from 5′ to 3′) optionally a sequence that binds the gene modifying polypeptide (e.g., that specifically binds the RT domain), a heterologous object sequence, and a PBS sequence. In some embodiments, when the system comprises a plurality of nucleic acids, each nucleic acid comprises a conjugating domain. In some embodiments, a conjugating domain enables association of nucleic acid molecules, e.g., by hybridization of complementary sequences. For example, in some embodiments a first RNA comprises a first conjugating domain and a second RNA comprises a second conjugating domain, and the first and second conjugating domains are capable of hybridizing to one another, e.g., under stringent conditions. In some embodiments, the stringent conditions for hybridization include hybridization in 4× sodium chloride/sodium citrate (SSC), at about 65 C, followed by a wash in 1×SSC, at about 65 C.

[0232] In some embodiments, the template nucleic acid comprises RNA. In some embodiments, the template nucleic acid comprises DNA (e.g., single stranded or double stranded DNA). In some embodiments, the template nucleic acid comprises a hybrid having both ribonucleotide and deoxyribonucleotide residues in the same strand.

[0233] In some embodiments, the template nucleic acid comprises one or more (e.g., 2) homology domains that have homology to the target sequence. In some embodiments, the homology domains are about 10-20, 20-50, or 50-100 nucleotides in length.

[0234] In some embodiments, a template RNA can comprise a gRNA sequence, e.g., to direct the gene modifying polypeptide to a target site of interest. In some embodiments, a template RNA comprises (e.g., from 5′ to 3′) (i) optionally a gRNA spacer that binds a target site (e.g., a second strand of a site in a target genome), (ii) optionally a gRNA scaffold that binds a polypeptide described herein (e.g., a gene modifying polypeptide or a Cas polypeptide), (iii) a heterologous object sequence comprising a mutation region (optionally the heterologous object sequence comprises, from 5′ to 3′, a first homology region, a mutation region, and a second homology region), and (iv) a primer binding site (PBS) sequence comprising a 3′ target homology domain.

[0235] The template nucleic acid (e.g., template RNA) component of a genome editing system described herein typically is able to bind the gene modifying polypeptide of the system. In some embodiments the template nucleic acid (e.g., template RNA) has a 3′ region that is capable of binding a gene modifying polypeptide. The binding region, e.g., 3′ region, may be a structured RNA region, e.g., having at least 1, 2 or 3 hairpin loops, capable of binding the gene modifying polypeptide of the system. The binding region may associate the template nucleic acid (e.g., template RNA) with any of the polypeptide modules. In some embodiments, the binding region of the template nucleic acid (e.g., template RNA) may associate with an RNA-binding domain in the polypeptide. In some embodiments, the binding region of the template nucleic acid (e.g., template RNA) may associate with the reverse transcription domain of the gene modifying polypeptide (e.g., specifically bind to the RT domain). In some embodiments, the template nucleic acid (e.g., template RNA) may associate with the DNA binding domain of the polypeptide, e.g., a gRNA associating with a Cas9-derived DNA binding domain. In some embodiments, the binding region may also provide DNA target recognition, e.g., a gRNA hybridizing to the target DNA sequence and binding the polypeptide, e.g., a Cas9 domain. In some embodiments, the template nucleic acid (e.g., template RNA) may associate with multiple components of the polypeptide, e.g., DNA binding domain and reverse transcription domain.

[0236] In some embodiments the template RNA has a poly-A tail at the 3′ end. In some embodiments the template RNA does not have a poly-A tail at the 3′ end.

[0237] In some embodiments, a template RNA may be customized to correct a given mutation in the genomic DNA of a target cell (e.g., ex vivo or in vivo, e.g., in a target tissue or organ, e.g., in a subject). For example, the mutation may be a disease-associated mutation relative to the wild-type sequence. Without wishing to be bound by theory, any given target site and edit will have a large number of possible template RNA molecules for use in a gene modifying system that will result in a range of editing efficiencies and fidelities. To partially reduce this screening burden, sets of empirical parameters help ensure optimal initial in silico designs of template RNAs or portions thereof. As a non-limiting illustrative example, for a selected mutation, the following design parameters may be employed. In some embodiments, design is initiated by acquiring approximately 500 bp (e.g., up to 50, 100, 150, 200, 250, 300, 350, 400, 450, 500, 550, 600, 650, or 700 bp, and optionally at least 20, 30, 40, 50, 100, 150, 200, 250, 300, 350, 400, 450, 500, 550, 600, or 650 bp) flanking sequence on either side of the mutation to serve as the target region. In some embodiments, a template nucleic acid comprises a gRNA. In some embodiments, a gRNA comprises a sequence (e.g., a CRISPR spacer) that binds a target site. In some embodiments, the sequence (e.g., a CRISPR spacer) that binds a target site for use in targeting a template nucleic acid to a target region is selected by considering the particular gene modifying polypeptide (e.g., endonuclease domain or writing domain, e.g., comprising a CRISPR/Cas domain) being used (e.g., for Cas9, a protospacer-adjacent motif (PAM) of NGG immediately 3′ of a 20 nucleotide gRNA binding region). In some embodiments, the CRISPR spacer is selected by ranking first by whether the PAM will be disrupted by the gene modifying system induced edit. In some embodiments, disruption of the PAM may increase edit efficiency. In some embodiments, the PAM can be disrupted by also introducing (e.g., as part of or in addition to another modification to a target site in genomic DNA) a silent mutation (e.g., a mutation that does not alter an amino acid residue encoded by the target nucleic acid sequence, if any) in the target site during gene modification. In some embodiments, the CRISPR spacer is selected by ranking sequences by the proximity of their corresponding genomic site to the desired edit location. In some embodiments, the gRNA comprises a gRNA scaffold. In some embodiments, the gRNA scaffold used may be a standard scaffold (e.g., for Cas9, 5′-GTTTTAGAGCTAGAAATAGCAAGTTAAAATAAGGCTAGTCCGTTATCAACTTGAAAA AGTGGCACCGAGTCGGTGC-3′ (SEQ ID NO: 4595)), or may contain one or more nucleotide substitutions. In some embodiments, the heterologous object sequence has at least 90% identity, e.g., at least 90%, 95%, 98%, 99%, or 100% identity, or comprises no more than 1, 2, 3, 4, or 5 positions of non-identity to the target site 3′ of the first strand nick (e.g., immediately 3′ of the first strand nick or up to 1, 2, 3, 4, or 5 nucleotides 3′ of the first strand nick), with the exception of any insertion, substitution, or deletion that may be written into the target site by the gene modifying. In some embodiments, the 3′ target homology domain contains at least 90% identity, e.g., at least 90%, 95%, 98%, 99%, or 100% identity, or comprises no more than 1, 2, 3, 4, or 5 positions of non-identity to the target site 5′ of the first strand nick (e.g., immediately 5′ of the first strand nick or up to 1, 2, 3, 4, or 5 nucleotides 3′ of the first strand nick).

[0238] In some embodiments, the template nucleic acid is a template RNA. In some embodiments, the template RNA comprises one or more modified nucleotides. For example, in some embodiments, the template RNA comprises one or more deoxyribonucleotides. In some embodiments, regions of the template RNA are replaced by DNA nucleotides, e.g., to enhance stability of the molecule. For example, the 3′ end of the template may comprise DNA nucleotides, while the rest of the template comprises RNA nucleotides that can be reverse transcribed. For instance, in some embodiments, the heterologous object sequence is primarily or wholly made up of RNA nucleotides (e.g., at least 90%, 95%, 98%, or 99% RNA nucleotides). In some embodiments, the PBS sequence is primarily or wholly made up of DNA nucleotides (e.g., at least 90%, 95%, 98%, or 99% DNA nucleotides). In other embodiments, the heterologous object sequence for writing into the genome may comprise DNA nucleotides. In some embodiments, the DNA nucleotides in the template are copied into the genome by a domain capable of DNA-dependent DNA polymerase activity. In some embodiments, the DNA-dependent DNA polymerase activity is provided by a DNA polymerase domain in the polypeptide. In some embodiments, the DNA-dependent DNA polymerase activity is provided by a reverse transcriptase domain that is also capable of DNA-dependent DNA polymerization, e.g., second strand synthesis. In some embodiments, the template molecule is composed of only DNA nucleotides. In some embodiments, the template nucleic acid comprises a hybrid having both ribonucleotide and deoxyribonucleotide residues in the same strand.

[0239] In some embodiments, a system described herein comprises two nucleic acids which together comprise the sequences of a template RNA described herein. In some embodiments, the two nucleic acids are associated with each other non-covalently, e.g., directly associated with each other (e.g., via base pairing), or indirectly associated as part of a complex comprising one or more additional molecule.

[0240] A template RNA described herein may comprise, from 5′ to 3′: (1) a gRNA spacer; (2) a gRNA scaffold; (3) heterologous object sequence (4) a primer binding site (PBS) sequence. Each of these components is now described in more detail.

gRNA Spacer and gRNA Scaffold

[0241] A template RNA described herein may comprise a gRNA spacer that directs the gene modifying system to a target nucleic acid, and a gRNA scaffold that promotes association of the template RNA with the Cas domain of the gene modifying polypeptide. The systems described herein can also comprise a gRNA that is not part of a template nucleic acid. For example, a gRNA that comprises a gRNA spacer and gRNA scaffold, but not a heterologous object sequence or a PBS sequence, can be used, e.g., to induce second strand nicking, e.g., as described in the section herein entitled “Second Strand Nicking”.

[0242] In some embodiments, the gRNA is a short synthetic RNA composed of a scaffold sequence that participates in CRISPR-associated protein binding and a user-defined ˜20 nucleotide targeting sequence for a genomic target. The structure of a complete gRNA was described by Nishimasu et al. Cell 156, P935-949 (2014). The gRNA (also referred to as sgRNA for single-guide RNA) consists of crRNA- and tracrRNA-derived sequences connected by an artificial tetraloop. The crRNA sequence can be divided into guide (20 nt) and repeat (12 nt) regions, whereas the tracrRNA sequence can be divided into anti-repeat (14 nt) and three tracrRNA stem loops (Nishimasu et al. Cell 156, P935-949 (2014)). In practice, guide RNA sequences are generally designed to have a length of between 17-24 nucleotides (e.g., 19, 20, or 21 nucleotides) and be complementary to a targeted nucleic acid sequence. Custom gRNA generators and algorithms are available commercially for use in the design of effective guide RNAs. In some embodiments, the gRNA comprises two RNA components from the native CRISPR system, e.g. crRNA and tracrRNA. As is well known in the art, the gRNA may also comprise a chimeric, single guide RNA (sgRNA) containing sequence from both a tracrRNA (for binding the nuclease) and at least one crRNA (to guide the nuclease to the sequence targeted for editing/binding). Chemically modified sgRNAs have also been demonstrated to be effective for use with CRISPR-associated proteins; see, for example, Hendel et al. (2015) Nature Biotechnol., 985-991. In some embodiments, a gRNA spacer comprises a nucleic acid sequence that is complementary to a DNA sequence associated with a target gene.

[0243] In some embodiments, the region of the template nucleic acid, e.g., template RNA, comprising the gRNA adopts an underwound ribbon-like structure of gRNA bound to target DNA (e.g., as described in Mulepati et al. Science 19 Sep. 2014: Vol. 345, Issue 6203, pp. 1479-1484). Without wishing to be bound by theory, this non-canonical structure is thought to be facilitated by rotation of every sixth nucleotide out of the RNA-DNA hybrid. Thus, in some embodiments, the region of the template nucleic acid, e.g., template RNA, comprising the gRNA may tolerate increased mismatching with the target site at some interval, e.g., every sixth base. In some embodiments, the region of the template nucleic acid, e.g., template RNA, comprising the gRNA comprising homology to the target site may possess wobble positions at a regular interval, e.g., every sixth base, that do not need to base pair with the target site.

[0244] In some embodiments, the template nucleic acid (e.g., template RNA) has at least 15, 16, 17, 18, 19, 20, 21, 22, 23, or 24 bases of at least 80%, 85%, 90%, 95%, 99%, or 100% homology to the target site, e.g., at the 5′ end, e.g., comprising a gRNA spacer sequence of length appropriate to the Cas9 domain of the gene modifying polypeptide (Table 3).

[0245] In some embodiments, a Cas9 derivative with enhanced activity may be used in the gene modification polypeptide. In some embodiments, a Cas9 derivative may comprise mutations that improve activity of the HNH endonuclease domain, e.g., SpyCas9 R221K, N394K, or mutations that improve R-loop formation, e.g., SpyCas9 L1245V, or comprise a combination of such mutations, e.g., SpyCas9 R221K/N394K, SpyCas9 N394K/L1245V, SpyCas9 R221K/L1245V, or SpyCas9 R221K/N394K/L1245V (see, e.g., Spencer and Zhang Sci Rep 7:16836 (2017), the Cas9 derivatives and comprising mutations of which are incorporated herein by reference). In some embodiments, a Cas9 derivative may comprise one or more types of mutations described herein, e.g., PAM-modifying mutations, protein stabilizing mutations, activity enhancing mutations, and/or mutations partially or fully inactivating one or two endonuclease domains relative to the parental enzyme (e.g., one or more mutations to abolish endonuclease activity towards one or both strands of a target DNA, e.g., a nickase or catalytically dead enzyme). In some embodiments, a Cas9 enzyme used in a system described herein may comprise mutations that confer nickase activity toward the enzyme (e.g., SpyCas9 N863A or H840A) in addition to mutations improving catalytic efficiency (e.g., SpyCas9 R221K, N394K, and/or L1245V). In some embodiments, a Cas9 enzyme used in a system described herein is a SpyCas9 enzyme or derivative that further comprises an N863A mutation to confer nickase activity in addition to R221K and N394K mutations to improve catalytic efficiency.

[0246] Table 8 provides parameters to define components for designing gRNA and/or Template RNAs to apply Cas variants listed in Table 3 for gene modifying. The cut site indicates the validated or predicted protospacer adjacent motif (PAM) requirements, validated or predicted location of cut site (relative to the most upstream base of the PAM site). The gRNA for a given enzyme can be assembled by concatenating the crRNA, Tetraloop, and tracrRNA sequences, and further adding a 5′ spacer of a length within Spacer (min) and Spacer (max) that matches a protospacer at a target site. Further, the predicted location of the ssDNA nick at the target is important for designing a PBS sequence of a Template RNA that can anneal to the sequence immediately 5′ of the nick in order to initiate target primed reverse transcription. In some embodiments, a gRNA scaffold described herein comprises a nucleic acid sequence comprising, in the 5′ to 3′ direction, a crRNA of Table 8, a tetraloop from the same row of Table 8, and a tracrRNA from the same row of Table 8, or a sequence having at least 70%, 80%, 85%, 90%, 95%, or 99% identity thereto. In some embodiments, the gRNA or template RNA comprising the scaffold further comprises a gRNA spacer having a length within the Spacer (min) and Spacer (max) indicated in the same row of Table 8. In some embodiments, the gRNA or template RNA having a sequence according to Table 8 is comprised by a system that further comprises a gene modifying polypeptide, wherein the gene modifying polypeptide comprises a Cas domain described in the same row of Table 8.

TABLE 8
Parameters to define components for designing gRNA and/or Template RNAs to
apply Cas variants listed in Table 3 in gene modifying systems

| | | | | | | | SEQ | | | SEQ |
|---|---|---|---|---|---|---|---|---|---|---|
| | | | | Spacer | Spacer | | ID | Tetra- | | ID |
| Variant | PAM(s) | Cut | Tier | (min) | (max) | crRNA | NO: | loop | tracrRNA | NO: |
| Nme2Cas9 | NNNN | −3 | 1 | 22 | 24 | GTTGTA | 4596 | GAAA | CGAAATGAGAACCG | 4607 |
| | CC | | | | | GCTCCC | | | TTGCTACAATAAGGC | |
| | | | | | | TTTCTC | | | CGTCTGAAAAGATG | |
| | | | | | | ATTTCG | | | TGCCGCAACGCTCTG | |
| | | | | | | | | | CCCCTTAAAGCTTCT | |
| | | | | | | | | | GCTTTAAGGGGCAT | |
| | | | | | | | | | CGTTTA | |
| PpnCas9 | NNNN | | 1 | 21 | 24 | GTTGTA | 4597 | GAAA | GCGAAATGAAAAAC | 4608 |
| | RTT | | | | | GCTCCC | | | GTTGTTACAATAAGA | |
| | | | | | | TTTTTC | | | GATGAATTTCTCGCA | |
| | | | | | | ATTTCG | | | AAGCTCTGCCTCTTG | |
| | | | | | | C | | | AAATTTCGGTTTCAA | |
| | | | | | | | | | GAGGCATC | |
| SauCas9 | NNGRR; | −3 | 1 | 21 | 23 | GTTTTA | 4598 | GAAA | CAGAATCTACTAAAA | 4609 |
| | NNGR | | | | | GTACTC | | | CAAGGCAAAATGCC | |
| | RT | | | | | TG | | | GTGTTTATCTCGTCA | |
| | | | | | | | | | ACTTGTTGGCGAGA | |
| SauCas9-KKH | NNNRR; | −3 | 1 | 21 | 21 | GTTTTA | 4598 | GAAA | CAGAATCTACTAAAA | 4609 |
| | NNNR | | | | | GTACTC | | | CAAGGCAAAATGCC | |
| | RT | | | | | TG | | | GTGTTTATCTCGTCA | |
| | | | | | | | | | ACTTGTTGGCGAGA | |
| SauriCas9 | NNGG | −3 | 1 | 21 | 21 | GTTTTA | 4598 | GAAA | CAGAATCTACTAAAA | 4609 |
| | | | | | | GTACTC | | | CAAGGCAAAATGCC | |
| | | | | | | TG | | | GTGTTTATCTCGTCA | |
| | | | | | | | | | ACTTGTTGGCGAGA | |
| SauriCas9- | NNRG | −3 | 1 | 21 | 21 | GTTTTA | 4598 | GAAA | CAGAATCTACTAAAA | 4609 |
| KKH | | | | | | GTACTC | | | CAAGGCAAAATGCC | |
| | | | | | | TG | | | GTGTTTATCTCGTCA | |
| | | | | | | | | | ACTTGTTGGCGAGA | |
| ScaCas9- | NNG | −3 | 1 | 20 | 20 | GTTTTA | 4599 | GAAA | TAGCAAGTTAAAATA | 4610 |
| Sc++ | | | | | | GAGCTA | | | AGGCTAGTCCGTTAT | |
| | | | | | | | | | CAACTTGAAAAAGT | |
| | | | | | | | | | GGCACCGAGTCGGT | |
| | | | | | | | | | GC | |
| SpyCas9 | NGG | −3 | 1 | 20 | 20 | GTTTTA | 4599 | GAAA | TAGCAAGTTAAAATA | 4610 |
| | | | | | | GAGCTA | | | AGGCTAGTCCGTTAT | |
| | | | | | | | | | CAACTTGAAAAAGT | |
| | | | | | | | | | GGCACCGAGTCGGT | |
| | | | | | | | | | GC | |
| SpyCas9-NG | NG | −3 | 1 | 20 | 20 | GTTTTA | 4599 | GAAA | TAGCAAGTTAAAATA | 4610 |
| | (NGG = | | | | | GAGCTA | | | AGGCTAGTCCGTTAT | |
| | NGA = | | | | | | | | CAACTTGAAAAAGT | |
| | NGT > | | | | | | | | GGCACCGAGTCGGT | |
| | NGC) | | | | | | | | GC | |
| SpyCas9- | NRN > | −3 | 1 | 20 | 20 | GTTTTA | 4599 | GAAA | TAGCAAGTTAAAATA | 4610 |
| SpRY | NYN | | | | | GAGCTA | | | AGGCTAGTCCGTTAT | |
| | | | | | | | | | CAACTTGAAAAAGT | |
| | | | | | | | | | GGCACCGAGTCGGT | |
| | | | | | | | | | GC | |
| St1Cas9 | NNAGA | −3 | 1 | 20 | 20 | GTCTTT | 4600 | GTAC | CAGAAGCTACAAAG | 4611 |
| | AW > | | | | | GTACTC | | | ATAAGGCTTCATGCC | |
| | NNAGGAW | | | | | TG | | | GAAATCAACACCCTG | |
| | = NN | | | | | | | | TCATTTTATGGCAGG | |
| | GGAAW | | | | | | | | GTGTTTT | |
| BlatCas9 | NNNN | −3 | 1 | 19 | 23 | GCTATA | 4601 | GAAA | GGTAAGTTGCTATA | 4612 |
| | CNAA > | | | | | GTTCCT | | | GTAAGGGCAACAGA | |
| | NNNN | | | | | TACT | | | CCCGAGGCGTTGGG | |
| | CNDD > | | | | | | | | GATCGCCTAGCCCGT | |
| | NNNN | | | | | | | | GTTTACGGGCTCTCC | |
| | C | | | | | | | | CCATATTCAAAATAA | |
| | | | | | | | | | TGACAGACGAGCAC | |
| | | | | | | | | | CTTGGAGCATTTATC | |
| | | | | | | | | | TCCGAGGTGCT | |
| cCas9-v16 | NNVACT; | −3 | 2 | 21 | 21 | GTCTTA | 4602 | GAAA | CAGAATCTACTAAGA | 4613 |
| | NNVATGM; | | | | | GTACTC | | | CAAGGCAAAATGCC | |
| | NNVATT; | | | | | TG | | | GTGTTTATCTCGTCA | |
| | NNVGCT; | | | | | | | | ACTTGTTGGCGAGA | |
| | NNVGTG; | | | | | | | | | |
| | NNVGTT | | | | | | | | | |
| cCas9-v17 | NNVRR | −3 | 2 | 21 | 21 | GTCTTA | 4602 | GAAA | CAGAATCTACTAAGA | 4613 |
| | N | | | | | GTACTC | | | CAAGGCAAAATGCC | |
| | | | | | | TG | | | GTGTTTATCTCGTCA | |
| | | | | | | | | | ACTTGTTGGCGAGA | |
| cCas9-v21 | NNVACT; | −3 | 2 | 21 | 21 | GTCTTA | 4602 | GAAA | CAGAATCTACTAAGA | 4613 |
| | NNVATGM; | | | | | GTACTC | | | CAAGGCAAAATGCC | |
| | NNVATT; | | | | | TG | | | GTGTTTATCTCGTCA | |
| | NNVGCT; | | | | | | | | ACTTGTTGGCGAGA | |
| | NNVGTG; | | | | | | | | | |
| | NNVGTT | | | | | | | | | |
| cCas9-v42 | NNVRR | −3 | 2 | 21 | 21 | GTCTTA | 4602 | GAAA | CAGAATCTACTAAGA | 4613 |
| | N | | | | | GTACTC | | | CAAGGCAAAATGCC | |
| | | | | | | TG | | | GTGTTTATCTCGTCA | |
| | | | | | | | | | ACTTGTTGGCGAGA | |
| CdiCas9 | NNRHHHY; | | 2 | 22 | 22 | ACTGGG | 4603 | GAAA | CTGAACCTCAGTAAG | 4614 |
| | NN | | | | | GTTCAG | | | CATTGGCTCGTTTCC | |
| | RAAAY | | | | | | | | AATGTTGATTGCTCC | |
| | | | | | | | | | GCCGGTGCTCCTTAT | |
| | | | | | | | | | TTTTAAGGGCGCCG | |
| | | | | | | | | | GC | |
| CjeCas9 | NNNN | −3 | 2 | 21 | 23 | GTTTTA | 4604 | GAAA | AGGGACTAAAATAA | 4615 |
| | RYAC | | | | | GTCCCT | | | AGAGTTTGCGGGAC | |
| | | | | | | | | | TCTGCGGGGTTACA | |
| | | | | | | | | | ATCCCCTAAAACCGC | |
| GeoCas9 | NNNN | | 2 | 21 | 23 | GTCATA | 4605 | GAAA | TCAGGGTTACTATGA | 4616 |
| | CRAA | | | | | GTTCCC | | | TAAGGGCTTTCTGCC | |
| | | | | | | CTGA | | | TAAGGCAGACTGAC | |
| | | | | | | | | | CCGCGGCGTTGGGG | |
| | | | | | | | | | ATCGCCTGTCGCCCG | |
| | | | | | | | | | CTTTTGGCGGGCATT | |
| | | | | | | | | | CCCCATCCTT | |
| iSpyMacCas9 | NAAN | −3 | 2 | 19 | 21 | GTTTTA | 4599 | GAAA | TAGCAAGTTAAAATA | 4610 |
| | | | | | | GAGCTA | | | AGGCTAGTCCGTTAT | |
| | | | | | | | | | CAACTTGAAAAAGT | |
| | | | | | | | | | GGCACCGAGTCGGT | |
| | | | | | | | | | GC | |
| NmeCas9 | NNNN | −3 | 2 | 20 | 24 | GTTGTA | 4596 | GAAA | CGAAATGAGAACCG | 4607 |
| | GAYT; | | | | | GCTCCC | | | TTGCTACAATAAGGC | |
| | NNNNGY | | | | | TTTCTC | | | CGTCTGAAAAGATG | |
| | TT; | | | | | ATTTCG | | | TGCCGCAACGCTCTG | |
| | NNNNGAY | | | | | | | | CCCCTTAAAGCTTCT | |
| | A; | | | | | | | | GCTTTAAGGGGCAT | |
| | NNNNGTCT | | | | | | | | CGTTTA | |
| ScaCas9 | NNG | −3 | 2 | 20 | 20 | GTTTTA | 4599 | GAAA | TAGCAAGTTAAAATA | 4610 |
| | | | | | | GAGCTA | | | AGGCTAGTCCGTTAT | |
| | | | | | | | | | CAACTTGAAAAAGT | |
| | | | | | | | | | GGCACCGAGTCGGT | |
| | | | | | | | | | GC | |
| ScaCas9- | NNG | −3 | 2 | 20 | 20 | GTTTTA | 4599 | GAAA | TAGCAAGTTAAAATA | 4610 |
| HiFi-Sc++ | | | | | | GAGCTA | | | AGGCTAGTCCGTTAT | |
| | | | | | | | | | CAACTTGAAAAAGT | |
| | | | | | | | | | GGCACCGAGTCGGT | |
| | | | | | | | | | GC | |
| SpyCas9- | NRRH | −3 | 2 | 20 | 20 | GTTTAA | 4606 | GAAA | CAGCATAGCAAGTTT | 4617 |
| 3var-NRRH | | | | | | GAGCTA | | | AAATAAGGCTAGTCC | |
| | | | | | | TGCTG | | | GTTATCAACTTGAAA | |
| | | | | | | | | | AAGTGGCACCGAGT | |
| | | | | | | | | | CGGTGC | |
| SpyCas9- | NRTH | −3 | 2 | 20 | 20 | GTTTAA | 4606 | GAAA | CAGCATAGCAAGTTT | 4617 |
| 3var-NRTH | | | | | | GAGCTA | | | AAATAAGGCTAGTCC | |
| | | | | | | TGCTG | | | GTTATCAACTTGAAA | |
| | | | | | | | | | AAGTGGCACCGAGT | |
| | | | | | | | | | CGGTGC | |
| SpyCas9- | NRCH | −3 | 2 | 20 | 20 | GTTTAA | 4606 | GAAA | CAGCATAGCAAGTTT | 4617 |
| 3var-NRCH | | | | | | GAGCTA | | | AAATAAGGCTAGTCC | |
| | | | | | | TGCTG | | | GTTATCAACTTGAAA | |
| | | | | | | | | | AAGTGGCACCGAGT | |
| | | | | | | | | | CGGTGC | |
| SpyCas9-HF1 | NGG | −3 | 2 | 20 | 20 | GTTTTA | 4599 | GAAA | TAGCAAGTTAAAATA | 4610 |
| | | | | | | GAGCTA | | | AGGCTAGTCCGTTAT | |
| | | | | | | | | | CAACTTGAAAAAGT | |
| | | | | | | | | | GGCACCGAGTCGGT | |
| | | | | | | | | | GC | |
| SpyCas9- | NAAG | −3 | 2 | 20 | 20 | GTTTTA | 4599 | GAAA | TAGCAAGTTAAAATA | 4610 |
| QQR1 | | | | | | GAGCTA | | | AGGCTAGTCCGTTAT | |
| | | | | | | | | | CAACTTGAAAAAGT | |
| | | | | | | | | | GGCACCGAGTCGGT | |
| | | | | | | | | | GC | |
| SpyCas9-SpG | NGN | −3 | 2 | 20 | 20 | GTTTTA | 4599 | GAAA | TAGCAAGTTAAAATA | 4610 |
| | | | | | | GAGCTA | | | AGGCTAGTCCGTTAT | |
| | | | | | | | | | CAACTTGAAAAAGT | |
| | | | | | | | | | GGCACCGAGTCGGT | |
| | | | | | | | | | GC | |
| SpyCas9- | NGAN | −3 | 2 | 20 | 20 | GTTTTA | 4599 | GAAA | TAGCAAGTTAAAATA | 4610 |
| VQR | | | | | | GAGCTA | | | AGGCTAGTCCGTTAT | |
| | | | | | | | | | CAACTTGAAAAAGT | |
| | | | | | | | | | GGCACCGAGTCGGT | |
| | | | | | | | | | GC | |
| SpyCas9- | NGCG | −3 | 2 | 20 | 20 | GTTTTA | 4599 | GAAA | TAGCAAGTTAAAATA | 4610 |
| VRER | | | | | | GAGCTA | | | AGGCTAGTCCGTTAT | |
| | | | | | | | | | CAACTTGAAAAAGT | |
| | | | | | | | | | GGCACCGAGTCGGT | |
| | | | | | | | | | GC | |
| SpyCas9- | NG; | −3 | 2 | 20 | 20 | GTTTAA | 4606 | GAAA | CAGCATAGCAAGTTT | 4617 |
| xCas | GAA; | | | | | GAGCTA | | | AAATAAGGCTAGTCC | |
| | GAT | | | | | TGCTG | | | GTTATCAACTTGAAA | |
| | | | | | | | | | AAGTGGCACCGAGT | |
| | | | | | | | | | CGGTGC | |
| SpyCas9- | NG | −3 | 2 | 20 | 20 | GTTTAA | 4606 | GAAA | CAGCATAGCAAGTTT | 4617 |
| xCas-NG | | | | | | GAGCTA | | | AAATAAGGCTAGTCC | |
| | | | | | | TGCTG | | | GTTATCAACTTGAAA | |
| | | | | | | | | | AAGTGGCACCGAGT | |
| | | | | | | | | | CGGTGC | |
| St1Cas9- | NNACA | −3 | 2 | 20 | 20 | GTCTTT | 4600 | GTAC | CAGAAGCTACAAAG | 4611 |
| CNRZ1066 | A | | | | | GTACTC | | | ATAAGGCTTCATGCC | |
| | | | | | | TG | | | GAAATCAACACCCTG | |
| | | | | | | | | | TCATTTTATGGCAGG | |
| | | | | | | | | | GTGTTTT | |
| St1Cas9- | NNGCA | −3 | 2 | 20 | 20 | GTCTTT | 4600 | GTAC | CAGAAGCTACAAAG | 4611 |
| LMG1831 | A | | | | | GTACTC | | | ATAAGGCTTCATGCC | |
| | | | | | | TG | | | GAAATCAACACCCTG | |
| | | | | | | | | | TCATTTTATGGCAGG | |
| | | | | | | | | | GTGTTTT | |
| St1Cas9- | NNAAA | −3 | 2 | 20 | 20 | GTCTTT | 4600 | GTAC | CAGAAGCTACAAAG | 4611 |
| MTH17CL396 | A | | | | | GTACTC | | | ATAAGGCTTCATGCC | |
| | | | | | | TG | | | GAAATCAACACCCTG | |
| | | | | | | | | | TCATTTTATGGCAGG | |
| | | | | | | | | | GTGTTTT | |
| St1Cas9- | NNGAA | −3 | 2 | 20 | 20 | GTCTTT | 4600 | GTAC | CAGAAGCTACAAAG | 4611 |
| TH1477 | A | | | | | GTACTC | | | ATAAGGCTTCATGCC | |
| | | | | | | TG | | | GAAATCAACACCCTG | |
| | | | | | | | | | TCATTTTATGGCAGG | |
| | | | | | | | | | GTGTTTT | |
| SRGN3.1 | NNGG | | 1 | 21 | 23 | GTTTTA | 4598 | GAAA | CAGAATCTACTGAAA | 4618 |
| | | | | | | GTACTC | | | CAAGACAATATGTCG | |
| | | | | | | TG | | | TGTTTATCCCATCAA | |
| | | | | | | | | | TTTATTGGTGGGATT | |
| | | | | | | | | | TT | |
| sRGN3.3 | NNGG | | 1 | 21 | 23 | GTTTTA | 4598 | GAAA | CAGAATCTACTGAAA | 4618 |
| | | | | | | GTACTC | | | CAAGACAATATGTCG | |
| | | | | | | TG | | | TGTTTATCCCATCAA | |
| | | | | | | | | | TTTATTGGTGGGATT | |
| | | | | | | | | | TT | |

[0247] Additionally, it is understood that terminal Us and Ts may optionally be added or removed from tracrRNA sequences and may be modified or unmodified when provided as RNA. Without wishing to be bound by example, versions of gRNA scaffold sequences alternative to those exemplified in Table 8 may also function with the different Cas9 enzymes or derivatives thereof exemplified in Table 4, e.g., alternate gRNA scaffold sequences with nucleotide additions, substitutions, or deletions, e.g., sequences with stem-loop structures added or removed. It is contemplated herein that the gRNA scaffold sequences represent a component of gene modifying systems that can be similarly optimized for a given system, Cas-RT fusion polypeptide, indication, target mutation, template RNA, or delivery vehicle.

[0248] Herein, when an RNA sequence (e.g., a template RNA sequence) is said to comprise a particular sequence (e.g., a sequence of Table 8 or a portion thereof) that comprises thymine (T), it is of course understood that the RNA sequence may (and frequently does) comprise uracil (U) in place of T. For instance, the RNA sequence may comprise U at every position shown as T in the sequence in Table 8. More specifically, the present disclosure provides an RNA sequence according to every gRNA scaffold sequence of Table 8, wherein the RNA sequence has a U in place of each T in the sequence in Table 8.

### Heterologous Object Sequence

[0249] A template RNA described herein may comprise a heterologous object sequence that the gene modifying polypeptide can use as a template for reverse transcription, to write a desired sequence into the target nucleic acid. In some embodiments, the heterologous object sequence comprises, from 5′ to 3′, a post-edit homology region, the mutation region, and a pre-edit homology region. Without wishing to be bound by theory, an RT performing reverse transcription on the template RNA first reverse transcribes the pre-edit homology region, then the mutation region, and then the post-edit homology region, thereby creating a DNA strand comprising the desired mutation with a homology region on either side.

[0250] In some embodiments, the heterologous object sequence is at least 32, 33, 34, 35, 36, 37, 38, 39, 40, 41, 42, 43, 44, 45, 46, 47, 48, 49, 50, 51, 52, 53, 54, 55, 56, 57, 58, 59, 60, 61, 62, 63, 64, 65, 66, 67, 68, 69, 70, 71, 72, 73, 74, 75, 76, 77, 78, 79, 80, 81, 82, 83, 84, 85, 86, 87, 88, 89, 90, 91, 92, 93, 94, 95, 96, 97, 98, 99, 100, 120, 140, 160, 180, 200, 500, or 1,000 nucleotides (nts) in length, or at least 1, 1.5, 2, 2.5, 3, 3.5, 4, 4.5, 5, 5.5, 6, 6.5, 7, 7.5, 8, 8.5, 9, 9.5, or 10 kilobases in length. In some embodiments, the heterologous object sequence is no more than 33, 34, 35, 36, 37, 38, 39, 40, 41, 42, 43, 44, 45, 46, 47, 48, 49, 50, 51, 52, 53, 54, 55, 56, 57, 58, 59, 60, 61, 62, 63, 64, 65, 66, 67, 68, 69, 70, 71, 72, 73, 74, 75, 76, 77, 78, 79, 80, 81, 82, 83, 84, 85, 86, 87, 88, 89, 90, 91, 92, 93, 94, 95, 96, 97, 98, 99, 100, 120, 140, 160, 180, 200, 500, 1,000, or 2000 nucleotides (nts) in length, or no more than 20, 15, 10, 9, 8, 7, 6, 5, 4, or 3 kilobases in length. In some embodiments, the heterologous object sequence is 30-1000, 40-1000, 50-1000, 60-1000, 70-1000, 74-1000, 75-1000, 76-1000, 77-1000, 78-1000, 79-1000, 80-1000, 85-1000, 90-1000, 100-1000, 120-1000, 140-1000, 160-1000, 180-1000, 200-1000, 500-1000, 30-500, 40-500, 50-500, 60-500, 70-500, 74-500, 75-500, 76-500, 77-500, 78-500, 79-500, 80-500, 85-500, 90-500, 100-500, 120-500, 140-500, 160-500, 180-500, 200-500, 30-200, 40-200, 50-200, 60-200, 70-200, 74-200, 75-200, 76-200, 77-200, 78-200, 79-200, 80-200, 85-200, 90-200, 100-200, 120-200, 140-200, 160-200, 180-200, 30-100, 40-100, 50-100, 60-100, 70-100, 74-100, 75-100, 76-100, 77-100, 78-100, 79-100, 80-100, 85-100, or 90-100 nucleotides (nts) in length, or 1-20, 1-15, 1-10, 1-9, 1-8, 1-7, 1-6, 1-5, 1-4, 1-3, 1-2, 2-20, 2-15, 2-10, 2-9, 2-8, 2-7, 2-6, 2-5, 2-4, 2-3, 3-20, 3-15, 3-10, 3-9, 3-8, 3-7, 3-6, 3-5, 3-4, 4-20, 4-15, 4-10, 4-9, 4-8, 4-7, 4-6, 4-5, 5-20, 5-15, 5-10, 5-9, 5-8, 5-7, 5-6, 6-20, 6-15, 6-10, 6-9, 6-8, 6-7, 7-20, 7-15, 7-10, 7-9, 7-8, 8-20, 8-15, 8-10, 8-9, 9-20, 9-15, 9-10, 10-15, 10-20, or 15-20 kilobases in length. In some embodiments, the heterologous object sequence is 10-100, 10-90, 10-80, 10-70, 10-60, 10-50, 10-40, 10-30, or 10-20 nt in length, e.g., 10-80, 10-50, or 10-20 nt in length, e.g., about 10-20 nt in length. In some embodiments, the heterologous object sequence is 8-30, 9-25, 10-20, 11-16, or 12-15 nucleotides in length, e.g., is 11-16 nt in length. Without wishing to be bound by theory, in some embodiments, a larger insertion size, larger region of editing (e.g., the distance between a first edit/substitution and a second edit/substitution in the target region), and/or greater number of desired edits (e.g., mismatches of the heterologous object sequence to the target genome), may result in a longer optimal heterologous object sequence.

[0251] In certain embodiments, the template nucleic acid comprises a customized RNA sequence template which can be identified, designed, engineered and constructed to contain sequences altering or specifying host genome function, for example by introducing a heterologous coding region into a genome; affecting or causing exon structure/alternative splicing, e.g., leading to exon skipping of one or more exons; causing disruption of an endogenous gene, e.g., creating a genetic knockout; causing transcriptional activation of an endogenous gene; causing epigenetic regulation of an endogenous DNA; causing up-regulation of one or more operably linked genes, e.g., leading to gene activation or overexpression; causing down-regulation of one or more operably linked genes, e.g., creating a genetic knock-down; etc. In certain embodiments, a customized RNA sequence template can be engineered to contain sequences coding for exons and/or transgenes, provide binding sites for transcription factor activators, repressors, enhancers, etc., and combinations thereof. In some embodiments, a customized template can be engineered to encode a nucleic acid or peptide tag to be expressed in an endogenous RNA transcript or endogenous protein operably linked to the target site. In other embodiments, the coding sequence can be further customized with splice donor sites, splice acceptor sites, or poly-A tails.

[0252] The template nucleic acid (e.g., template RNA) of the system typically comprises an object sequence (e.g., a heterologous object sequence) for writing a desired sequence into a target DNA. The object sequence may be coding or non-coding. The template nucleic acid (e.g., template RNA) can be designed to result in insertions, mutations, or deletions at the target DNA locus. In some embodiments, the template nucleic acid (e.g., template RNA) may be designed to cause an insertion in the target DNA. For example, the template nucleic acid (e.g., template RNA) may contain a heterologous sequence, wherein the reverse transcription will result in insertion of the heterologous sequence into the target DNA. In other embodiments, the RNA template may be designed to introduce a deletion into the target DNA. For example, the template nucleic acid (e.g., template RNA) may match the target DNA upstream and downstream of the desired deletion, wherein the reverse transcription will result in the copying of the upstream and downstream sequences from the template nucleic acid (e.g., template RNA) without the intervening sequence, e.g., causing deletion of the intervening sequence. In other embodiments, the template nucleic acid (e.g., template RNA) may be designed to introduce an edit into the target DNA. For example, the template RNA may match the target DNA sequence with the exception of one or more nucleotides, wherein the reverse transcription will result in the copying of these edits into the target DNA, e.g., resulting in mutations, e.g., transition or transversion mutations.

[0253] In some embodiments, writing of an object sequence into a target site results in the substitution of nucleotides, e.g., where the full length of the object sequence corresponds to a matching length of the target site with one or more mismatched bases. In some embodiments, a heterologous object sequence may be designed such that a combination of sequence alterations may occur, e.g., a simultaneous addition and deletion, addition and substitution, or deletion and substitution.

[0254] In some embodiments, the heterologous object sequence may contain an open reading frame or a fragment of an open reading frame. In some embodiments the heterologous object sequence has a Kozak sequence. In some embodiments the heterologous object sequence has an internal ribosome entry site. In some embodiments the heterologous object sequence has a self-cleaving peptide such as a T2A or P2A site. In some embodiments the heterologous object sequence has a start codon. In some embodiments the template RNA has a splice acceptor site. In some embodiments the template RNA has a splice donor site. Exemplary splice acceptor and splice donor sites are described in WO2016044416, incorporated herein by reference in its entirety. Exemplary splice acceptor site sequences are known to those of skill in the art. In some embodiments the template RNA has a microRNA binding site downstream of the stop codon. In some embodiments the template RNA has a polyA tail downstream of the stop codon of an open reading frame. In some embodiments the template RNA comprises one or more exons. In some embodiments the template RNA comprises one or more introns. In some embodiments the template RNA comprises a eukaryotic transcriptional terminator. In some embodiments the template RNA comprises an enhanced translation element or a translation enhancing element. In some embodiments the RNA comprises the human T-cell leukemia virus (HTLV-1) R region. In some embodiments the RNA comprises a posttranscriptional regulatory element that enhances nuclear export, such as that of Hepatitis B Virus (HPRE) or Woodchuck Hepatitis Virus (WPRE).

[0255] In some embodiments, the heterologous object sequence may contain a non-coding sequence. For example, the template nucleic acid (e.g., template RNA) may comprise a regulatory element, e.g., a promoter or enhancer sequence or miRNA binding site. In some embodiments, integration of the object sequence at a target site will result in upregulation of an endogenous gene. In some embodiments, integration of the object sequence at a target site will result in downregulation of an endogenous gene. In some embodiments the template nucleic acid (e.g., template RNA) comprises a tissue specific promoter or enhancer, each of which may be unidirectional or bidirectional. In some embodiments the promoter is an RNA polymerase I promoter, RNA polymerase II promoter, or RNA polymerase III promoter. In some embodiments the promoter comprises a TATA element. In some embodiments the promoter comprises a B recognition element. In some embodiments the promoter has one or more binding sites for transcription factors.

[0256] In some embodiments, the template nucleic acid (e.g., template RNA) comprises a site that coordinates epigenetic modification. In some embodiments, the template nucleic acid (e.g., template RNA) comprises a chromatin insulator. For example, the template nucleic acid (e.g., template RNA) comprises a CTCF site or a site targeted for DNA methylation.

[0257] In some embodiments, the template nucleic acid (e.g., template RNA) comprises a gene expression unit composed of at least one regulatory region operably linked to an effector sequence. The effector sequence may be a sequence that is transcribed into RNA (e.g., a coding sequence or a non-coding sequence such as a sequence encoding a micro RNA).

[0258] In some embodiments, the heterologous object sequence of the template nucleic acid (e.g., template RNA) is inserted into a target genome in an endogenous intron. In some embodiments, the heterologous object sequence of the template nucleic acid (e.g., template RNA) is inserted into a target genome and thereby acts as a new exon. In some embodiments, the insertion of the heterologous object sequence into the target genome results in replacement of a natural exon or the skipping of a natural exon.

[0259] In some embodiments, the heterologous object sequence of the template nucleic acid (e.g., template RNA) is inserted into the target genome in a genomic safe harbor site, such as AAVS1, CCR5, ROSA26, or albumin locus. In some embodiments, a gene modifying is used to integrate a CAR into the T-cell receptor α constant (TRAC) locus (Eyquem et al Nature 543, 113-117 (2017)). In some embodiments, a gene modifying system is used to integrate a CAR into a T-cell receptor β constant (TRBC) locus. Many other safe harbors have been identified by computational approaches (Pellenz et al Hum Gen Ther 30, 814-828 (2019)) and could be used for gene modifying system-mediated integration. In some embodiments, the heterologous object sequence of the template nucleic acid (e.g., template RNA) is added to the genome in an intergenic or intragenic region. In some embodiments, the heterologous object sequence of the template nucleic acid (e.g., template RNA) is added to the genome 5′ or 3′ within 0.1 kb, 0.25 kb, 0.5 kb, 0.75, kb, 1 kb, 2 kb, 3 kb, 4 kb, 5 kb, 7.5 kb, 10 kb, 15 kb, 20 kb, 25 kb, 50, 75 kb, or 100 kb of an endogenous active gene. In some embodiments, the heterologous object sequence of the template nucleic acid (e.g., template RNA) is added to the genome 5′ or 3′ within 0.1 kb, 0.25 kb, 0.5 kb, 0.75, kb, 1 kb, 2 kb, 3 kb, 4 kb, 5 kb, 7.5 kb, 10 kb, 15 kb, 20 kb, 25 kb, 50, 75 kb, or 100 kb of an endogenous promoter or enhancer. In some embodiments, the heterologous object sequence of the template nucleic acid (e.g., template RNA) can be, e.g., 50-50,000 base pairs (e.g., between 50-40,000 bp, between 500-30,000 bp between 500-20,000 bp, between 100-15,000 bp, between 500-10,000 bp, between 50-10,000 bp, between 50-5,000 bp.

[0260] The template nucleic acid (e.g., template RNA) can be designed to result in insertions, mutations, or deletions at the target DNA locus. In some embodiments, the template nucleic acid (e.g., template RNA) may be designed to cause an insertion in the target DNA. For example, the template nucleic acid (e.g., template RNA) may contain a heterologous object sequence, wherein the reverse transcription will result in insertion of the heterologous object sequence into the target DNA. In other embodiments, the RNA template may be designed to write a deletion into the target DNA. For example, the template nucleic acid (e.g., template RNA) may match the target DNA upstream and downstream of the desired deletion, wherein the reverse transcription will result in the copying of the upstream and downstream sequences from the template nucleic acid (e.g., template RNA) without the intervening sequence, e.g., causing deletion of the intervening sequence. In other embodiments, the template nucleic acid (e.g., template RNA) may be designed to write an edit into the target DNA. For example, the template RNA may match the target DNA sequence with the exception of one or more nucleotides, wherein the reverse transcription will result in the copying of these edits into the target DNA, e.g., resulting in mutations, e.g., transition or transversion mutations.

[0261] In some embodiments, the pre-edit homology domain comprises a nucleic acid sequence having 100% sequence identity with a nucleic acid sequence comprised in a target nucleic acid molecule.

[0262] In some embodiments, the post-edit homology domain comprises a nucleic acid sequence having 100% sequence identity with a nucleic acid sequence comprised in a target nucleic acid molecule.

### PBS Sequence

[0263] In some embodiments, a template nucleic acid (e.g., template RNA) comprises a PBS sequence. In some embodiments, a PBS sequence is disposed 3′ of the heterologous object sequence and is complementary to a sequence adjacent to a site to be modified by a system described herein, or comprises no more than 1, 2, 3, 4, or 5 mismatches to a sequence complementary to the sequence adjacent to a site to be modified by the system/gene modifying polypeptide. In some embodiments, the PBS sequence binds within 1, 2, 3, 4, 5, 6, 7, 8, 9, or 10 nucleotides of a nick site in the target nucleic acid molecule. In some embodiments, binding of the PBS sequence to the target nucleic acid molecule permits initiation of target-primed reverse transcription (TPRT), e.g., with the 3′ homology domain acting as a primer for TPRT. In some embodiments, the PBS sequence is 3-5, 5-10, 10-30, 10-25, 10-20, 10-19, 10-18, 10-17, 10-16, 10-15, 10-14, 10-13, 10-12, 10-11, 11-30, 11-25, 11-20, 11-19, 11-18, 11-17, 11-16, 11-15, 11-14, 11-13, 11-12, 12-30, 12-25, 12-20, 12-19, 12-18, 12-17, 12-16, 12-15, 12-14, 12-13, 13-30, 13-25, 13-20, 13-19, 13-18, 13-17, 13-16, 13-15, 13-14, 14-30, 14-25, 14-20, 14-19, 14-18, 14-17, 14-16, 14-15, 15-30, 15-25, 15-20, 15-19, 15-18, 15-17, 15-16, 16-30, 16-25, 16-20, 16-19, 16-18, 16-17, 17-30, 17-25, 17-20, 17-19, 17-18, 18-30, 18-25, 18-20, 18-19, 19-30, 19-25, 19-20, 20-30, 20-25, or 25-30 nucleotides in length, e.g., 10-17, 12-16, or 12-14 nucleotides in length. In some embodiments, the PBS sequence is 5-20, 8-16, 8-14, 8-13, 9-13, 9-12, or 10-12 nucleotides in length, e.g., 9-12 nucleotides in length.

[0264] The template nucleic acid (e.g., template RNA) may have some homology to the target DNA. In some embodiments, the template nucleic acid (e.g., template RNA) PBS sequence domain may serve as an annealing region to the target DNA, such that the target DNA is positioned to prime the reverse transcription of the template nucleic acid (e.g., template RNA). In some embodiments the template nucleic acid (e.g., template RNA) has at least 2, 3, 4, 5, 6, 7, 8, 9, 10, 11, 12, 13, 14, 15, 20, 25, 30, 35, 40, 45, 50, 60, 70, 80, 90, 100, 110, 120, 130, 140, 150, 175, 200 or more bases of exact homology to the target DNA at the 3′ end of the RNA. In some embodiments the template nucleic acid (e.g., template RNA) has at least 2, 3, 4, 5, 6, 7, 8, 9, 10, 11, 12, 13, 14, 15, 20, 25, 30, 35, 40, 45, 50, 60, 70, 80, 90, 100, 110, 120, 130, 140, 150, 175, 200 or more bases of at least 50%, 60%, 70%, 80%, 85%, 90%, 95%, 97%, 98%, 99% or 100% homology to the target DNA, e.g., at the 5′ end of the template nucleic acid (e.g., template RNA).

gRNAs with Inducible Activity

[0265] In some embodiments, a gRNA described herein (e.g., a gRNA that is part of a template RNA or a gRNA used for second strand nicking) has inducible activity. Inducible activity may be achieved by the template nucleic acid, e.g., template RNA, further comprising (in addition to the gRNA) a blocking domain, wherein the sequence of a portion of or all of the blocking domain is at least partially complementary to a portion or all of the gRNA. The blocking domain is thus capable of hybridizing or substantially hybridizing to a portion of or all of the gRNA. In some embodiments, the blocking domain and inducibly active gRNA are disposed on the template nucleic acid, e.g., template RNA, such that the gRNA can adopt a first conformation where the blocking domain is hybridized or substantially hybridized to the gRNA, and a second conformation where the blocking domain is not hybridized or not substantially hybridized to the gRNA. In some embodiments, in the first conformation the gRNA is unable to bind to the gene modifying polypeptide (e.g., the template nucleic acid binding domain, DNA binding domain, or endonuclease domain (e.g., a CRISPR/Cas protein)) or binds with substantially decreased affinity compared to an otherwise similar template RNA lacking the blocking domain. In some embodiments, in the second conformation the gRNA is able to bind to the gene modifying polypeptide (e.g., the template nucleic acid binding domain, DNA binding domain, or endonuclease domain (e.g., a CRISPR/Cas protein)). In some embodiments, whether the gRNA is in the first or second conformation can influence whether the DNA binding or endonuclease activities of the gene modifying polypeptide (e.g., of the CRISPR/Cas protein the gene modifying polypeptide comprises) are active.

[0266] In some embodiments, the gRNA that coordinates the second nick has inducible activity. In some embodiments, the gRNA that coordinates the second nick is induced after the template is reverse transcribed. In some embodiments, hybridization of the gRNA to the blocking domain can be disrupted using an opener molecule. In some embodiments, an opener molecule comprises an agent that binds to a portion or all of the gRNA or blocking domain and inhibits hybridization of the gRNA to the blocking domain. In some embodiments, the opener molecule comprises a nucleic acid, e.g., comprising a sequence that is partially or wholly complementary to the gRNA, blocking domain, or both. By choosing or designing an appropriate opener molecule, providing the opener molecule can promote a change in the conformation of the gRNA such that it can associate with a CRISPR/Cas protein and provide the associated functions of the CRISPR/Cas protein (e.g., DNA binding and/or endonuclease activity). Without wishing to be bound by theory, providing the opener molecule at a selected time and/or location may allow for spatial and temporal control of the activity of the gRNA, CRISPR/Cas protein, or gene modifying system comprising the same. In some embodiments, the opener molecule is exogenous to the cell comprising the gene modifying polypeptide and or template nucleic acid. In some embodiments, the opener molecule comprises an endogenous agent (e.g., endogenous to the cell comprising the gene modifying polypeptide and or template nucleic acid comprising the gRNA and blocking domain). For example, an inducible gRNA, blocking domain, and opener molecule may be chosen such that the opener molecule is an endogenous agent expressed in a target cell or tissue, e.g., thereby ensuring activity of a gene modifying system in the target cell or tissue. As a further example, an inducible gRNA, blocking domain, and opener molecule may be chosen such that the opener molecule is absent or not substantially expressed in one or more non-target cells or tissues, e.g., thereby ensuring that activity of a gene modifying system does not occur or substantially occur in the one or more non-target cells or tissues, or occurs at a reduced level compared to a target cell or tissue. Exemplary blocking domains, opener molecules, and uses thereof are described in PCT App. Publication WO2020044039A1, which is incorporated herein by reference in its entirety. In some embodiments, the template nucleic acid, e.g., template RNA, may comprise one or more sequences or structures for binding by one or more components of a gene modifying polypeptide, e.g., by a reverse transcriptase or RNA binding domain, and a gRNA. In some embodiments, the gRNA facilitates interaction with the template nucleic acid binding domain (e.g., RNA binding domain) of the gene modifying polypeptide. In some embodiments, the gRNA directs the gene modifying polypeptide to the matching target sequence, e.g., in a target cell genome.

### Circular RNAs and Ribozymes in Gene Modifying Systems

[0267] It is contemplated that it may be useful to employ circular and/or linear RNA states during the formulation, delivery, or gene modifying reaction within the target cell. Thus, in some embodiments of any of the aspects described herein, a gene modifying system comprises one or more circular RNAs (circRNAs). In some embodiments of any of the aspects described herein, a gene modifying system comprises one or more linear RNAs. In some embodiments, a nucleic acid as described herein (e.g., a template nucleic acid, a nucleic acid molecule encoding a gene modifying polypeptide, or both) is a circRNA. In some embodiments, a circular RNA molecule encodes the gene modifying polypeptide. In some embodiments, the circRNA molecule encoding the gene modifying polypeptide is delivered to a host cell. In some embodiments, a circular RNA molecule encodes a recombinase, e.g., as described herein. In some embodiments, the circRNA molecule encoding the recombinase is delivered to a host cell. In some embodiments, the circRNA molecule encoding the gene modifying polypeptide is linearized (e.g., in the host cell, e.g., in the nucleus of the host cell) prior to translation.

[0268] Circular RNAs (circRNAs) have been found to occur naturally in cells and have been found to have diverse functions, including both non-coding and protein coding roles in human cells. It has been shown that a circRNA can be engineered by incorporating a self-splicing intron into an RNA molecule (or DNA encoding the RNA molecule) that results in circularization of the RNA, and that an engineered circRNA can have enhanced protein production and stability (Wesselhoeft et al. Nature Communications 2018). In some embodiments, the gene modifying polypeptide is encoded as circRNA. In certain embodiments, the template nucleic acid is a DNA, such as a dsDNA or ssDNA. In certain embodiments, the circDNA comprises a template RNA.

[0269] In some embodiments, the circRNA comprises one or more ribozyme sequences. In some embodiments, the ribozyme sequence is activated for autocleavage, e.g., in a host cell, e.g., thereby resulting in linearization of the circRNA. In some embodiments, the ribozyme is activated when the concentration of magnesium reaches a sufficient level for cleavage, e.g., in a host cell. In some embodiments the circRNA is maintained in a low magnesium environment prior to delivery to the host cell. In some embodiments, the ribozyme is a protein-responsive ribozyme. In some embodiments, the ribozyme is a nucleic acid-responsive ribozyme. In some embodiments, the circRNA comprises a cleavage site. In some embodiments, the circRNA comprises a second cleavage site.

[0270] In some embodiments, the circRNA is linearized in the nucleus of a target cell. In some embodiments, linearization of a circRNA in the nucleus of a cell involves components present in the nucleus of the cell, e.g., to activate a cleavage event. In some embodiments, a ribozyme, e.g., a ribozyme from a B2 or ALU element, that is responsive to a nuclear element, e.g., a nuclear protein, e.g., a genome-interacting protein, e.g., an epigenetic modifier, e.g., EZH2, is incorporated into a circRNA, e.g., of a gene modifying system. In some embodiments, nuclear localization of the circRNA results in an increase in autocatalytic activity of the ribozyme and linearization of the circRNA.

[0271] In some embodiments, the ribozyme is heterologous to one or more of the other components of the gene modifying system. In some embodiments, an inducible ribozyme (e.g., in a circRNA as described herein) is created synthetically, for example, by utilizing a protein ligand-responsive aptamer design. A system for utilizing the satellite RNA of tobacco ringspot virus hammerhead ribozyme with an MS2 coat protein aptamer has been described (Kennedy et al. Nucleic Acids Res 42 (19): 12306-12321 (2014), incorporated herein by reference in its entirety) that results in activation of the ribozyme activity in the presence of the MS2 coat protein. In embodiments, such a system responds to protein ligand localized to the cytoplasm or the nucleus. In some embodiments the protein ligand is not MS2. Methods for generating RNA aptamers to target ligands have been described, for example, based on the systematic evolution of ligands by exponential enrichment (SELEX) (Tuerk and Gold, Science 249 (4968): 505-510 (1990); Ellington and Szostak, Nature 346 (6287): 818-822 (1990); the methods of each of which are incorporated herein by reference) and have, in some instances, been aided by in silico design (Bell et al. PNAS 117 (15): 8486-8493, the methods of which are incorporated herein by reference). Thus, in some embodiments, an aptamer for a target ligand is generated and incorporated into a synthetic ribozyme system, e.g., to trigger ribozyme-mediated cleavage and circRNA linearization, e.g., in the presence of the protein ligand. In some embodiments, circRNA linearization is triggered in the cytoplasm, e.g., using an aptamer that associates with a ligand in the cytoplasm. In some embodiments, circRNA linearization is triggered in the nucleus, e.g., using an aptamer that associates with a ligand in the nucleus. In embodiments, the ligand in the nucleus comprises an epigenetic modifier or a transcription factor. In some embodiments the ligand that triggers linearization is present at higher levels in on-target cells than off-target cells.

[0272] It is further contemplated that a nucleic acid-responsive ribozyme system can be employed for circRNA linearization. For example, biosensors that sense defined target nucleic acid molecules to trigger ribozyme activation are described, e.g., in Penchovsky (Biotechnology Advances 32 (5): 1015-1027 (2014), incorporated herein by reference). By these methods, a ribozyme naturally folds into an inactive state and is only activated in the presence of a defined target nucleic acid molecule (e.g., an RNA molecule). In some embodiments, a circRNA of a gene modifying system comprises a nucleic acid-responsive ribozyme that is activated in the presence of a defined target nucleic acid, e.g., an RNA, e.g., an mRNA, miRNA, guide RNA, gRNA, sgRNA, ncRNA, lncRNA, tRNA, snRNA, or mtRNA. In some embodiments the nucleic acid that triggers linearization is present at higher levels in on-target cells than off-target cells.

[0273] In some embodiments of any of the aspects herein, a gene modifying system incorporates one or more ribozymes with inducible specificity to a target tissue or target cell of interest, e.g., a ribozyme that is activated by a ligand or nucleic acid present at higher levels in a target tissue or target cell of interest. In some embodiments, the gene modifying system incorporates a ribozyme with inducible specificity to a subcellular compartment, e.g., the nucleus, nucleolus, cytoplasm, or mitochondria. In some embodiments, the ribozyme that is activated by a ligand or nucleic acid present at higher levels in the target subcellular compartment. In some embodiments, an RNA component of a gene modifying system is provided as circRNA, e.g., that is activated by linearization. In some embodiments, linearization of a circRNA encoding a gene modifying polypeptide activates the molecule for translation. In some embodiments, a signal that activates a circRNA component of a gene modifying system is present at higher levels in on-target cells or tissues, e.g., such that the system is specifically activated in these cells.

[0274] In some embodiments, an RNA component of a gene modifying system is provided as a circRNA that is inactivated by linearization. In some embodiments, a circRNA encoding the gene modifying polypeptide is inactivated by cleavage and degradation. In some embodiments, a circRNA encoding the gene modifying polypeptide is inactivated by cleavage that separates a translation signal from the coding sequence of the polypeptide. In some embodiments, a signal that inactivates a circRNA component of a gene modifying system is present at higher levels in off-target cells or tissues, such that the system is specifically inactivated in these cells.

### Target Nucleic Acid Site

[0275] In some embodiments, after gene modification, the target site surrounding the edited sequence contains a limited number of insertions or deletions, for example, in less than about 50% or 10% of editing events, e.g., as determined by long-read amplicon sequencing of the target site, e.g., as described in Karst et al. (2020) bioRxiv doi.org/10.1101/645903 (incorporated by reference herein in its entirety). In some embodiments, the target site does not show multiple consecutive editing events, e.g., head-to-tail or head-to-head duplications, e.g., as determined by long-read amplicon sequencing of the target site, e.g., as described in Karst et al. bioRxiv doi.org/10.1101/645903 (2020) (incorporated herein by reference in its entirety). In some embodiments, the target site contains an integrated sequence corresponding to the template RNA. In some embodiments, the target site does not contain insertions resulting from endogenous RNA in more than about 1% or 10% of events, e.g., as determined by long-read amplicon sequencing of the target site, e.g., as described in Karst et al. bioRxiv doi.org/10.1101/645903 (2020) (incorporated herein by reference in its entirety). In some embodiments, the target site contains the integrated sequence corresponding to the template RNA.

[0276] In certain aspects of the present invention, the host DNA-binding site integrated into by the gene modifying system can be in a gene, in an intron, in an exon, an ORF, outside of a coding region of any gene, in a regulatory region of a gene, or outside of a regulatory region of a gene. In other aspects, the polypeptide may bind to one or more than one host DNA sequence.

[0277] In some embodiments, a gene modifying system is used to edit a target locus in multiple alleles. In some embodiments, a gene modifying system is designed to edit a specific allele. For example, a gene modifying polypeptide may be directed to a specific sequence that is only present on one allele, e.g., comprises a template RNA with homology to a target allele, e.g., a gRNA or annealing domain, but not to a second cognate allele. In some embodiments, a gene modifying system can alter a haplotype-specific allele. In some embodiments, a gene modifying system that targets a specific allele preferentially targets that allele, e.g., has at least a 2, 4, 6, 8, or 10-fold preference for a target allele.

### Second Strand Nicking

[0278] In some embodiments, a gene modifying system described herein comprises a nickase activity (e.g., in the gene modifying polypeptide) that nicks the first strand, and a nickase activity (e.g., in a polypeptide separate from the gene modifying polypeptide) that nicks the second strand of target DNA. As discussed herein, without wishing to be bound by theory, nicking of the first strand of the target site DNA is thought to provide a 3′ OH that can be used by an RT domain to reverse transcribe a sequence of a template RNA, e.g., a heterologous object sequence. Without wishing to be bound by theory, it is thought that introducing an additional nick to the second strand may bias the cellular DNA repair machinery to adopt the heterologous object sequence-based sequence more frequently than the original genomic sequence. In some embodiments, the additional nick to the second strand is made by the same endonuclease domain (e.g., nickase domain) as the nick to the first strand. In some embodiments, the same gene modifying polypeptide performs both the nick to the first strand and the nick to the second strand. In some embodiments, the gene modifying polypeptide comprises a CRISPR/Cas domain and the additional nick to the second strand is directed by an additional nucleic acid, e.g., comprising a second gRNA directing the CRISPR/Cas domain to nick the second strand. In other embodiments, the additional second strand nick is made by a different endonuclease domain (e.g., nickase domain) than the nick to the first strand. In some embodiments, that different endonuclease domain is situated in an additional polypeptide (e.g., a system of the invention further comprises the additional polypeptide), separate from the gene modifying polypeptide. In some embodiments, the additional polypeptide comprises an endonuclease domain (e.g., nickase domain) described herein. In some embodiments, the additional polypeptide comprises a DNA binding domain, e.g., described herein.

[0279] It is contemplated herein that the position at which the second strand nick occurs relative to the first strand nick may influence the extent to which one or more of: desired gene modifying DNA modifications are obtained, undesired double-strand breaks (DSBs) occur, undesired insertions occur, or undesired deletions occur. Without wishing to be bound by theory, second strand nicking may occur in two general orientations: inward nicks and outward nicks.

[0280] In some embodiments, in the inward nick orientation, the RT domain polymerizes (e.g., using the template RNA (e.g., the heterologous object sequence)) away from the second strand nick. In some embodiments, in the inward nick orientation, the location of the nick to the first strand and the location of the nick to the second strand are positioned between the first PAM site and second PAM site (e.g., in a scenario wherein both nicks are made by a polypeptide (e.g., a gene modifying polypeptide) comprising a CRISPR/Cas domain). In some embodiments, in the inward nick orientation, the location of the nick to the first strand and the location of the nick to the second strand are between the sites where the polypeptide and the additional polypeptide bind to the target DNA. In some embodiments, in the inward nick orientation, the location of the nick to the second strand is positioned on the same side of the binding sites of the polypeptide and additional polypeptide relative to the location of the nick to the first strand. In some embodiments, in the inward nick orientation, the location of the nick to the first strand and the location of the nick to the second strand are positioned between the PAM site and the site at a distance from the target site.

[0281] An example of a gene modifying system that provides an inward nick orientation comprises a gene modifying polypeptide comprising a CRISPR/Cas domain, a template RNA comprising a gRNA that directs nicking of the target site DNA on the first strand, and an additional nucleic acid comprising an additional gRNA that directs nicking at a site a distance from the location of the first nick, wherein the location of the first nick and the location of the second nick are between the PAM sites of the sites to which the two gRNAs direct the gene modifying polypeptide. As a further example, another gene modifying system that provides an inward nick orientation comprises a gene modifying polypeptide comprising a zinc finger molecule and a first nickase domain wherein the zinc finger molecule binds to the target DNA in a manner that directs the first nickase domain to nick the first strand of the target site; an additional polypeptide comprising a CRISPR/Cas domain, and an additional nucleic acid comprising a gRNA that directs the additional polypeptide to nick a site a distance from the target site DNA on the second strand, wherein the location of the first nick and the location of the second nick are between the PAM site and the site to which the zinc finger molecule binds. As a further example, another gene modifying system that provides an inward nick orientation comprises a gene modifying polypeptide comprising a zinc finger molecule and a first nickase domain wherein the zinc finger molecule binds to the target DNA in a manner that directs the first nickase domain to nick the first strand of the target site; an additional polypeptide comprising a TAL effector molecule and a second nickase domain wherein the TAL effector molecule binds to a site a distance from the target site in a manner that directs the additional polypeptide to nick the second strand, wherein the location of the first nick and the location of the second nick are between the site to which the TAL effector molecule binds and the site to which the zinc finger molecule binds.

[0282] In some embodiments, in the outward nick orientation, the RT domain polymerizes (e.g., using the template RNA (e.g., the heterologous object sequence)) toward the second strand nick. In some embodiments, in the inward nick orientation when both the first and second nicks are made by a polypeptide comprising a CRISPR/Cas domain (e.g., a gene modifying polypeptide), the first PAM site and second PAM site are positioned between the location of the nick to the first strand and the location of the nick to the second strand. In some embodiments, in the inward nick orientation, the polypeptide (e.g., the gene modifying polypeptide) and the additional polypeptide bind to sites on the target DNA between the location of the nick to the first strand and the location of the nick to the second. In some embodiments, in the inward nick orientation, the location of the nick to the second strand is positioned on the opposite side of the binding sites of the polypeptide and additional polypeptide relative to the location of the nick to the first strand. In some embodiments, in the inward orientation, the PAM site and the site at a distance from the target site are positioned between the location of the nick to the first strand and the location of the nick to the second strand.

[0283] An example of a gene modifying system that provides an outward nick orientation comprises a gene modifying polypeptide comprising a CRISPR/Cas domain, a template RNA comprising a gRNA that directs nicking of the target site DNA on the first strand, and an additional nucleic acid comprising an additional gRNA that directs nicking at a site a distance from the location of the first nick, wherein the location of the first nick and the location of the second nick are outside of the PAM sites of the sites to which the two gRNAs direct the gene modifying polypeptide (i.e., the PAM sites are between the location of the first nick and the location of the second nick). As a further example, another gene modifying system that provides an outward nick orientation comprises a gene modifying polypeptide comprising a zinc finger molecule and a first nickase domain wherein the zinc finger molecule binds to the target DNA in a manner that directs the first nickase domain to nick the first strand of the target site; an additional polypeptide comprising a CRISPR/Cas domain, and an additional nucleic acid comprising a gRNA that directs the additional polypeptide to nick a site a distance from the target site DNA on the second strand, wherein the location of the first nick and the location of the second nick are outside the PAM site and the site to which the zinc finger molecule binds (i.e., the PAM site and the site to which the zinc finger molecule binds are between the location of the first nick and the location of the second nick). As a further example, another gene modifying system that provides an outward nick orientation comprises a gene modifying polypeptide comprising a zinc finger molecule and a first nickase domain wherein the zinc finger molecule binds to the target DNA in a manner that directs the first nickase domain to nick the first strand of the target site; an additional polypeptide comprising a TAL effector molecule and a second nickase domain wherein the TAL effector molecule binds to a site a distance from the target site in a manner that directs the additional polypeptide to nick the second strand, wherein the location of the first nick and the location of the second nick are outside the site to which the TAL effector molecule binds and the site to which the zinc finger molecule binds (i.e., the site to which the TAL effector molecule binds and the site to which the zinc finger molecule binds are between the location of the first nick and the location of the second nick).

[0284] Without wishing to be bound by theory, it is thought that, for gene modifying systems where a second strand nick is provided, an outward nick orientation is preferred in some embodiments. As is described herein, an inward nick may produce a higher number of double-strand breaks (DSBs) than an outward nick orientation. DSBs may be recognized by the DSB repair pathways in the nucleus of a cell, which can result in undesired insertions and deletions. An outward nick orientation may provide a decreased risk of DSB formation, and a corresponding lower amount of undesired insertions and deletions. In some embodiments, undesired insertions and deletions are insertions and deletions not encoded by the heterologous object sequence, e.g., an insertion or deletion produced by the double-strand break repair pathway unrelated to the modification encoded by the heterologous object sequence. In some embodiments, a desired gene modification comprises a change to the target DNA (e.g., a substitution, insertion, or deletion) encoded by the heterologous object sequence (e.g., and achieved by the gene modifying writing the heterologous object sequence into the target site). In some embodiments, the first strand nick and the second strand nick are in an outward orientation.

[0285] In addition, the distance between the first strand nick and second strand nick may influence the extent to which one or more of: desired gene modifying system DNA modifications are obtained, undesired double-strand breaks (DSBs) occur, undesired insertions occur, or undesired deletions occur. Without wishing to be bound by theory, it is thought the second strand nick benefit, the biasing of DNA repair toward incorporation of the heterologous object sequence into the target DNA, increases as the distance between the first strand nick and second strand nick decreases. However, it is thought that the risk of DSB formation also increases as the distance between the first strand nick and second strand nick decreases. Correspondingly, it is thought that the number of undesired insertions and/or deletions may increase as the distance between the first strand nick and second strand nick decreases. In some embodiments, the distance between the first strand nick and second strand nick is chosen to balance the benefit of biasing DNA repair toward incorporation of the heterologous object sequence into the target DNA and the risk of DSB formation and of undesired deletions and/or insertions. In some embodiments, a system where the first strand nick and the second strand nick are at least a threshold distance apart has an increased level of desired gene modifying system modification outcomes, a decreased level of undesired deletions, and/or a decreased level of undesired insertions relative to an otherwise similar inward nick orientation system where the first nick and the second nick are less than the a threshold distance apart. In some embodiments the threshold distance(s) is given below.

[0286] In some embodiments, the first nick and the second nick are at least 20, 25, 30, 35, 40, 45, 50, 55, 60, 65, 70, 75, 80, 85, 90, 95, 100, 110, 120, 130, 140, 150, 160, 170, 180, 190, or 200 nucleotides apart. In some embodiments, the first nick and the second nick are no more than 25, 30, 35, 40, 45, 50, 55, 60, 65, 70, 75, 80, 85, 90, 95, 100, 110, 120, 130, 140, 150, 160, 170, 180, 190, 200, or 250 nucleotides apart. In some embodiments, the first nick and the second nick are 20-200, 30-200, 40-200, 50-200, 60-200, 70-200, 80-200, 90-200, 100-200, 110-200, 120-200, 130-200, 140-200, 150-200, 160-200, 170-200, 180-200, 190-200, 20-190, 30-190, 40-190, 50-190, 60-190, 70-190, 80-190, 90-190, 100-190, 110-190, 120-190, 130-190, 140-190, 150-190, 160-190, 170-190, 180-190, 20-180, 30-180, 40-180, 50-180, 60-180, 70-180, 80-180, 90-180, 100-180, 110-180, 120-180, 130-180, 140-180, 150-180, 160-180, 170-180, 20-170, 30-170, 40-170, 50-170, 60-170, 70-170, 80-170, 90-170, 100-170, 110-170, 120-170, 130-170, 140-170, 150-170, 160-170, 20-160, 30-160, 40-160, 50-160, 60-160, 70-160, 80-160, 90-160, 100-160, 110-160, 120-160, 130-160, 140-160, 150-160, 20-150, 30-150, 40-150, 50-150, 60-150, 70-150, 80-150, 90-150, 100-150, 110-150, 120-150, 130-150, 140-150, 20-140, 30-140, 40-140, 50-140, 60-140, 70-140, 80-140, 90-140, 100-140, 110-140, 120-140, 130-140, 20-130, 30-130, 40-130, 50-130, 60-130, 70-130, 80-130, 90-130, 100-130, 110-130, 120-130, 20-120, 30-120, 40-120, 50-120, 60-120, 70-120, 80-120, 90-120, 100-120, 110-120, 20-110, 30-110, 40-110, 50-110, 60-110, 70-110, 80-110, 90-110, 100-110, 20-100, 30-100, 40-100, 50-100, 60-100, 70-100, 80-100, 90-100, 20-90, 30-90, 40-90, 50-90, 60-90, 70-90, 80-90, 20-80, 30-80, 40-80, 50-80, 60-80, 70-80, 20-70, 30-70, 40-70, 50-70, 60-70, 20-60, 30-60, 40-60, 50-60, 20-50, 30-50, 40-50, 20-40, 30-40, or 20-30 nucleotides apart. In some embodiments, the first nick and the second nick are 40-100 nucleotides apart.

[0287] Without wishing to be bound by theory, it is thought that, for gene modifying systems where a second strand nick is provided and an inward nick orientation is selected, increasing the distance between the first strand nick and second strand nick may be preferred. As is described herein, an inward nick orientation may produce a higher number of DSBs than an outward nick orientation, and may result in a higher amount of undesired insertions and deletions than an outward nick orientation, but increasing the distance between the nicks may mitigate that increase in DSBs, undesired deletions, and/or undesired insertions. In some embodiments, an inward nick orientation wherein the first nick and the second nick are at least a threshold distance apart has an increased level of desired gene modifying system modification outcomes, a decreased level of undesired deletions, and/or a decreased level of undesired insertions relative to an otherwise similar inward nick orientation system where the first nick and the second nick are less than the a threshold distance apart. In some embodiments the threshold distance is given below.

[0288] In some embodiments, the first strand nick and the second strand nick are in an inward orientation. In some embodiments, the first strand nick and the second strand nick are in an inward orientation and the first strand nick and second strand nick are at least 100, 110, 120, 130, 140, 150, 160, 170, 180, 190, 200, 220, 240, 260, 280, 300, 350, 400, 450, or 500 nucleotides apart, e.g., at least 100 nucleotides apart, (and optionally no more than 500, 400, 300, 200, 190, 180, 170, 160, 150, 140, 130, or 120 nucleotides apart). In some embodiments, the first strand nick and the second strand nick are in an inward orientation and the first strand nick and second strand nick are 100-200, 110-200, 120-200, 130-200, 140-200, 150-200, 160-200, 170-200, 180-200, 190-200, 100-190, 110-190, 120-190, 130-190, 140-190, 150-190, 160-190, 170-190, 180-190, 100-180, 110-180, 120-180, 130-180, 140-180, 150-180, 160-180, 170-180, 100-170, 110-170, 120-170, 130-170, 140-170, 150-170, 160-170, 100-160, 110-160, 120-160, 130-160, 140-160, 150-160, 100-150, 110-150, 120-150, 130-150, 140-150, 100-140, 110-140, 120-140, 130-140, 100-130, 110-130, 120-130, 100-120, 110-120, or 100-110 nucleotides apart.

### Chemically Modified Nucleic Acids and Nucleic Acid End Features

[0289] A nucleic acid described herein (e.g., a template nucleic acid, e.g., a template RNA; or a nucleic acid (e.g., mRNA) encoding a gene modifying polypeptide; or a gRNA) can comprise unmodified or modified nucleobases. Naturally occurring RNAs are synthesized from four basic ribonucleotides: ATP, CTP, UTP and GTP, but may contain post-transcriptionally modified nucleotides. Further, approximately one hundred different nucleoside modifications have been identified in RNA (Rozenski, J, Crain, P, and McCloskey, J. (1999). The RNA Modification Database: 1999 update. Nucl Acids Res 27:196-197). An RNA can also comprise wholly synthetic nucleotides that do not occur in nature.

[0290] In some embodiments, the chemical modification is one provided in WO/2016/183482, US Pat. Pub. No. 20090286852, of International Application No. WO/2012/019168, WO/2012/045075, WO/2012/135805, WO/2012/158736, WO/2013/039857, WO/2013/039861, WO/2013/052523, WO/2013/090648, WO/2013/096709, WO/2013/101690, WO/2013/106496, WO/2013/130161, WO/2013/151669, WO/2013/151736, WO/2013/151672, WO/2013/151664, WO/2013/151665, WO/2013/151668, WO/2013/151671, WO/2013/151667, WO/2013/151670, WO/2013/151666, WO/2013/151663, WO/2014/028429, WO/2014/081507, WO/2014/093924, WO/2014/093574, WO/2014/113089, WO/2014/144711, WO/2014/144767, WO/2014/144039, WO/2014/152540, WO/2014/152030, WO/2014/152031, WO/2014/152027, WO/2014/152211, WO/2014/158795, WO/2014/159813, WO/2014/164253, WO/2015/006747, WO/2015/034928, WO/2015/034925, WO/2015/038892, WO/2015/048744, WO/2015/051214, WO/2015/051173, WO/2015/051169, WO/2015/058069, WO/2015/085318, WO/2015/089511, WO/2015/105926, WO/2015/164674, WO/2015/196130, WO/2015/196128, WO/2015/196118, WO/2016/011226, WO/2016/011222, WO/2016/011306, WO/2016/014846, WO/2016/022914, WO/2016/036902, WO/2016/077125, or WO/2016/077123, each of which is herein incorporated by reference in its entirety. It is understood that incorporation of a chemically modified nucleotide into a polynucleotide can result in the modification being incorporated into a nucleobase, the backbone, or both, depending on the location of the modification in the nucleotide. In some embodiments, the backbone modification is one provided in EP 2813570, which is herein incorporated by reference in its entirety. In some embodiments, the modified cap is one provided in US Pat. Pub. No. 20050287539, which is herein incorporated by reference in its entirety.

[0291] In some embodiments, the chemically modified nucleic acid (e.g., RNA, e.g., mRNA) comprises one or more of ARCA: anti-reverse cap analog (m27.3′-OGP3G), GP3G (Unmethylated Cap Analog), m7GP3G (Monomethylated Cap Analog), m32.2.7GP3G (Trimethylated Cap Analog), m5CTP (5′-methyl-cytidine triphosphate), m6ATP (N6-methyl-adenosine-5′-triphosphate), s2UTP (2-thio-uridine triphosphate), and Ψ (pseudouridine triphosphate).

[0292] In some embodiments, the chemically modified nucleic acid comprises a 5′ cap, e.g.: a 7-methylguanosine cap (e.g., a O-Me-m7G cap); a hypermethylated cap analog; an NAD+-derived cap analog (e.g., as described in Kiledjian, Trends in Cell Biology 28, 454-464 (2018)); or a modified, e.g., biotinylated, cap analog (e.g., as described in Bednarek et al., Phil Trans R Soc B 373, 20180167 (2018)).

[0293] In some embodiments, the chemically modified nucleic acid comprises a 3′ feature selected from one or more of: a polyA tail; a 16-nucleotide long stem-loop structure flanked by unpaired 5 nucleotides (e.g., as described by Mannironi et al., Nucleic Acid Research 17, 9113-9126 (1989)); a triple-helical structure (e.g., as described by Brown et al., PNAS 109, 19202-19207 (2012)); a tRNA, Y RNA, or vault RNA structure (e.g., as described by Labno et al., Biochemica et Biophysica Acta 1863, 3125-3147 (2016)); incorporation of one or more deoxyribonucleotide triphosphates (dNTPs), 2′O-Methylated NTPs, or phosphorothioate-NTPs; a single nucleotide chemical modification (e.g., oxidation of the 3′ terminal ribose to a reactive aldehyde followed by conjugation of the aldehyde-reactive modified nucleotide); or chemical ligation to another nucleic acid molecule.

[0294] In some embodiments, the nucleic acid (e.g., template nucleic acid) comprises one or more modified nucleotides, e.g., selected from dihydrouridine, inosine, 7-methylguanosine, 5-methylcytidine (5mC), 5′ Phosphate ribothymidine, 2′-O-methyl ribothymidine, 2′-O-ethyl ribothymidine, 2′-fluoro ribothymidine, C-5 propynyl-deoxycytidine (pdC), C-5 propynyl-deoxyuridine (pdU), C-5 propynyl-cytidine (pC), C-5 propynyl-uridine (PU), 5-methyl cytidine, 5-methyl uridine, 5-methyl deoxycytidine, 5-methyl deoxyuridine methoxy, 2,6-diaminopurine, 5′-Dimethoxytrityl-N4-ethyl-2′-deoxycytidine, C-5 propynyl-f-cytidine (pfC), C-5 propynyl-f-uridine (pfU), 5-methyl f-cytidine, 5-methyl f-uridine, C-5 propynyl-m-cytidine (pmC), C-5 propynyl-f-uridine (pmU), 5-methyl m-cytidine, 5-methyl m-uridine, LNA (locked nucleic acid), MGB (minor groove binder) pseudouridine (Y), 1-N-methylpseudouridine (1-Me-Y′), or 5-methoxyuridine (5-MO-U).

[0295] In some embodiments, the nucleic acid comprises a backbone modification, e.g., a modification to a sugar or phosphate group in the backbone. In some embodiments, the nucleic acid comprises a nucleobase modification.

[0296] In some embodiments, the nucleic acid comprises one or more chemically modified nucleotides of Table 9, one or more chemical backbone modifications of Table 10, one or more chemically modified caps of Table 11. For instance, in some embodiments, the nucleic acid comprises two or more (e.g., 3, 4, 5, 6, 7, 8, 9, or 10 or more) different types of chemical modifications. As an example, the nucleic acid may comprise two or more (e.g., 3, 4, 5, 6, 7, 8, 9, or 10 or more) different types of modified nucleobases, e.g., as described herein, e.g., in Table 9. Alternatively, or in combination, the nucleic acid may comprise two or more (e.g., 3, 4, 5, 6, 7, 8, 9, or 10 or more) different types of backbone modifications, e.g., as described herein, e.g., in Table 10. Alternatively, or in combination, the nucleic acid may comprise one or more modified cap, e.g., as described herein, e.g., in Table 11. For instance, in some embodiments, the nucleic acid comprises one or more type of modified nucleobase and one or more type of backbone modification; one or more type of modified nucleobase and one or more modified cap; one or more type of modified cap and one or more type of backbone modification; or one or more type of modified nucleobase, one or more type of backbone modification, and one or more type of modified cap.

[0297] In some embodiments, the nucleic acid comprises one or more (e.g., 2, 3, 4, 5, 6, 7, 8, 9, 10, 20, 30, 40, 50, 60, 70, 80, 90, 100, 150, 200, 250, 300, 350, 400, 450, 500, 600, 700, 800, 900, 1000, or more) modified nucleobases. In some embodiments, all nucleobases of the nucleic acid are modified. In some embodiments, the nucleic acid is modified at one or more (e.g., 2, 3, 4, 5, 6, 7, 8, 9, 10, 20, 30, 40, 50, 60, 70, 80, 90, 100, 150, 200, 250, 300, 350, 400, 450, 500, 600, 700, 800, 900, 1000, or more) positions in the backbone. In some embodiments, all backbone positions of the nucleic acid are modified.

TABLE 9
Modified nucleotides

| | |
|---|---|
| 5-aza-uridine | N2-methyl-6-thio-guanosine |
| 2-thio-5-aza-midine | N2,N2-dimethyl-6-thio-guanosine |
| 2-thiouridine | pyridin-4-one ribonucleoside |
| 4-thio-pseudouridine | 2-thio-5-aza-uridine |
| 2-thio-pseudouridine | 2-thiomidine |
| 5-hydroxyuridine | 4-thio-pseudomidine |
| 3-methyluridine | 2-thio-pseudowidine |
| 5-carboxymethyl-uridine | 3-methylmidine |
| 1-carboxymethyl-pseudouridine | 1-propynyl-pseudomidine |
| 5-propynyl-uridine | 1-methyl-1-deaza-pseudomidine |
| 1-propynyl-pseudouridine | 2-thio-1-methyl-1-deaza-pseudouridine |
| 5-taurinomethyluridine | 4-methoxy-pseudomidine |
| 1-taurinomethyl-pseudouridine | 5′-O-(1-Thiophosphate)-Adenosine |
| 5-taurinomethyl-2-thio-uridine | 5′-O-(1-Thiophosphate)-Cytidine |
| 1-taurinomethyl-4-thio-uridine | 5′-O-(1-thiophosphate)-Guanosine |
| 5-methyl-uridine | 5′-O-(1-Thiophophate)-Uridine |
| 1-methyl-pseudouridine | 5′-O-(1-Thiophosphate)-Pseudouridine |
| 4-thio-1-methyl-pseudouridine | 2′-O-methyl-Adenosine |
| 2-thio-1-methyl-pseudouridine | 2′-O-methyl-Cytidine |
| 1-methyl-1-deaza-pseudouridine | 2′-O-methyl-Guanosine |
| 2-thio-1-methyl-1-deaza-pseudomidine | 2′-O-methyl-Uridine |
| dihydrouridine | 2′-O-methyl-Pseudouridine |
| dihydropseudouridine | 2′-O-methyl-Inosine |
| 2-thio-dihydromidine | 2-methyladenosine |
| 2-thio-dihydropseudouridine | 2-methylthio-N6-methyladenosine |
| 2-methoxyuridine | 2-methylthio-N6 isopentenyladenosine |
| 2-methoxy-4-thio-uridine | 2-methylthio-N6-(cis-hydroxyisopentenyl)adenosine |
| 4-methoxy-pseudouridine | N6-methyl-N6-threonylcarbamoyladenosine |
| 4-methoxy-2-thio-pseudouridine | N6-hydroxynorvalylcarbamoyladenosine |
| 5-aza-cytidine | 2-methylthio-N6-hydroxynorvalyl carbamoyladenosine |
| pseudoisocytidine | 2′-O-ribosyladenosine (phosphate) |
| 3-methyl-cytidine | 1,2′-O-dimethylinosine |
| N4-acetylcytidine | 5,2′-O-dimethylcytidine |
| 5-formylcytidine | N4-acetyl-2′-O-methylcytidine |
| N4-methylcytidine | Lysidine |
| 5-hydroxymethylcytidine | 7-methylguanosine |
| 1-methyl-pseudoisocytidine | N2,2′-O-dimethylguanosine |
| pyrrolo-cytidine | N2,N2,2′-O-trimethylguanosine |
| pyrrolo-pseudoisocytidine | 2′-O-ribosylguanosine (phosphate) |
| 2-thio-cytidine | Wybutosine |
| 2-thio-5-methyl-cytidine | Peroxywybutosine |
| 4-thio-pseudoisocytidine | Hydroxywybutosine |
| 4-thio-1-methyl-pseudoisocytidine | undermodified hydroxywybutosine |
| 4-thio-1-methyl-1-deaza-pseudoisocytidine | methylwyosine |
| 1-methyl-1-deaza-pseudoisocytidine | queuosine |
| zebularine | epoxyqueuosine |
| 5-aza-zebularine | galactosyl-queuosine |
| 5-methyl-zebularine | mannosyl-queuosine |
| 5-aza-2-thio-zebularine | 7-cyano-7-deazaguanosine |
| 2-thio-zebularine | 7-aminomethyl-7-deazaguanosine |
| 2-methoxy-cytidine | archaeosine |
| 2-methoxy-5-methyl-cytidine | 5,2′-O-dimethyluridine |
| 4-methoxy-pseudoisocytidine | 4-thiouridine |
| 4-methoxy-1-methyl-pseudoisocytidine | 5-methyl-2-thiouridine |
| 2-aminopurine | 2-thio-2′-O-methyluridine |
| 2,6-diaminopurine | 3-(3-amino-3-carboxypropyl)uridine |
| 7-deaza-adenine | 5-methoxyuridine |
| 7-deaza-8-aza-adenine | uridine 5-oxyacetic acid |
| 7-deaza-2-aminopurine | uridine 5-oxyacetic acid methyl ester |
| 7-deaza-8-aza-2-aminopurine | 5-(carboxyhydroxymethyl)uridine) |
| 7-deaza-2,6- diaminopurine | 5-(carboxyhydroxymethyl)uridine methyl ester |
| 7-deaza-8-aza-2,6-diarninopurine | 5-methoxycarbonylmethyluridine |
| 1-methyladenosine | 5-methoxycarbonylmethyl-2′-O-methyluridine |
| N6-isopentenyladenosine | 5-methoxycarbonylmethyl-2-thiouridine |
| N6-(cis-hydroxyisopentenyl)adenosine | 5-aminomethyl-2-thiouridine |
| 2-methylthio-N6-(cis-hydroxyisopentenyl) adenosine | 5-methylaminomethyluridine |
| N6-glycinylcarbamoyladenosine | 5-methylaminomethyl-2-thiouridine |
| N6-threonylcarbamoyladenosine | 5-methylaminomethyl-2-selenouridine |
| 2-methylthio-N6-threonyl carbamoyladenosine | 5-carbamoylmethyluridine |
| N6,N6-dimethyladenosine | 5-carbamoylmethyl-2′-O-methyluridine |
| 7-methyladenine | 5-carboxymethylaminomethyluridine |
| 2-methylthio-adenine | 5-carboxymethylaminomethyl-2′-O-methyluridine |
| 2-methoxy-adenine | 5-carboxymethylaminomethyl-2-thiouridine |
| inosine | N4,2′-O-dimethylcytidine |
| 1-methyl-inosine | 5-carboxymethyluridine |
| wyosine | N6,2′-O-dimethyladenosine |
| wybutosine | N,N6,O-2′-trimethyladenosine |
| 7-deaza-guanosine | N2,7-dimethylguanosine |
| 7-deaza-8-aza-guanosine | N2,N2,7-trimethylguanosine |
| 6-thio-guanosine | 3,2′-O-dimethyluridine |
| 6-thio-7-deaza-guanosine | 5-methyldihydrouridine |
| 6-thio-7-deaza-8-aza-guanosine | 5-formyl-2′-O-methylcytidine |
| 7-methyl-guanosine | 1,2′-O-dimethylguanosine |
| 6-thio-7-methyl-guanosine | 4-demethylwyosine |
| 7-methylinosine | Isowyosine |
| 6-methoxy-guanosine | N6-acetyladenosine |
| 1-methylguanosine | |
| N2-methylguanosine | |
| N2,N2-dimethylguanosine | |
| 8-oxo-guanosine | |
| 7-methyl-8-oxo-guanosine | |
| 1-methyl-6-thio-guanosine | |

TABLE 10
Backbone modifications
2′-O-Methyl backbone
Peptide Nucleic Acid (PNA) backbone
phosphorothioate backbone
morpholino backbone
carbamate backbone
siloxane backbone
sulfide backbone
sulfoxide backbone
sulfone backbone
formacetyl backbone
thioformacetyl backbone
methyleneformacetyl backbone
riboacetyl backbone
alkene containing backbone
sulfamate backbone
sulfonate backbone
sulfonamide backbone
methyleneimino backbone
methylenehydrazino backbone
amide backbone

TABLE 11
Modified caps
m7GpppA
m7GpppC
m2,7GpppG
m2,2,7GpppG
m7Gpppm7G
m7,2′OmeGpppG
m72′dGpppG
m7,3′OmeGpppG
m7,3′dGpppG
GppppG
m7GppppG
m7GppppA
m7GppppC
m2,7GppppG
m2,2,7GppppG
m7Gppppm7G
m7,2′OmeGppppG
m72′dGppppG
m7,3′OmeGppppG
m7,3′dGppppG

[0298] The nucleotides comprising the template of the gene modifying system can be natural or modified bases, or a combination thereof. For example, the template may contain pseudouridine, dihydrouridine, inosine, 7-methylguanosine, or other modified bases. In some embodiments, the template may contain locked nucleic acid nucleotides. In some embodiments, the modified bases used in the template do not inhibit the reverse transcription of the template. In some embodiments, the modified bases used in the template may improve reverse transcription, e.g., specificity or fidelity.

[0299] In some embodiments, an RNA component of the system (e.g., a template RNA or a gRNA) comprises one or more nucleotide modifications. In some embodiments, the modification pattern of a gRNA can significantly affect in vivo activity compared to unmodified or end-modified guides (e.g., as shown in FIG. 1D from Finn et al. Cell Rep 22 (9): 2227-2235 (2018); incorporated herein by reference in its entirety). Without wishing to be bound by theory, this process may be due, at least in part, to a stabilization of the RNA conferred by the modifications. Non-limiting examples of such modifications may include 2′-O-methyl (2′-O-Me), 2′-0-(2-methoxyethyl) (2′-0-MOE), 2′-fluoro (2′-F), phosphorothioate (PS) bond between nucleotides, G-C substitutions, and inverted abasic linkages between nucleotides and equivalents thereof.

[0300] In some embodiments, the template RNA (e.g., at the portion thereof that binds a target site) or the guide RNA comprises a 5′ terminus region. In some embodiments, the template RNA or the guide RNA does not comprise a 5′ terminus region. In some embodiments, the 5′ terminus region comprises a gRNA spacer region, e.g., as described with respect to sgRNA in Briner AE et al, Molecular Cell 56:333-339 (2014) (incorporated herein by reference in its entirety; applicable herein, e.g., to all guide RNAs). In some embodiments, the 5′ terminus region comprises a 5′ end modification. In some embodiments, a 5′ terminus region with or without a spacer region may be associated with a crRNA, trRNA, sgRNA and/or dgRNA. The gRNA spacer region can, in some instances, comprise a guide region, guide domain, or targeting domain.

[0301] In some embodiments, the template RNAs (e.g., at the portion thereof that binds a target site) or guide RNAs described herein comprises any of the sequences shown in Table 4 of WO2018107028A1, incorporated herein by reference in its entirety. In some embodiments, where a sequence shows a guide and/or spacer region, the composition may comprise this region or not. In some embodiments, a guide RNA comprises one or more of the modifications of any of the sequences shown in Table 4 of WO2018107028A1, e.g., as identified therein by a SEQ ID NO. In embodiments, the nucleotides may be the same or different, and/or the modification pattern shown may be the same or similar to a modification pattern of a guide sequence as shown in Table 4 of WO2018107028A1. In some embodiments, a modification pattern includes the relative position and identity of modifications of the gRNA or a region of the gRNA (e.g. 5′ terminus region, lower stem region, bulge region, upper stem region, nexus region, hairpin 1 region, hairpin 2 region, 3′ terminus region). In some embodiments, the modification pattern contains at least 50%, 55%, 60%, 70%, 75%, 80%, 85%, 90%, 95%, 96%, 97%, 98%, 99%, or 100% of the modifications of any one of the sequences shown in the sequence column of Table 4 of WO2018107028A1, and/or over one or more regions of the sequence. In some embodiments, the modification pattern is at least 50%, 55%, 60%, 70%, 75%, 80%, 85%, 90%, 95%, 96%, 97%, 98%, 99%, or 100% identical to the modification pattern of any one of the sequences shown in the sequence column of Table 4 of WO2018107028A1. In some embodiments, the modification pattern is at least 50%, 55%, 60%, 70%, 75%, 80%, 85%, 90%, 95%, 96%, 97%, 98%, 99%, or 100% identical over one or more regions of the sequence shown in Table 4 of WO2018107028A1, e.g., in a 5 ‘terminus region, lower stem region, bulge region, upper stem region, nexus region, hairpin 1 region, hairpin 2 region, and/or 3’ terminus region. In some embodiments, the modification pattern is least 50%, 55%, 60%, 70%, 75%, 80%, 85%, 90%, 95%, 96%, 97%, 98%, 99%, or 100% identical to the modification pattern of a sequence over the 5′ terminus region. In some embodiments, the modification pattern is least 50%, 55%, 60%, 70%, 75%, 80%, 85%, 90%, 95%, 96%, 97%, 98%, 99%, or 100% identical over the lower stem. In some embodiments, the modification pattern is least 50%, 55%, 60%, 70%, 75%, 80%, 85%, 90%, 95%, 96%, 97%, 98%, 99%, or 100% identical over the bulge. In some embodiments, the modification pattern is least 50%, 55%, 60%, 70%, 75%, 80%, 85%, 90%, 95%, 96%, 97%, 98%, 99%, or 100% identical over the upper stem. In some embodiments, the modification pattern is least 50%, 55%, 60%, 70%, 75%, 80%, 85%, 90%, 95%, 96%, 97%, 98%, 99%, or 100% identical over the nexus. In some embodiments, the modification pattern is least 50%, 55%, 60%, 70%, 75%, 80%, 85%, 90%, 95%, 96%, 97%, 98%, 99%, or 100% identical over the hairpin 1. In some embodiments, the modification pattern is least 50%, 55%, 60%, 70%, 75%, 80%, 85%, 90%, 95%, 96%, 97%, 98%, 99%, or 100% identical over the hairpin 2. In some embodiments, the modification pattern is least 50%, 55%, 60%, 70%, 75%, 80%, 85%, 90%, 95%, 96%, 97%, 98%, 99%, or 100% identical over the 3′ terminus. In some embodiments, the modification pattern differs from the modification pattern of a sequence of Table 4 of WO2018107028A1, or a region (e.g. 5′ terminus, lower stem, bulge, upper stem, nexus, hairpin 1, hairpin 2, 3′ terminus) of such a sequence, e.g., at 0, 1, 2, 3, 4, 5, 6, or more nucleotides. In some embodiments, the gRNA comprises modifications that differ from the modifications of a sequence of Table 4 of WO2018107028A1, e.g., at 0, 1, 2, 3, 4, 5, 6, or more nucleotides. In some embodiments, the gRNA comprises modifications that differ from modifications of a region (e.g. 5 ‘terminus, lower stem, bulge, upper stem, nexus, hairpin 1, hairpin 2, 3’ terminus) of a sequence of Table 4 of WO2018107028A1, e.g., at 0, 1, 2, 3, 4, 5, 6, or more nucleotides.

[0302] In some embodiments, the template RNAs (e.g., at the portion thereof that binds a target site) or the gRNA comprises a 2′-O-methyl (2′-O-Me) modified nucleotide. In some embodiments, the gRNA comprises a 2′-O-(2-methoxy ethyl) (2′-O-moe) modified nucleotide. In some embodiments, the gRNA comprises a 2′-fluoro (2′-F) modified nucleotide. In some embodiments, the gRNA comprises a phosphorothioate (PS) bond between nucleotides. In some embodiments, the gRNA comprises a 5′ end modification, a 3′ end modification, or 5′ and 3′ end modifications. In some embodiments, the 5′ end modification comprises a phosphorothioate (PS) bond between nucleotides. In some embodiments, the 5′ end modification comprises a 2′-O-methyl (2′-O-Me), 2′-O-(2-methoxy ethyl) (2′-O-MOE), and/or 2′-fluoro (2′-F) modified nucleotide. In some embodiments, the 5′ end modification comprises at least one phosphorothioate (PS) bond and one or more of a 2′-O-methyl (2′-O-Me), 2′-O-(2-methoxyethyl) (2′-O-MOE), and/or 2′-fluoro (2′-F) modified nucleotide. The end modification may comprise a phosphorothioate (PS), 2′-O-methyl (2′-O-Me), 2′-O-(2-methoxyethyl) (2′-O-MOE), and/or 2′-fluoro (2′-F) modification. Equivalent end modifications are also encompassed by embodiments described herein. In some embodiments, the template RNA or gRNA comprises an end modification in combination with a modification of one or more regions of the template RNA or gRNA. Additional exemplary modifications and methods for protecting RNA, e.g., gRNA, and formulae thereof, are described in WO2018126176A1, which is incorporated herein by reference in its entirety.

[0303] In some embodiments, structure-guided and systematic approaches are used to introduce modifications (e.g., 2′-OMe-RNA, 2′-F-RNA, and PS modifications) to a template RNA or guide RNA, for example, as described in Mir et al. Nat Commun 9:2641 (2018) (incorporated by reference herein in its entirety). In some embodiments, the incorporation of 2′-F-RNAs increases thermal and nuclease stability of RNA: RNA or RNA: DNA duplexes, e.g., while minimally interfering with C3′-endo sugar puckering. In some embodiments, 2′-F may be better tolerated than 2′-OMe at positions where the 2′-OH is important for RNA: DNA duplex stability. In some embodiments, a crRNA comprises one or more modifications that do not reduce Cas9 activity, e.g., C10, C20, or C21 (fully modified), e.g., as described in Supplementary Table 1 of Mir et al. Nat Commun 9:2641 (2018), incorporated herein by reference in its entirety. In some embodiments, a tracrRNA comprises one or more modifications that do not reduce Cas9 activity, e.g., T2, T6, T7, or T8 (fully modified) of Supplementary Table 1 of Mir et al. Nat Commun 9:2641 (2018). In some embodiments, a crRNA comprises one or more modifications (e.g., as described herein) may be paired with a tracrRNA comprising one or more modifications, e.g., C20 and T2. In some embodiments, a gRNA comprises a chimera, e.g., of a crRNA and a tracrRNA (e.g., Jinek et al. Science 337 (6096): 816-821 (2012)). In embodiments, modifications from the crRNA and tracrRNA are mapped onto the single-guide chimera, e.g., to produce a modified gRNA with enhanced stability.

[0304] In some embodiments, gRNA molecules may be modified by the addition or subtraction of the naturally occurring structural components, e.g., hairpins. In some embodiments, a gRNA may comprise a gRNA with one or more 3′ hairpin elements deleted, e.g., as described in WO2018106727, incorporated herein by reference in its entirety. In some embodiments, a gRNA may contain an added hairpin structure, e.g., an added hairpin structure in the spacer region, which was shown to increase specificity of a CRISPR-Cas system in the teachings of Kocak et al. Nat Biotechnol 37 (6): 657-666 (2019). Additional modifications, including examples of shortened gRNA and specific modifications improving in vivo activity, can be found in US20190316121, incorporated herein by reference in its entirety.

[0305] In some embodiments, structure-guided and systematic approaches (e.g., as described in Mir et al. Nat Commun 9:2641 (2018); incorporated herein by reference in its entirety) are employed to find modifications for the template RNA. In embodiments, the modifications are identified with the inclusion or exclusion of a guide region of the template RNA. In some embodiments, a structure of polypeptide bound to template RNA is used to determine non-protein-contacted nucleotides of the RNA that may then be selected for modifications, e.g., with lower risk of disrupting the association of the RNA with the polypeptide. Secondary structures in a template RNA can also be predicted in silico by software tools, e.g., the RNAstructure tool available at rna.urmc.rochester.edu/RNAstructureWeb (Bellaousov et al. Nucleic Acids Res 41: W471-W474 (2013); incorporated by reference herein in its entirety), e.g., to determine secondary structures for selecting modifications, e.g., hairpins, stems, and/or bulges.

### Production of Compositions and Systems

[0306] As will be appreciated by one of skill, methods of designing and constructing nucleic acid constructs and proteins or polypeptides (such as the systems, constructs and polypeptides described herein) are routine in the art. Generally, recombinant methods may be used. See, in general, Smales & James (Eds.), Therapeutic Proteins: Methods and Protocols (Methods in Molecular Biology), Humana Press (2005); and Crommelin, Sindelar & Meibohm (Eds.), Pharmaceutical Biotechnology: Fundamentals and Applications, Springer (2013). Methods of designing, preparing, evaluating, purifying and manipulating nucleic acid compositions are described in Green and Sambrook (Eds.), Molecular Cloning: A Laboratory Manual (Fourth Edition), Cold Spring Harbor Laboratory Press (2012).

[0307] The disclosure provides, in part, a nucleic acid, e.g., vector, encoding a gene modifying polypeptide described herein, a template nucleic acid described herein, or both. In some embodiments, a vector comprises a selective marker, e.g., an antibiotic resistance marker. In some embodiments, the antibiotic resistance marker is a kanamycin resistance marker. In some embodiments, the antibiotic resistance marker does not confer resistance to beta-lactam antibiotics. In some embodiments, the vector does not comprise an ampicillin resistance marker. In some embodiments, the vector comprises a kanamycin resistance marker and does not comprise an ampicillin resistance marker. In some embodiments, a vector encoding a gene modifying polypeptide is integrated into a target cell genome (e.g., upon administration to a target cell, tissue, organ, or subject). In some embodiments, a vector encoding a gene modifying polypeptide is not integrated into a target cell genome (e.g., upon administration to a target cell, tissue, organ, or subject). In some embodiments, a vector encoding a template nucleic acid (e.g., template RNA) is not integrated into a target cell genome (e.g., upon administration to a target cell, tissue, organ, or subject). In some embodiments, if a vector is integrated into a target site in a target cell genome, the selective marker is not integrated into the genome. In some embodiments, if a vector is integrated into a target site in a target cell genome, genes or sequences involved in vector maintenance (e.g., plasmid maintenance genes) are not integrated into the genome. In some embodiments, if a vector is integrated into a target site in a target cell genome, transfer regulating sequences (e.g., inverted terminal repeats, e.g., from an AAV) are not integrated into the genome. In some embodiments, administration of a vector (e.g., encoding a gene modifying polypeptide described herein, a template nucleic acid described herein, or both) to a target cell, tissue, organ, or subject results in integration of a portion of the vector into one or more target sites in the genome(s) of said target cell, tissue, organ, or subject. In some embodiments, less than 99, 95, 90, 80, 70, 60, 50, 40, 30, 20, 10, 5, 4, 3, 2, or 1% of target sites (e.g., no target sites) comprising integrated material comprise a selective marker (e.g., an antibiotic resistance gene), a transfer regulating sequence (e.g., an inverted terminal repeat, e.g., from an AAV), or both from the vector.

[0308] Exemplary methods for producing a therapeutic pharmaceutical protein or polypeptide described herein involve expression in mammalian cells, although recombinant proteins can also be produced using insect cells, yeast, bacteria, or other cells under control of appropriate promoters. Mammalian expression vectors may comprise non-transcribed elements such as an origin of replication, a suitable promoter, and other 5′ or 3′ flanking non-transcribed sequences, and 5′ or 3′ non-translated sequences such as necessary ribosome binding sites, a polyadenylation site, splice donor and acceptor sites, and termination sequences. DNA sequences derived from the SV40 viral genome, for example, SV40 origin, early promoter, splice, and polyadenylation sites may be used to provide other genetic elements required for expression of a heterologous DNA sequence. Appropriate cloning and expression vectors for use with bacterial, fungal, yeast, and mammalian cellular hosts are described in Green & Sambrook, Molecular Cloning: A Laboratory Manual (Fourth Edition), Cold Spring Harbor Laboratory Press (2012).

[0309] Various mammalian cell culture systems can be employed to express and manufacture recombinant protein. Examples of mammalian expression systems include CHO, COS, HEK293, HeLA, and BHK cell lines. Processes of host cell culture for production of protein therapeutics are described in Zhou and Kantardjieff (Eds.), Mammalian Cell Cultures for Biologics Manufacturing (Advances in Biochemical Engineering/Biotechnology), Springer (2014). Compositions described herein may include a vector, such as a viral vector, e.g., a lentiviral vector, encoding a recombinant protein. In some embodiments, a vector, e.g., a viral vector, may comprise a nucleic acid encoding a recombinant protein.

[0310] Purification of protein therapeutics is described in Franks, Protein Biotechnology: Isolation, Characterization, and Stabilization, Humana Press (2013); and in Cutler, Protein Purification Protocols (Methods in Molecular Biology), Humana Press (2010).

[0311] The disclosure also provides compositions and methods for the production of template nucleic acid molecules (e.g., template RNAs) with specificity for a gene modifying polypeptide and/or a genomic target site. In an aspect, the method comprises production of RNA segments including an upstream homology segment, a heterologous object sequence segment, a gene modifying polypeptide binding motif, and a gRNA segment.

### Applications

### Therapeutic Applications

[0312] In some embodiments, a gene modifying system as described herein can be used to modify a cell (e.g., an animal cell, plant cell, or fungal cell). In some embodiments, a gene modifying system as described herein can be used to modify a mammalian cell (e.g., a human cell). In some embodiments, a gene modifying system as described herein can be used to modify a cell from a livestock animal (e.g., a cow, horse, sheep, goat, pig, llama, alpaca, camel, yak, chicken, duck, goose, or ostrich). In some embodiments, a gene modifying system as described herein can be used as a laboratory tool or a research tool, or used in a laboratory method or research method, e.g., to modify an animal cell, e.g., a mammalian cell (e.g., a human cell), a plant cell, or a fungal cell.

[0313] By integrating coding genes into a RNA sequence template, the gene modifying system can address therapeutic needs, for example, by providing expression of a therapeutic transgene in individuals with loss-of-function mutations, by replacing gain-of-function mutations with normal transgenes, by providing regulatory sequences to eliminate gain-of-function mutation expression, and/or by controlling the expression of operably linked genes, transgenes and systems thereof. In certain embodiments, the RNA sequence template encodes a promotor region specific to the therapeutic needs of the host cell, for example a tissue specific promotor or enhancer. In still other embodiments, a promotor can be operably linked to a coding sequence.

[0314] In some embodiments, an insertion, deletion, substitution, or combination thereof, increases or decreases expression (e.g. transcription or translation) of a target gene. In some embodiments, an insertion, deletion, substitution, or combination thereof, increases or decreases expression (e.g. transcription or translation) of a target gene by altering, adding, or deleting sequences in a promoter or enhancer, e.g. sequences that bind transcription factors. In some embodiments, an insertion, deletion, substitution, or combination thereof alters translation of a target gene (e.g. alters an amino acid sequence), inserts or deletes a start or stop codon, alters or fixes the translation frame of a gene. In some embodiments, an insertion, deletion, substitution, or combination thereof alters splicing of a target gene, e.g. by inserting, deleting, or altering a splice acceptor or donor site. In some embodiments, an insertion, deletion, substitution, or combination thereof alters transcript or protein half-life. In some embodiments, an insertion, deletion, substitution, or combination thereof, alters, increases, decreases the activity of a target gene, e.g. a protein encoded by the target gene.

### Compensatory Edits

[0315] In some embodiments, the systems or methods provided herein can be used to introduce a compensatory edit. In some embodiments, the compensatory edit is at a position of a gene associated with a disease or disorder, which is different from the position of a disease-causing mutation. In some embodiments, the compensatory mutation is not in the gene containing the causative mutation. In some embodiments, the compensatory edit can negate or compensate for a disease-causing mutation. In some embodiments, the compensatory edit can be introduced by the systems or methods provided herein to suppress or reverse the mutant effect of a disease-causing mutation.

### Regulatory Edits

[0316] In some embodiments, the systems or methods provided herein can be used to introduce a regulatory edit. In some embodiments, the regulatory edit is introduced to a regulatory sequence of a gene, for example, a gene promoter, gene enhancer, gene repressor, or a sequence that regulates gene splicing. In some embodiments, the regulatory edit increases or decreases the expression level of a target gene. In some embodiments, the target gene is the same as the gene containing a disease-causing mutation. In some embodiments, the target gene is different from the gene containing a disease-causing mutation.

### Repeat Expansion Diseases

[0317] In some embodiments, the systems or methods provided herein can be used to treat a repeat expansion disease. In some embodiments, the systems or methods provided herein, for example, those comprising gene modifying polypeptides, can be used to treat repeat expansion diseases by resetting the number of repeats at the locus according to a customized RNA template.

### Therapeutic Indications

[0318] In some embodiments the systems or methods provided herein can be used to treat an indication of any of Tables 12-15, below. For instance, in some embodiments the gene modifying system modifies a target site in genomic DNA in a cell, wherein the target site is in a gene of any of Tables 12-15, e.g., in a subject having the corresponding indication listed in any of Tables 12-15. In some embodiments, the cell is a liver cell, and the target site is in a gene of Table 12, e.g., in a subject having the corresponding indication listed in Table 12. In some embodiments, the cell is a hematopoietic stem cell (HSC), and the target site is in a gene of Table 13, e.g., in a subject having the corresponding indication listed in Table 13. In some embodiments, the cell is a central nervous system (CNS) cell, and the target site is in a gene of Table 14, e.g., in a subject having the corresponding indication listed in Table 14. In some embodiments, the cell is a cell of the eye, and the target site is in a gene of Table 15, e.g., in a subject having the corresponding indication listed in Table 15. In some embodiments, the target site is in a coding region in the gene. In some embodiments, the target site is in a promoter. In some embodiments, the target site is in a 5′ UTR or a 3′ UTR of the gene of any of Tables 12-15. In some embodiments, the target site is in an intron or exon of the gene. In some embodiments, the gene modifying system corrects a mutation in the gene. In some embodiments, the gene modifying polypeptide inserts a sequence that had been deleted from the gene (e.g., through a disease-causing mutation). In some embodiments, the gene modifying system deletes a sequence that had been duplicated in the gene (e.g., through a disease-causing mutation). In some embodiments, the gene modifying system replaces a mutation (e.g., a disease-causing mutation) with the corresponding wild-type sequence. In some embodiments, the mutation is a substitution, insertion, deletion, or inversion.

TABLE 12
Indications and genetic targets, e.g., in the liver

| Disease | Gene Affected |
|---|---|
| Acute intermittent porphyria | HMBS |
| Alpha-1-antitrypsin deficiency (AAT) | SERPINA1 |
| Arginase deficiency | ARG1 |
| Argininosuccinate lyase deficiency | ASL |
| Carbamoyl phosphate synthetase I deficiency | CPS1 |
| Citrin deficiency | SLC25A13 |
| Citrullinemia type I | ASS1 |
| Crigler-Najjar syndrome (Hyperbilirubinemia) | UGT1A1 |
| Fabry disease | GLA |
| Familial hypercholesterolemia 4 (homozygous familial cholesterolemia) | LDLRAP1 |
| Glutaric aciduria I | GCDH |
| Glutaric aciduria II (multiple acyl-CoA dehydrogenase deficiency) | GA IIA: ETFA |
| | GA IIB: ETFB |
| | GA IIC: ETFDH |
| Glycogen storage disease type IV | GBE1 |
| Hemophilia A | F8 |
| Hemophilia B | F9 |
| Hereditary hemochromatosis | HFE |
| Homocystinuria | CBS |
| Maple syrup urine disease (MSUD) | Type Ia: BCKDHA |
| | Type Ib: BCKDHB |
| | Type II: DBT |
| Methylmalonic acidemia (methylmalonyl-CoA mutase deficiency) | MMUT |
| MPS 1S (Scheie syndrome) | IDUA |
| MPS2 | IDS |
| MPS3 (San Filippo Syndrome) | Type IIIa: SGSH |
| | Type IIIb: NAGLU |
| | Type IIIc: HGSNAT |
| | Type IIId: GNS |
| MPS4 | Type IVA: GALNS |
| | Type IVB: GLB1 |
| MPS6 | ARSB |
| MPS7 | GUSB |
| Ornithine transcarbamylase deficiency | OTC |
| Phenylketonuria (phenylalanine hydroxylase deficiency) | PAH |
| Polycystic Liver Disease | PCLD1: PRKCSH |
| | PCLD2: SEC63 |
| | PLCD3: ALG8 |
| | PCLD4: LRP5 |
| Pompe disease | GAA |
| Primary Hyperoxaluria 1 (oxalosis) | AGXT |
| Progressive familial intrahepatic cholestasis type 1 | ATP8B1 |
| Progressive familial intrahepatic cholestasis type 2 | ABCB11 |
| Progressive familial intrahepatic cholestasis type 3 | ABCB4 |
| Propionic acidemia | PCCB; PCCA |
| Pyruvate carboxylase deficiency | PC |
| Tyrosinemia type I | FAH |
| Wilson′s disease | ATP7B |

TABLE 13
Indications and genetic targets for HSCs

| Disease | Gene Affected |
|---|---|
| Adrenoleukodystrophy (CALD) | ABCD1 |
| Alpha-mannosidosis | MAN2B1 |
| Blackfan-Diamond Anemia | |
| Congenital amegakaryocytic thrombocytopenia | MPL |
| Dyskeratosis Congenita | TERC |
| Fanconi anemia | FANC |
| Gaucher disease | GBA |
| Globoid cell leukodystrophy (Krabbe disease) | GALC |
| Hemophagocytic lymphohistiocytosis | PRF1; STX11; STXBP2; UNC13D |
| Malignant infantile osteopetrosis- | Many genes implicated |
| autosomal recessive osteopetrosis | |
| Metachromatic leukodystrophy | PSAP |
| MPS 1S (Scheie syndrome) | IDUA |
| MPS2 | IDS |
| MPS7 | GUSB |
| Mucolipidosis II | GNPTAB |
| Niemann-Pick disease A and B | SMPD1 |
| Niemann-Pick disease C | NPC1 |
| Pompe disease | GAA |
| Pyruvate kinase deficiency (PKD) | PKLR |
| Sickle cell disease (SCD) | HBB |
| Tay Sachs | HEXA |
| Thalassemia | HBB |

TABLE 14
Indications and genetic targets for the CNS

| Disease | Gene Affected |
|---|---|
| Alpha-mannosidosis | MAN2B1 |
| Ataxia-telangiectasia | ATM |
| CADASIL | NOTCH3 |
| Canavan disease | ASPA |
| Carbamoyl-phosphate synthetase 1 deficiency | CPS1 |
| CLN1 disease | PPT1 |
| CLN2 Disease | TPP1 |
| CLN3 Disease (Juvenile neuronal ceroid | CLN3 |
| lipofuscinosis, Batten Disease) | |
| Coffin-Lowry syndrome | RPS6KA3 |
| Congenital myasthenic syndrome 5 | COLQ |
| Cornelia de Lange syndrome (NIPBL) | NIPBL |
| Cornelia de Lange syndrome (SMC1A) | SMC1A |
| Dravet syndrome (SCN1A) | SCN1A |
| Glycine encephalopathy (GLDC) | GLDC |
| GM1 gangliosidosis | GLB1 |
| Huntington′s Disease | HTT |
| Hydrocephalus with stenosis of the aqueduct of Sylvius | L1CAM |
| Leigh Syndrome | SURF1 |
| Metachromatic leukodystrophy (ARSA) | ARSA |
| MPS type 2 | IDS |
| MPS type 3 | Type 3a: SGSH |
| | Type 3b: NAGLU |
| Mucolipidosis IV | MCOLN1 |
| Neurofibromatosis Type 1 | NF1 |
| Neurofibromatosis type 2 | NF2 |
| Pantothenate kinase-associated neurodegeneration | PANK2 |
| Pyridoxine-dependent epilepsy | ALDH7A1 |
| Rett syndrome (MECP2) | MECP2 |
| Sandhoff disease | HEXB |
| Semantic dementia (Frontotemporal dementia) | MAPT |
| Spinocerebellar ataxia with axonal neuropathy | SETX |
| (Ataxia with Oculomotor Apraxia) | |
| Tay-Sachs disease | HEXA |
| X-linked Adrenoleukodystrophy | ABCD1 |

TABLE 15
Indications and genetic targets for the eye

| Disease | Gene Affected |
|---|---|
| Achromatopsia | CNGB3 |
| Amaurosis Congenita (LCA1) | GUCY2D |
| Amaurosis Congenita (LCA10) | CEP290 |
| Amaurosis Congenita (LCA2) | RPE65 |
| Amaurosis Congenita (LCA8) | CRB1 |
| Choroideremia | CHM |
| Cone Rod Dystrophy (ABCA4) | ABCA4 |
| Cone Rod Dystrophy (GUCY2D) | GUCY2D |
| Cystinosis, Ocular Nonnephropathic | CTNS |
| Doyne Honeycomb Retinal Dystrophy (DHRD) | EFEMP1 |
| Familial Oculoleptomeningeal Amyloidosis | TTR |
| Keratitis-ichthyosis-deafness (KID) | GJB2 |
| Lattice corneal dystrophy type I | TGFBI |
| Macular Corneal Dystrophy (MCD) | CHST6 |
| Meesmann Corneal Dystrophy | KRT12; KRT3 |
| Optic Atrophy | OPA1 |
| Retinitis Pigmentosa (AR) | USH2A |
| Retinitis Rigmentosa (AD) | RHO |
| Sorsby Fundus Dystrophy | TIMP3 |
| Stargardt Disease | ABCA4 |

### Application to Plants

[0319] In some embodiments, the systems or methods provided herein can be used to modify a plant or a plant part (e.g., leaves, roots, flowers, fruits, or seeds), e.g., to increase the fitness of a plant.

### Delivery to a Plant

[0320] Provided herein are methods of delivering a gene modifying system described herein to a plant. Included are methods for delivering a gene modifying system to a plant by contacting the plant, or part thereof, with a gene modifying system. The methods are useful for modifying the plant to, e.g., increase the fitness of a plant.

[0321] More specifically, in some embodiments, a nucleic acid described herein (e.g., a nucleic acid encoding a gene modifying system) may be encoded in a vector, e.g., inserted adjacent to a plant promoter, e.g., a maize ubiquitin promoter (ZmUBI) in a plant vector (e.g., pHUC411). In some embodiments, the nucleic acids described herein are introduced into a plant (e.g., japonica rice) or part of a plant (e.g., a callus of a plant) via agrobacteria. In some embodiments, the systems and methods described herein can be used in plants by replacing a plant gene (e.g., hygromycin phosphotransferase (HPT)) with a null allele (e.g., containing a base substitution at the start codon). Systems and methods for modifying a plant genome are described in Xu et. al. Development of plant prime-editing systems for precise genome editing, 2020, Plant Communications.

[0322] In one aspect, provided herein is a method of increasing the fitness of a plant, the method including delivering to the plant the gene modifying system described herein (e.g., in an effective amount and duration) to increase the fitness of the plant relative to an untreated plant (e.g., a plant that has not been delivered the gene modifying system).

[0323] An increase in the fitness of the plant as a consequence of delivery of a gene modifying system can manifest in a number of ways, e.g., thereby resulting in a better production of the plant, for example, an improved yield, improved vigor of the plant or quality of the harvested product from the plant, an improvement in pre- or post-harvest traits deemed desirable for agriculture or horticulture (e.g., taste, appearance, shelf life), or for an improvement of traits that otherwise benefit humans (e.g., decreased allergen production). An improved yield of a plant relates to an increase in the yield of a product (e.g., as measured by plant biomass, grain, seed or fruit yield, protein content, carbohydrate or oil content or leaf area) of the plant by a measurable amount over the yield of the same product of the plant produced under the same conditions, but without the application of the instant compositions or compared with application of conventional plant-modifying agents. For example, yield can be increased by at least about 0.5%, about 1%, about 2%, about 3%, about 4%, about 5%, about 10%, about 20%, about 30%, about 40%, about 50%, about 60%, about 70%, about 80%, about 90%, about 100%, or more than 100%. In some instances, the method is effective to increase yield by about 2×-fold, 5×-fold, 10×-fold, 25×-fold, 50×-fold, 75×-fold, 100×-fold, or more than 100×-fold relative to an untreated plant. Yield can be expressed in terms of an amount by weight or volume of the plant or a product of the plant on some basis. The basis can be expressed in terms of time, growing area, weight of plants produced, or amount of a raw material used. For example, such methods may increase the yield of plant tissues including, but not limited to: seeds, fruits, kernels, bolls, tubers, roots, and leaves.

[0324] An increase in the fitness of a plant as a consequence of delivery of a gene modifying system can also be measured by other means, such as an increase or improvement of the vigor rating, the stand (the number of plants per unit of area), plant height, stalk circumference, stalk length, leaf number, leaf size, plant canopy, visual appearance (such as greener leaf color), root rating, emergence, protein content, increased tillering, bigger leaves, more leaves, fewer dead basal leaves, stronger tillers, less fertilizer needed, fewer seeds needed, more productive tillers, earlier flowering, early grain or seed maturity, less plant verse (lodging), increased shoot growth, earlier germination, or any combination of these factors, by a measurable or noticeable amount over the same factor of the plant produced under the same conditions, but without the administration of the instant compositions or with application of conventional plant-modifying agents.

[0325] Accordingly, provided herein is a method of modifying a plant, the method including delivering to the plant an effective amount of any of the gene modifying systems provided herein, wherein the method modifies the plant and thereby introduces or increases a beneficial trait in the plant (e.g., by about 1%, 2%, 5%, 10%, 20%, 30%, 40%, 50%, 60%, 70%, 80%, 90%, 100%, or more than 100%) relative to an untreated plant. In particular, the method may increase the fitness of the plant (e.g., by about 1%, 2%, 5%, 10%, 20%, 30%, 40%, 50%, 60%, 70%, 80%, 90%, 100%, or more than 100%) relative to an untreated plant.

[0326] In some instances, the increase in plant fitness is an increase (e.g., by about 1%, 2%, 5%, 10%, 20%, 30%, 40%, 50%, 60%, 70%, 80%, 90%, 100%, or more than 100%) in disease resistance, drought tolerance, heat tolerance, cold tolerance, salt tolerance, metal tolerance, herbicide tolerance, chemical tolerance, water use efficiency, nitrogen utilization, resistance to nitrogen stress, nitrogen fixation, pest resistance, herbivore resistance, pathogen resistance, yield, yield under water-limited conditions, vigor, growth, photosynthetic capability, nutrition, protein content, carbohydrate content, oil content, biomass, shoot length, root length, root architecture, seed weight, or amount of harvestable produce.

[0327] In some instances, the increase in fitness is an increase (e.g., by about 1%, 2%, 5%, 10%, 20%, 30%, 40%, 50%, 60%, 70%, 80%, 90%, 100%, or more than 100%) in development, growth, yield, resistance to abiotic stressors, or resistance to biotic stressors. An abiotic stress refers to an environmental stress condition that a plant or a plant part is subjected to that includes, e.g., drought stress, salt stress, heat stress, cold stress, and low nutrient stress. A biotic stress refers to an environmental stress condition that a plant or plant part is subjected to that includes, e.g. nematode stress, insect herbivory stress, fungal pathogen stress, bacterial pathogen stress, or viral pathogen stress. The stress may be temporary, e.g. several hours, several days, several months, or permanent, e.g. for the life of the plant.

[0328] In some instances, the increase in plant fitness is an increase (e.g., by about 1%, 2%, 5%, 10%, 20%, 30%, 40%, 50%, 60%, 70%, 80%, 90%, 100%, or more than 100%) in quality of products harvested from the plant. For example, the increase in plant fitness may be an improvement in commercially favorable features (e.g., taste or appearance) of a product harvested from the plant. In other instances, the increase in plant fitness is an increase in shelf-life of a product harvested from the plant (e.g., by about 1%, 2%, 5%, 10%, 20%, 30%, 40%, 50%, 60%, 70%, 80%, 90%, 100%, or more than 100%).

[0329] Alternatively, the increase in fitness may be an alteration of a trait that is beneficial to human or animal health, such as a reduction in allergen production. For example, the increase in fitness may be a decrease (e.g., by about 1%, 2%, 5%, 10%, 20%, 30%, 40%, 50%, 60%, 70%, 80%, 90%, 100%, or more than 100%) in production of an allergen (e.g., pollen) that stimulates an immune response in an animal (e.g., human).

[0330] The modification of the plant (e.g., increase in fitness) may arise from modification of one or more plant parts. For example, the plant can be modified by contacting leaf, seed, pollen, root, fruit, shoot, flower, cells, protoplasts, or tissue (e.g., meristematic tissue) of the plant. As such, in another aspect, provided herein is a method of increasing the fitness of a plant, the method including contacting pollen of the plant with an effective amount of any of the plant-modifying compositions herein, wherein the method increases the fitness of the plant (e.g., by about 1%, 2%, 5%, 10%, 20%, 30%, 40%, 50%, 60%, 70%, 80%, 90%, 100%, or more than 100%) relative to an untreated plant.

[0331] In yet another aspect, provided herein is a method of increasing the fitness of a plant, the method including contacting a seed of the plant with an effective amount of any of the gene modifying systems disclosed herein, wherein the method increases the fitness of the plant (e.g., by about 1%, 2%, 5%, 10%, 20%, 30%, 40%, 50%, 60%, 70%, 80%, 90%, 100%, or more than 100%) relative to an untreated plant.

[0332] In another aspect, provided herein is a method including contacting a protoplast of the plant with an effective amount of any of the gene modifying systems described herein, wherein the method increases the fitness of the plant (e.g., by about 1%, 2%, 5%, 10%, 20%, 30%, 40%, 50%, 60%, 70%, 80%, 90%, 100%, or more than 100%) relative to an untreated plant.

[0333] In a further aspect, provided herein is a method of increasing the fitness of a plant, the method including contacting a plant cell of the plant with an effective amount of any of the gene modifying system described herein, wherein the method increases the fitness of the plant (e.g., by about 1%, 2%, 5%, 10%, 20%, 30%, 40%, 50%, 60%, 70%, 80%, 90%, 100%, or more than 100%) relative to an untreated plant.

[0334] In another aspect, provided herein is a method of increasing the fitness of a plant, the method including contacting meristematic tissue of the plant with an effective amount of any of the plant-modifying compositions herein, wherein the method increases the fitness of the plant (e.g., by about 1%, 2%, 5%, 10%, 20%, 30%, 40%, 50%, 60%, 70%, 80%, 90%, 100%, or more than 100%) relative to an untreated plant.

[0335] In another aspect, provided herein is a method of increasing the fitness of a plant, the method including contacting an embryo of the plant with an effective amount of any of the plant-modifying compositions herein, wherein the method increases the fitness of the plant (e.g., by about 1%, 2%, 5%, 10%, 20%, 30%, 40%, 50%, 60%, 70%, 80%, 90%, 100%, or more than 100%) relative to an untreated plant.

### Plant Administration Methods

[0336] A plant described herein can be exposed to any of the gene modifying system compositions described herein in any suitable manner that permits delivering or administering the composition to the plant. The gene modifying system may be delivered either alone or in combination with other active (e.g., fertilizing agents) or inactive substances and may be applied by, for example, spraying, injection (e.g., microinjection), through plants, pouring, dipping, in the form of concentrated liquids, gels, solutions, suspensions, sprays, powders, pellets, briquettes, bricks and the like, formulated to deliver an effective concentration of the plant-modifying composition. Amounts and locations for application of the compositions described herein are generally determined by the habitat of the plant, the lifecycle stage at which the plant can be targeted by the plant-modifying composition, the site where the application is to be made, and the physical and functional characteristics of the plant-modifying composition.

[0337] In some instances, the composition is sprayed directly onto a plant, e.g., crops, by e.g., backpack spraying, aerial spraying, crop spraying/dusting etc. In instances where the gene modifying system is delivered to a plant, the plant receiving the gene modifying system may be at any stage of plant growth. For example, formulated plant-modifying compositions can be applied as a seed-coating or root treatment in early stages of plant growth or as a total plant treatment at later stages of the crop cycle. In some instances, the plant-modifying composition may be applied as a topical agent to a plant.

[0338] Further, the gene modifying system may be applied (e.g., in the soil in which a plant grows, or in the water that is used to water the plant) as a systemic agent that is absorbed and distributed through the tissues of a plant. In some instances, plants or food organisms may be genetically transformed to express the gene modifying system.

[0339] Delayed or continuous release can also be accomplished by coating the gene modifying system or a composition with the plant-modifying composition(s) with a dissolvable or bioerodable coating layer, such as gelatin, which coating dissolves or erodes in the environment of use, to then make the plant-modifying system position available, or by dispersing the agent in a dissolvable or erodable matrix. Such continuous release and/or dispensing means devices may be advantageously employed to consistently maintain an effective concentration of one or more of the plant-modifying compositions described herein.

[0340] In some instances, the gene modifying system is delivered to a part of the plant, e.g., a leaf, seed, pollen, root, fruit, shoot, or flower, or a tissue, cell, or protoplast thereof. In some instances, the gene modifying system is delivered to a cell of the plant. In some instances, the gene modifying system is delivered to a protoplast of the plant. In some instances, the gene modifying system is delivered to a tissue of the plant. For example, the composition may be delivered to meristematic tissue of the plant (e.g., apical meristem, lateral meristem, or intercalary meristem). In some instances, the composition is delivered to permanent tissue of the plant (e.g., simple tissues (e.g., parenchyma, collenchyma, or sclerenchyma) or complex permanent tissue (e.g., xylem or phloem)). In some instances, the gene modifying system is delivered to a plant embryo.

### Plants

[0341] A variety of plants can be delivered to or treated with a gene modifying system described herein. Plants that can be delivered a gene modifying system (i.e., “treated”) in accordance with the present methods include whole plants and parts thereof, including, but not limited to, shoot vegetative organs/structures (e.g., leaves, stems and tubers), roots, flowers and floral organs/structures (e.g., bracts, sepals, petals, stamens, carpels, anthers and ovules), seed (including embryo, endosperm, cotyledons, and seed coat) and fruit (the mature ovary), plant tissue (e.g., vascular tissue, ground tissue, and the like) and cells (e.g., guard cells, egg cells, and the like), and progeny of same. Plant parts can further refer to parts of the plant such as the shoot, root, stem, seeds, stipules, leaves, petals, flowers, ovules, bracts, branches, petioles, internodes, bark, pubescence, tillers, rhizomes, fronds, blades, pollen, stamen, and the like.

[0342] The class of plants that can be treated in a method disclosed herein includes the class of higher and lower plants, including angiosperms (monocotyledonous and dicotyledonous plants), gymnosperms, ferns, horsetails, psilophytes, lycophytes, bryophytes, and algae (e.g., multicellular or unicellular algae). Plants that can be treated in accordance with the present methods further include any vascular plant, for example monocotyledons or dicotyledons or gymnosperms, including, but not limited to alfalfa, apple, Arabidopsis, banana, barley, canola, castor bean, chrysanthemum, clover, cocoa, coffee, cotton, cottonseed, corn, crambe, cranberry, cucumber, dendrobium, dioscorea, eucalyptus, fescue, flax, gladiolus, liliacea, linseed, millet, muskmelon, mustard, oat, oil palm, oilseed rape, papaya, peanut, pineapple, ornamental plants, Phaseolus, potato, rapeseed, rice, rye, ryegrass, safflower, sesame, sorghum, soybean, sugarbeet, sugarcane, sunflower, strawberry, tobacco, tomato, turfgrass, wheat and vegetable crops such as lettuce, celery, broccoli, cauliflower, cucurbits; fruit and nut trees, such as apple, pear, peach, orange, grapefruit, lemon, lime, almond, pecan, walnut, hazel; vines, such as grapes (e.g., a vineyard), kiwi, hops; fruit shrubs and brambles, such as raspberry, blackberry, gooseberry; forest trees, such as ash, pine, fir, maple, oak, chestnut, popular; with alfalfa, canola, castor bean, corn, cotton, crambe, flax, linseed, mustard, oil palm, oilseed rape, peanut, potato, rice, safflower, sesame, soybean, sugarbeet, sunflower, tobacco, tomato, and wheat. Plants that can be treated in accordance with the methods of the present invention include any crop plant, for example, forage crop, oilseed crop, grain crop, fruit crop, vegetable crop, fiber crop, spice crop, nut crop, turf crop, sugar crop, beverage crop, and forest crop. In certain instances, the crop plant that is treated in the method is a soybean plant. In other certain instances, the crop plant is wheat. In certain instances, the crop plant is corn. In certain instances, the crop plant is cotton. In certain instances, the crop plant is alfalfa. In certain instances, the crop plant is sugarbeet. In certain instances, the crop plant is rice. In certain instances, the crop plant is potato. In certain instances, the crop plant is tomato.

[0343] In certain instances, the plant is a crop. Examples of such crop plants include, but are not limited to, monocotyledonous and dicotyledonous plants including, but not limited to, fodder or forage legumes, ornamental plants, food crops, trees, or shrubs selected from Acer spp., Allium spp., Amaranthus spp., Ananas comosus, Apium graveolens, Arachis spp, Asparagus officinalis, Beta vulgaris, Brassica spp. (e.g., Brassica napus, Brassica rapa ssp. (canola, oilseed rape, turnip rape), Camellia sinensis, Canna indica, Cannabis saliva, Capsicum spp., Castanea spp., Cichorium endivia, Citrullus lanatus, Citrus spp., Cocos spp., Coffea spp., Coriandrum sativum, Corylus spp., Crataegus spp., Cucurbita spp., Cucumis spp., Daucus carota, Fagus spp., Ficus carica, Fragaria spp., Ginkgo biloba, Glycine spp. (e.g., Glycine max, Soja hispida or Soja max), Gossypium hirsutum, Helianthus spp. (e.g., Helianthus annuus), Hibiscus spp., Hordeum spp. (e.g., Hordeum vulgare), Ipomoea batatas, Juglans spp., Lactuca sativa, Linum usitatissimum, Litchi chinensis, Lotus spp., Luffa acutangula, Lupinus spp., Lycopersicon spp. (e.g., Lycopersicon esculenturn, Lycopersicon lycopersicum, Lycopersicon pyriforme), Malus spp., Medicago sativa, Mentha spp., Miscanthus sinensis, Morus nigra, Musa spp., Nicotiana spp., Olea spp., Oryza spp. (e.g., Oryza sativa, Oryza latifolia), Panicum miliaceum, Panicum virgatum, Passiflora edulis, Petroselinum crispum, Phaseolus spp., Pinus spp., Pistacia vera, Pisum spp., Poa spp., Populus spp., Prunus spp., Pyrus communis, Quercus spp., Raphanus sativus, Rheum rhabarbarum, Ribes spp., Ricinus communis, Rubus spp., Saccharum spp., Salix sp., Sambucus spp., Secale cereale, Sesamum spp., Sinapis spp., Solanum spp. (e.g., Solanum tuberosum, Solanum integrifolium or Solanum lycopersicum), Sorghum bicolor, Sorghum halepense, Spinacia spp., Tamarindus indica, Theobroma cacao, Trifolium spp., Triticosecale rimpaui, Triticum spp. (e.g., Triticum aestivum, Triticum durum, Triticum turgidum, Triticum hybernum, Triticum macha, Triticum sativum or Triticum vulgare), Vaccinium spp., Vicia spp., Vigna spp., Viola odorata, Vitis spp., and Zea mays. In certain embodiments, the crop plant is rice, oilseed rape, canola, soybean, corn (maize), cotton, sugarcane, alfalfa, sorghum, or wheat.

[0344] The plant or plant part for use in the present invention includes plants of any stage of plant development. In certain instances, the delivery can occur during the stages of germination, seedling growth, vegetative growth, and reproductive growth. In certain instances, delivery to the plant occurs during vegetative and reproductive growth stages. In some instances, the composition is delivered to pollen of the plant. In some instances, the composition is delivered to a seed of the plant. In some instances, the composition is delivered to a protoplast of the plant. In some instances, the composition is delivered to a tissue of the plant. For example, the composition may be delivered to meristematic tissue of the plant (e.g., apical meristem, lateral meristem, or intercalary meristem). In some instances, the composition is delivered to permanent tissue of the plant (e.g., simple tissues (e.g., parenchyma, collenchyma, or sclerenchyma) or complex permanent tissue (e.g., xylem or phloem)). In some instances, the composition is delivered to a plant embryo. In some instances, the composition is delivered to a plant cell. The stages of vegetative and reproductive growth are also referred to herein as “adult” or “mature” plants.

[0345] In instances where the gene modifying system is delivered to a plant part, the plant part may be modified by the plant-modifying agent. Alternatively, the gene modifying system may be distributed to other parts of the plant (e.g., by the plant's circulatory system) that are subsequently modified by the plant-modifying agent.

### Administration and Delivery

[0346] The compositions and systems described herein may be used in vitro or in vivo. In some embodiments the system or components of the system are delivered to cells (e.g., mammalian cells, e.g., human cells), e.g., in vitro or in vivo. In some embodiments, the cells are eukaryotic cells, e.g., cells of a multicellular organism, e.g., a plant or an animal, e.g., a mammal (e.g., human, swine, bovine), a bird (e.g., poultry, such as chicken, turkey, or duck), or a fish. In some embodiments, the cells are non-human animal cells (e.g., a laboratory animal, a livestock animal, or a companion animal). In some embodiments, the cell is a stem cell (e.g., a hematopoietic stem cell), a fibroblast, or a T cell. In some embodiments, the cell is an immune cell, e.g., a T cell (e.g., a Treg, CD4, CD8, γδ, or memory T cell), B cell (e.g., memory B cell or plasma cell), or NK cell. In some embodiments, the cell is a non-dividing cell, e.g., a non-dividing fibroblast or non-dividing T cell. In some embodiments, the cell is an HSC and p53 is not upregulated or is upregulated by less than 10%, 5%, 2%, or 1%, e.g., as determined according to the method described in Example 30 of PCT/US2019/048607. The skilled artisan will understand that the components of the gene modifying system may be delivered in the form of polypeptide, nucleic acid (e.g., DNA, RNA), and combinations thereof.

[0347] In one embodiment the system and/or components of the system are delivered as nucleic acid. For example, the gene modifying polypeptide may be delivered in the form of a DNA or RNA encoding the polypeptide, and the template RNA may be delivered in the form of RNA or its complementary DNA to be transcribed into RNA. In some embodiments the system or components of the system are delivered on 1, 2, 3, 4, or more distinct nucleic acid molecules. In some embodiments the system or components of the system are delivered as a combination of DNA and RNA. In some embodiments the system or components of the system are delivered as a combination of DNA and protein. In some embodiments the system or components of the system are delivered as a combination of RNA and protein. In some embodiments the gene modifying polypeptide is delivered as a protein.

[0348] In some embodiments the system or components of the system are delivered to cells, e.g. mammalian cells or human cells, using a vector. The vector may be, e.g., a plasmid or a virus. In some embodiments, delivery is in vivo, in vitro, ex vivo, or in situ. In some embodiments the virus is an adeno associated virus (AAV), a lentivirus, or an adenovirus. In some embodiments the system or components of the system are delivered to cells with a viral-like particle or a virosome. In some embodiments the delivery uses more than one virus, viral-like particle or virosome.

[0349] In one embodiment, the compositions and systems described herein can be formulated in liposomes or other similar vesicles. Liposomes are spherical vesicle structures composed of a uni- or multilamellar lipid bilayer surrounding internal aqueous compartments and a relatively impermeable outer lipophilic phospholipid bilayer. Liposomes may be anionic, neutral or cationic. Liposomes are biocompatible, nontoxic, can deliver both hydrophilic and lipophilic drug molecules, protect their cargo from degradation by plasma enzymes, and transport their load across biological membranes and the blood brain barrier (BBB) (see, e.g., Spuch and Navarro, Journal of Drug Delivery, vol. 2011, Article ID 469679, 12 pages, 2011. doi: 10.1155/2011/469679 for review).

[0350] Vesicles can be made from several different types of lipids; however, phospholipids are most commonly used to generate liposomes as drug carriers. Methods for preparation of multilamellar vesicle lipids are known in the art (see for example U.S. Pat. No. 6,693,086, the teachings of which relating to multilamellar vesicle lipid preparation are incorporated herein by reference). Although vesicle formation can be spontaneous when a lipid film is mixed with an aqueous solution, it can also be expedited by applying force in the form of shaking by using a homogenizer, sonicator, or an extrusion apparatus (see, e.g., Spuch and Navarro, Journal of Drug Delivery, vol. 2011, Article ID 469679, 12 pages, 2011. doi: 10.1155/2011/469679 for review). Extruded lipids can be prepared by extruding through filters of decreasing size, as described in Templeton et al., Nature Biotech, 15:647-652, 1997, the teachings of which relating to extruded lipid preparation are incorporated herein by reference.

[0351] A variety of nanoparticles can be used for delivery, such as a liposome, a lipid nanoparticle, a cationic lipid nanoparticle, an ionizable lipid nanoparticle, a polymeric nanoparticle, a gold nanoparticle, a dendrimer, a cyclodextrin nanoparticle, a micelle, or a combination of the foregoing.

[0352] Lipid nanoparticles are an example of a carrier that provides a biocompatible and biodegradable delivery system for the pharmaceutical compositions described herein. Nanostructured lipid carriers (NLCs) are modified solid lipid nanoparticles (SLNs) that retain the characteristics of the SLN, improve drug stability and loading capacity, and prevent drug leakage. Polymer nanoparticles (PNPs) are an important component of drug delivery. These nanoparticles can effectively direct drug delivery to specific targets and improve drug stability and controlled drug release. Lipid-polymer nanoparticles (PLNs), a type of carrier that combines liposomes and polymers, may also be employed. These nanoparticles possess the complementary advantages of PNPs and liposomes. A PLN is composed of a core-shell structure; the polymer core provides a stable structure, and the phospholipid shell offers good biocompatibility. As such, the two components increase the drug encapsulation efficiency rate, facilitate surface modification, and prevent leakage of water-soluble drugs. For a review, see, e.g., Li et al. 2017, Nanomaterials 7, 122; doi: 10.3390/nano7060122.

[0353] Exosomes can also be used as drug delivery vehicles for the compositions and systems described herein. For a review, see Ha et al. July 2016. Acta Pharmaceutica Sinica B. Volume 6, Issue 4, Pages 287-296; https://doi.org/10.1016/j.apsb.2016.02.001.

[0354] Fusosomes interact and fuse with target cells, and thus can be used as delivery vehicles for a variety of molecules. They generally consist of a bilayer of amphipathic lipids enclosing a lumen or cavity and a fusogen that interacts with the amphipathic lipid bilayer. The fusogen component has been shown to be engineerable in order to confer target cell specificity for the fusion and payload delivery, allowing the creation of delivery vehicles with programmable cell specificity (see for example Patent Application WO2020014209, the teachings of which relating to fusosome design, preparation, and usage are incorporated herein by reference).

[0355] In some embodiments, the protein component(s) of the gene modifying system may be pre-associated with the template nucleic acid (e.g., template RNA). For example, in some embodiments, the gene modifying polypeptide may be first combined with the template nucleic acid (e.g., template RNA) to form a ribonucleoprotein (RNP) complex. In some embodiments, the RNP may be delivered to cells via, e.g., transfection, nucleofection, virus, vesicle, LNP, exosome, fusosome.

[0356] A gene modifying system can be introduced into cells, tissues and multicellular organisms. In some embodiments the system or components of the system are delivered to the cells via mechanical means or physical means.

[0357] Formulation of protein therapeutics is described in Meyer (Ed.), Therapeutic Protein Drug Products: Practical Approaches to formulation in the Laboratory, Manufacturing, and the Clinic, Woodhead Publishing Series (2012).

### Tissue Specific Activity/Administration

[0358] In some embodiments, a system described herein can make use of one or more feature (e.g., a promoter or microRNA binding site) to limit activity in off-target cells or tissues.

[0359] In some embodiments, a nucleic acid described herein (e.g., a template RNA or a DNA encoding a template RNA) comprises a promoter sequence, e.g., a tissue specific promoter sequence. In some embodiments, the tissue-specific promoter is used to increase the target-cell specificity of a gene modifying system. For instance, the promoter can be chosen on the basis that it is active in a target cell type but not active in (or active at a lower level in) a non-target cell type. Thus, even if the promoter integrated into the genome of a non-target cell, it would not drive expression (or only drive low level expression) of an integrated gene. A system having a tissue-specific promoter sequence in the template RNA may also be used in combination with a microRNA binding site, e.g., in the template RNA or a nucleic acid encoding a gene modifying protein, e.g., as described herein. A system having a tissue-specific promoter sequence in the template RNA may also be used in combination with a DNA encoding a gene modifying polypeptide, driven by a tissue-specific promoter, e.g., to achieve higher levels of gene modifying protein in target cells than in non-target cells. In some embodiments, e.g., for liver indications, a tissue-specific promoter is selected from Table 3 of WO2020014209, incorporated herein by reference.

[0360] In some embodiments, a nucleic acid described herein (e.g., a template RNA or a DNA encoding a template RNA) comprises a microRNA binding site. In some embodiments, the microRNA binding site is used to increase the target-cell specificity of a gene modifying system. For instance, the microRNA binding site can be chosen on the basis that is recognized by a miRNA that is present in a non-target cell type, but that is not present (or is present at a reduced level relative to the non-target cell) in a target cell type. Thus, when the template RNA is present in a non-target cell, it would be bound by the miRNA, and when the template RNA is present in a target cell, it would not be bound by the miRNA (or bound but at reduced levels relative to the non-target cell). While not wishing to be bound by theory, binding of the miRNA to the template RNA may interfere with its activity, e.g., may interfere with insertion of the heterologous object sequence into the genome. Accordingly, the system would edit the genome of target cells more efficiently than it edits the genome of non-target cells, e.g., the heterologous object sequence would be inserted into the genome of target cells more efficiently than into the genome of non-target cells, or an insertion or deletion is produced more efficiently in target cells than in non-target cells. A system having a microRNA binding site in the template RNA (or DNA encoding it) may also be used in combination with a nucleic acid encoding a gene modifying polypeptide, wherein expression of the gene modifying polypeptide is regulated by a second microRNA binding site, e.g., as described herein. In some embodiments, e.g., for liver indications, a miRNA is selected from Table 4 of WO2020014209, incorporated herein by reference.

[0361] In some embodiments, the template RNA comprises a microRNA sequence, an siRNA sequence, a guide RNA sequence, or a piwi RNA sequence.

### Promoters

[0362] In some embodiments, one or more promoter or enhancer elements are operably linked to a nucleic acid encoding a gene modifying protein or a template nucleic acid, e.g., that controls expression of the heterologous object sequence. In certain embodiments, the one or more promoter or enhancer elements comprise cell-type or tissue specific elements. In some embodiments, the promoter or enhancer is the same or derived from the promoter or enhancer that naturally controls expression of the heterologous object sequence. For example, the ornithine transcarbomylase promoter and enhancer may be used to control expression of the ornithine transcarbomylase gene in a system or method provided by the invention for correcting ornithine transcarbomylase deficiencies. In some embodiments, the promoter is a promoter of Table 16 or 17 or a functional fragment or variant thereof.

[0363] Exemplary tissue specific promoters that are commercially available can be found, for example, at a uniform resource locator (e.g., www.invivogen.com/tissue-specific-promoters). In some embodiments, a promoter is a native promoter or a minimal promoter. e.g., which consists of a single fragment from the 5′ region of a given gene. In some embodiments, a native promoter comprises a core promoter and its natural 5′ UTR. In some embodiments, the 5′ UTR comprises an intron. In other embodiments, these include composite promoters, which combine promoter elements of different origins or were generated by assembling a distal enhancer with a minimal promoter of the same origin.

[0364] Exemplary cell or tissue specific promoters are provided in the tables, below, and exemplary nucleic acid sequences encoding them are known in the art and can be readily accessed using a variety of resources, such as the NCBI database, including RefSeq, as well as the Eukaryotic Promoter Database (//epd.epfl.ch//index.php).

TABLE 16
Exemplary cell or tissue-specific promoters

| Promoter | Target cells |
|---|---|
| B29 Promoter | B cells |
| CD14 Promoter | Monocytic Cells |
| CD43 Promoter | Leukocytes and platelets |
| CD45 Promoter | Hematopoeitic cells |
| CD68 promoter | macrophages |
| Desmin promoter | muscle cells |
| Elastase-1 promoter | pancreatic acinar cells |
| Endoglin promoter | endothelial cells |
| fibronectin promoter | differentiating cells, healing tissue |
| Flt-1 promoter | endothelial cells |
| GFAP promoter | Astrocytes |
| GPIIB promoter | megakaryocytes |
| ICAM-2 Promoter | Endothelial cells |
| INF-Beta promoter | Hematopoeitic cells |
| Mb promoter | muscle cells |
| Nphs1 promoter | podocytes |
| OG-2 promoter | Osteoblasts, Odonblasts |
| SP-B promoter | Lung |
| Syn1 promoter | Neurons |
| WASP promoter | Hematopoeitic cells |
| SV40/bAlb promoter | Liver |
| SV40/bAlb promoter | Liver |
| SV40/Cd3 promoter | Leukocytes and platelets |
| SV40/CD45 promoter | hematopoeitic cells |
| NSE/RU5′ promoter | Mature Neurons |

TABLE 17
Additional exemplary cell or tissue-specific promoters

| Promoter | Gene Description | Gene Specificity |
|---|---|---|
| APOA2 | Apolipoprotein A-II | Hepatocytes (from hepatocyte progenitors) |
| SERPINA1 | Serpin peptidase inhibitor, clade A (alpha-1 | Hepatocytes |
| (hAAT) | antiproteinase, antitrypsin), member 1 | (from definitive endoderm |
| | (also named alpha 1 anti-tryps in) | stage) |
| CYP3A | Cytochrome P450, family 3, subfamily A, polypeptide | Mature Hepatocytes |
| MIR122 | MicroRNA 122 | Hepatocytes |
| | | (from early stage embryonic |
| | | liver cells) |
| | | and endoderm |

Pancreatic specific promoters

| | | |
|---|---|---|
| INS | Insulin | Pancreatic beta cells |
| | | (from definitive endoderm stage) |
| IRS2 | Insulin receptor substrate 2 | Pancreatic beta cells |
| Pdx1 | Pancreatic and duodenal | Pancreas |
| | homeobox 1 | (from definitive endoderm stage) |
| Alx3 | Aristaless-like homeobox 3 | Pancreatic beta cells |
| | | (from definitive endoderm stage) |
| Ppy | Pancreatic polypeptide | PP pancreatic cells |
| | | (gamma cells) |

Cardiac specific promoters

| | | |
|---|---|---|
| Myh6 (aMHC) | Myosin, heavy chain 6, cardiac muscle, alpha | Late differentiation marker of cardiac muscle cells (atrial specificity) |
| MYL2 (MLC-2v) | Myosin, light chain 2, regulatory, cardiac, slow | Late differentiation marker of cardiac muscle cells (ventricular |
| | | specificity) |
| ITNNI3 | Troponin I type 3 (cardiac) | Cardiomyocytes |
| (cTnl) | | (from immature state) |
| ITNNI3 | Troponin I type 3 (cardiac) | Cardiomyocytes |
| (cTnl) | | (from immature state) |
| NPPA (ANF) | Natriuretic peptide precursor A (also named Atrial Natriuretic | Atrial specificity in adult cells |
| | Factor) | |
| Slc8a1 (Ncx1) | Solute carrier family 8 (sodium/calcium exchanger), member 1 | Cardiomyocytes from early developmental stages |

CNS specific promoters

| | | |
|---|---|---|
| SYN1 (hSyn) | Synapsin I | Neurons |
| GFAP | Glial fibrillary acidic protein | Astrocytes |
| INA | Internexin neuronal intermediate filament protein, alpha (a- | Neuroprogenitors |
| | internexin) | |
| NES | Nestin | Neuroprogenitors and ectoderm |
| MOBP | Myelin-associated oligodendrocyte basic protein | Oligodendrocytes |
| MBP | Myelin basic protein | Oligodendrocytes |
| TH | Tyrosine hydroxylase | Dopaminergic neurons |
| FOXA2 (HNF3 | Forkhead box A2 | Dopaminergic neurons (also used as a marker of endoderm) |
| beta) | | |

Skin specific promoters

| | | |
|---|---|---|
| FLG | Filaggrin | Keratinocytes from granular layer |
| K14 | Keratin 14 | Keratinocytes from granular |
| | | and basal layers |
| TGM3 | Transglutaminase 3 | Keratinocytes from granular layer |

Immune cell specific promoters

| | | |
|---|---|---|
| ITGAM | Integrin, alpha M (complement | Monocytes, macrophages , granulocytes , |
| (CD11B) | component 3 receptor 3 subunit) | natural killer cells |

Urogential cell specific promoters

| | | |
|---|---|---|
| Pbsn | Probasin | Prostatic epithelium |
| Upk2 | Uroplakin 2 | Bladder |
| Sbp | Spermine binding protein | Prostate |
| Fer114 | Fer-1-like 4 | Bladder |

Endothelial cell specific promoters

| | | |
|---|---|---|
| ENG | Endoglin | Endothelial cells |

Pluripotent and embryonic cell specific promoters

| | | |
|---|---|---|
| Oct4 (POU5F1) | POU class 5 homeobox 1 | Pluripotent cells |
| | | (germ cells, ES cells, iPS cells) |
| NANOG | Nanog homeobox | Pluripotent cells |
| | | (ES cells, iPS cells) |
| Synthetic Oct4 | Synthetic promoter based on a Oct-4 core enhancer element | Pluripotent cells (ES cells, iPS cells) |
| T brachyury | Brachyury | Mesoderm |
| NES | Nestin | Neuroprogenitors and Ectoderm |
| SOX17 | SRY (sex determining region Y)-box 17 | Endoderm |
| FOXA2 (HNFJ | Forkhead box A2 | Endoderm (also used as a marker of dopaminergic neurons) |
| beta) | | |
| MIR122 | MicroRNA 122 | Endoderm and hepatocytes |
| | | (from early stage embryonic liver cells~ |

[0365] Depending on the host/vector system utilized, any of a number of suitable transcription and translation control elements, including constitutive and inducible promoters, transcription enhancer elements, transcription terminators, etc. may be used in the expression vector (see e.g., Bitter et al. (1987) Methods in Enzymology, 153:516-544; incorporated herein by reference in its entirety).

[0366] In some embodiments, a nucleic acid encoding a gene modifying protein or template nucleic acid is operably linked to a control element, e.g., a transcriptional control element, such as a promoter. The transcriptional control element may, in some embodiment, be functional in either a eukaryotic cell, e.g., a mammalian cell; or a prokaryotic cell (e.g., bacterial or archaeal cell). In some embodiments, a nucleotide sequence encoding a polypeptide is operably linked to multiple control elements, e.g., that allow expression of the nucleotide sequence encoding the polypeptide in both prokaryotic and eukaryotic cells.

[0367] For illustration purposes, examples of spatially restricted promoters include, but are not limited to, neuron-specific promoters, adipocyte-specific promoters, cardiomyocyte-specific promoters, smooth muscle-specific promoters, photoreceptor-specific promoters, etc. Neuron-specific spatially restricted promoters include, but are not limited to, a neuron-specific enolase (NSE) promoter (see, e.g., EMBL HSENO2, X51956); an aromatic amino acid decarboxylase (AADC) promoter, a neurofilament promoter (see, e.g., GenBank HUMNFL, L04147): a synapsin promoter (see, e.g., GenBank HUMSYNIB, M55301); a thy-1 promoter (see, e.g., Chen et al. (1987) Cell 51:7-19; and Llewellyn, et al. (2010) Nat. Med. 16 (10): 1161-1166); a serotonin receptor promoter (see, e.g., GenBank S62283); a tyrosine hydroxylase promoter (TH) (see, e.g., Oh et al. (2009) Gene Ther 16:437; Sasaoka et al. (1992) Mol. Brain Res. 16:274; Boundy et al. (1998) J. Neurosci. 18:9989; and Kaneda et al. (1991) Neuron 6:583-594); a GnRH promoter (see. e.g., Radovick et al. (1991) Proc. Natl. Acad. Sci. USA 88:3402-3406); an L7 promoter (see, e.g., Oberdick et al. (1990) Science 248: 223-226); a DNMT promoter (see, e.g., Bartge et al. (1988) Proc. Natl. Acad. Sci. USA 85:3648-3652); an enkephalin promoter (see, e.g., Comb et al. (1988) EMBO J. 17:3793-3805); a myelin basic protein (MBP) promoter; a Ca2+-calmodulin-dependent protein kinase II-alpha (CamKIIα) promoter (see, e.g., Mayford et al. (1996) Proc. Natl. Acad. Sci. USA 93:13250; and Casanova et al. (2001) Genesis 31:37); a CMV enhancer/platelet-derived growth factor-β promoter (see, e.g., Liu et al. (2004) Gene Therapy 11:52-60); and the like.

[0368] Adipocyte-specific spatially restricted promoters include, but are not limited to, the aP2 gene promoter/enhancer, e.g., a region from −5.4 kb to +21 bp of a human aP2 gene (see, e.g., Tozzo et al. (1997) Endocrinol. 138:1604; Ross et al. (1990) Proc. Natl. Acad. Sci. USA 87:9590; and Pavjani et al. (2005) Nat. Med. 11:797); a glucose transporter-4 (GLUT4) promoter (see, e.g., Knight et al. (2003) Proc. Natl. Acad. Sci. USA 100:14725); a fatty acid translocase (FAT/CD36) promoter (see, e.g., Kuriki et al. (2002) Biol. Pharm. Bull. 25:1476; and Sato et al. (2002) J. Biol. Chem. 277:15703); a stearoyl-CoA desaturase-1 (SCD1) promoter (Tabor et al. (1999) J. Biol. Chem. 274:20603); a leptin promoter (see, e.g., Mason et al. (1998) Endocrinol. 139:1013; and Chen et al. (1999) Biochem. Biophys. Res. Comm. 262:187); an adiponectin promoter (see, e.g., Kita et al. (2005) Biochem. Biophys. Res. Comm. 331:484; and Chakrabarti (2010) Endocrinol. 151:2408): an adipsin promoter (see, e.g., Platt et al. (1989) Proc. Natl. Acad. Sci. USA 86:7490); a resistin promoter (see, e.g., Seo et al. (2003) Molec. Endocrinol. 17:1522); and the like.

[0369] Cardiomyocyte-specific spatially restricted promoters include, but are not limited to, control sequences derived from the following genes: myosin light chain-2, α-myosin heavy chain, AE3, cardiac troponin C, cardiac actin, and the like. Franz et al. (1997) Cardiovasc. Res. 35:560-566; Robbins et al. (1995) Ann. N.Y. Acad. Sci. 752:492-505; Lion et al. (1995) Circ. Res. 76:584-591: Parmacek et al. (1994) Mol. Cell. Biol. 14:1870-1885; Hunter et al. (1993) Hypertension 22:608-617; and Sartorelli et al. (1992) Proc. Natl. Acad. Sci. USA 89:4047-4051.

[0370] Smooth muscle-specific spatially restricted promoters include, but are not limited to, an SM22α promoter (see, e.g., Akyürek et al. (2000) Mol. Med. 6:983; and U.S. Pat. No. 7,169,874); a smoothelin promoter (see. e.g., WO 2001/018048); an α-smooth muscle actin promoter; and the like. For example, a 0.4 kb region of the SM22α promoter, within which lie two CArG elements, has been shown to mediate vascular smooth muscle cell-specific expression (see, e.g., Kim, et al. (1997) Mol. Cell. Biol. 17, 2266-2278; Li, et al . . . (1996) J. Cell Biol. 132, 849-859; and Moessler, et al. (1996) Development 122, 2415-2425).

[0371] Photoreceptor-specific spatially restricted promoters include, but are not limited to, a rhodopsin promoter; a rhodopsin kinase promoter (Young et al. (2003) Ophthalmol. Vis. Sci. 44:4076); a beta phosphodiesterase gene promoter (Nicoud et al. (2007) J. Gene Med. 9:1015): a retinitis pigmentosa gene promoter (Nicoud et al. (2007) supra); an interphotoreceptor retinoid-binding protein (IRBP) gene enhancer (Nicoud et al. (2007) supra); an IRBP gene promoter (Yokoyama et al. (1992) Exp Eye Res. 55:225); and the like.

[0372] In some embodiments, a gene modifying system, e.g., DNA encoding a gene modifying polypeptide, DNA encoding a template RNA, or DNA or RNA encoding a heterologous object sequence, is designed such that one or more elements is operably linked to a tissue-specific promoter, e.g., a promoter that is active in T-cells. In further embodiments, the T-cell active promoter is inactive in other cell types, e.g., B-cells, NK cells. In some embodiments, the T-cell active promoter is derived from a promoter for a gene encoding a component of the T-cell receptor, e.g., TRAC, TRBC, TRGC, TRDC. In some embodiments, the T-cell active promoter is derived from a promoter for a gene encoding a component of a T-cell-specific cluster of differentiation protein, e.g., CD3, e.g., CD3D, CD3E, CD3G, CD3Z. In some embodiments, T-cell-specific promoters in gene modifying systems are discovered by comparing publicly available gene expression data across cell types and selecting promoters from the genes with enhanced expression in T-cells. In some embodiments, promoters may be selecting depending on the desired expression breadth, e.g., promoters that are active in T-cells only, promoters that are active in NK cells only, promoters that are active in both T-cells and NK cells.

[0373] Cell-specific promoters known in the art may be used to direct expression of a gene modifying protein, e.g., as described herein. Nonlimiting exemplary mammalian cell-specific promoters have been characterized and used in mice expressing Cre recombinase in a cell-specific manner. Certain nonlimiting exemplary mammalian cell-specific promoters are listed in Table 1 of U.S. Pat. No. 9,845,481, incorporated herein by reference.

[0374] In some embodiments, a vector as described herein comprises an expression cassette. Typically, an expression cassette comprises the nucleic acid molecule of the instant invention operatively linked to a promoter sequence. For example, a promoter is operatively linked with a coding sequence when it is capable of affecting the expression of that coding sequence (e.g., the coding sequence is under the transcriptional control of the promoter). Encoding sequences can be operatively linked to regulatory sequences in sense or antisense orientation. In certain embodiments, the promoter is a heterologous promoter. In certain embodiments, an expression cassette may comprise additional elements, for example, an intron, an enhancer, a polyadenylation site, a woodchuck response element (WRE), and/or other elements known to affect expression levels of the encoding sequence. A promoter typically controls the expression of a coding sequence or functional RNA. In certain embodiments, a promoter sequence comprises proximal and more distal upstream elements and can further comprise an enhancer element. An enhancer can typically stimulate promoter activity and may be an innate element of the promoter or a heterologous element inserted to enhance the level or tissue-specificity of a promoter. In certain embodiments, the promoter is derived in its entirety from a native gene. In certain embodiments, the promoter is composed of different elements derived from different naturally occurring promoters. In certain embodiments, the promoter comprises a synthetic nucleotide sequence. It will be understood by those skilled in the art that different promoters will direct the expression of a gene in different tissues or cell types, or at different stages of development, or in response to different environmental conditions or to the presence or the absence of a drug or transcriptional co-factor. Ubiquitous, cell-type-specific, tissue-specific, developmental stage-specific, and conditional promoters, for example, drug-responsive promoters (e.g., tetracycline-responsive promoters) are well known to those of skill in the art. Exemplary promoters include, but are not limited to, the phosphoglycerate kinase (PKG) promoter, CAG (composite of the CMV enhancer the chicken beta actin promoter (CBA) and the rabbit beta globin intron), NSE (neuronal specific enolase), synapsin or NeuN promoters, the SV40 early promoter, mouse mammary tumor virus LTR promoter; adenovirus major late promoter (Ad MLP), a herpes simplex virus (HSV) promoter, a cytomegalovirus (CMV) promoter such as the CMV immediate early promoter region (CMVIE). SFFV promoter, rous sarcoma virus (RSV) promoter, synthetic promoters, hybrid promoters, and the like. Other promoters can be of human origin or from other species, including from mice. Common promoters include, e.g., the human cytomegalovirus (CMV) immediate early gene promoter, the SV40 early promoter, the Rous sarcoma virus long terminal repeat. [beta]-actin, rat insulin promoter, the phosphoglycerate kinase promoter, the human alpha-1 antitrypsin (hAAT) promoter, the transthyretin promoter, the TBG promoter and other liver-specific promoters, the desmin promoter and similar muscle-specific promoters, the EF1-alpha promoter, hybrid promoters with multi-tissue specificity, promoters specific for neurons like synapsin and glyceraldehyde-3-phosphate dehydrogenase promoter, all of which are promoters well known and readily available to those of skill in the art, can be used to obtain high-level expression of the coding sequence of interest. In addition, sequences derived from non-viral genes, such as the murine metallothionein gene, will also find use herein. Such promoter sequences are commercially available from, e.g., Stratagene (San Diego, CA). Additional exemplary promoter sequences are described, for example, in WO2018213786A1 (incorporated by reference herein in its entirety).

[0375] In some embodiments, the apolipoprotein E enhancer (ApoE) or a functional fragment thereof is used, e.g., to drive expression in the liver. In some embodiments, two copies of the ApoE enhancer or a functional fragment thereof are used. In some embodiments, the ApoE enhancer or functional fragment thereof is used in combination with a promoter, e.g., the human alpha-1 antitrypsin (hAAT) promoter.

[0376] In some embodiments, the regulatory sequences impart tissue-specific gene expression capabilities. In some cases, the tissue-specific regulatory sequences bind tissue-specific transcription factors that induce transcription in a tissue specific manner. Various tissue-specific regulatory sequences (e.g., promoters, enhancers, etc.) are known in the art. Exemplary tissue-specific regulatory sequences include, but are not limited to, the following tissue-specific promoters: a liver-specific thyroxin binding globulin (TBG) promoter, an insulin promoter, a glucagon promoter, a somatostatin promoter, a pancreatic polypeptide (PPY) promoter, a synapsin-1 (Syn) promoter, a creatine kinase (MCK) promoter, a mammalian desmin (DES) promoter, a α-myosin heavy chain (α-MHC) promoter, or a cardiac Troponin T (cTnT) promoter. Other exemplary promoters include Beta-actin promoter, hepatitis B virus core promoter, Sandig et al., Gene Ther., 3:1002-9 (1996); alpha-fetoprotein (AFP) promoter, Arbuthnot et al., Hum. Gene Ther., 7: 1503-14 (1996)), bone osteocalcin promoter (Stein et al., Mol. Biol. Rep . . . 24: 185-96 (1997)); bone sialoprotein promoter (Chen et al., J. Bone Miner. Res., 11:654-64 (1996)), CD2 promoter (Hansal et al., J. Immunol., 161:1063-8 (1998): immunoglobulin heavy chain promoter; T cell receptor α-chain promoter, neuronal such as neuron-specific enolase (NSE) promoter (Andersen et al., Cell. Mol. Neurobiol., 13:503-15 (1993)), neurofilament light-chain gene promoter (Piccioli et al., Proc. Natl. Acad. Sci. USA, 88:5611-5 (1991)), and the neuron-specific vgf gene promoter (Piccioli et al., Neuron, 15:373-84 (1995)), and others. Additional exemplary promoter sequences are described, for example, in U.S. Pat. No. 10,300,146 (incorporated herein by reference in its entirety). In some embodiments, a tissue-specific regulatory element, e.g., a tissue-specific promoter, is selected from one known to be operably linked to a gene that is highly expressed in a given tissue, e.g., as measured by RNA-seq or protein expression data, or a combination thereof. Methods for analyzing tissue specificity by expression are taught in Fagerberg et al. Mol Cell Proteomics 13 (2): 397-406 (2014), which is incorporated herein by reference in its entirety.

[0377] In some embodiments, a vector described herein is a multicistronic expression construct. Multicistronic expression constructs include, for example, constructs harboring a first expression cassette, e.g. comprising a first promoter and a first encoding nucleic acid sequence, and a second expression cassette, e.g. comprising a second promoter and a second encoding nucleic acid sequence. Such multicistronic expression constructs may, in some instances, be particularly useful in the delivery of non-translated gene products, such as hairpin RNAs, together with a polypeptide, for example, a gene modifying polypeptide and gene modifying template. In some embodiments, multicistronic expression constructs may exhibit reduced expression levels of one or more of the included transgenes, for example, because of promoter interference or the presence of incompatible nucleic acid elements in close proximity. If a multicistronic expression construct is part of a viral vector, the presence of a self-complementary nucleic acid sequence may, in some instances, interfere with the formation of structures necessary for viral reproduction or packaging.

[0378] In some embodiments, the sequence encodes an RNA with a hairpin. In some embodiments, the hairpin RNA is a guide RNA, a template RNA, a shRNA, or a microRNA. In some embodiments, the first promoter is an RNA polymerase I promoter. In some embodiments, the first promoter is an RNA polymerase II promoter. In some embodiments, the second promoter is an RNA polymerase III promoter. In some embodiments, the second promoter is a U6 or H1 promoter.

[0379] Without wishing to be bound by theory, multicistronic expression constructs may not achieve optimal expression levels as compared to expression systems containing only one cistron. One of the suggested causes of lower expression levels achieved with multicistronic expression constructs comprising two or more promoter elements is the phenomenon of promoter interference (see, e.g., Curtin J A, Dane A P. Swanson A, Alexander I E, Ginn S L. Bidirectional promoter interference between two widely used internal heterologous promoters in a late-generation lentiviral construct. Gene Ther. 2008 March; 15 (5): 384-90; and Martin-Duque P, Jezzard S, Kaftansis L, Vassaux G. Direct comparison of the insulating properties of two genetic elements in an adenoviral vector containing two different expression cassettes. Hum Gene Ther. 2004 October; 15 (10): 995-1002; both references incorporated herein by reference for disclosure of promoter interference phenomenon). In some embodiments, the problem of promoter interference may be overcome, e.g., by producing multicistronic expression constructs comprising only one promoter driving transcription of multiple encoding nucleic acid sequences separated by internal ribosomal entry sites, or by separating cistrons comprising their own promoter with transcriptional insulator elements. In some embodiments, single-promoter driven expression of multiple cistrons may result in uneven expression levels of the cistrons. In some embodiments, a promoter cannot efficiently be isolated and isolation elements may not be compatible with some gene transfer vectors, for example, some retroviral vectors.

### MicroRNAs

[0380] MicroRNAs (miRNAs) and other small interfering nucleic acids generally regulate gene expression via target RNA transcript cleavage/degradation or translational repression of the target messenger RNA (mRNA), miRNAs may, in some instances, be natively expressed, typically as final 19-25 non-translated RNA products. miRNAs generally exhibit their activity through sequence-specific interactions with the 3′ untranslated regions (UTR) of target mRNAs. These endogenously expressed miRNAs may form hairpin precursors that are subsequently processed into an miRNA duplex, and further into a mature single stranded miRNA molecule This mature miRNA generally guides a multiprotein complex, miRISC, which identifies target 3′ UTR regions of target mRNAs based upon their complementarity to the mature miRNA. Useful transgene products may include, for example, miRNAs or miRNA binding sites that regulate the expression of a linked polypeptide. A non-limiting list of miRNA genes; the products of these genes and their homologues are useful as transgenes or as targets for small interfering nucleic acids (e.g., miRNA sponges, antisense oligonucleotides), e.g., in methods such as those listed in U.S. Pat. No. 10,300,146, 22:25-25:48, are herein incorporated by reference. In some embodiments, one or more binding sites for one or more of the foregoing miRNAs are incorporated in a transgene, e.g., a transgene delivered by an rAAV vector, e.g., to inhibit the expression of the transgene in one or more tissues of an animal harboring the transgene. In some embodiments, a binding site may be selected to control the expression of a transgene in a tissue specific manner. For example, binding sites for the liver-specific miR-122 may be incorporated into a transgene to inhibit expression of that transgene in the liver. Additional exemplary miRNA sequences are described, for example, in U.S. Pat. No. 10,300,146 (incorporated herein by reference in its entirety).

[0381] An miR inhibitor or miRNA inhibitor is generally an agent that blocks miRNA expression and/or processing. Examples of such agents include, but are not limited to, microRNA antagonists, microRNA specific antisense, microRNA sponges, and microRNA oligonucleotides (double-stranded, hairpin, short oligonucleotides) that inhibit miRNA interaction with a Drosha complex. MicroRNA inhibitors, e.g., miRNA sponges, can be expressed in cells from transgenes (e.g., as described in Ebert, M. S. Nature Methods, Epub Aug. 12, 2007; incorporated by reference herein in its entirety). In some embodiments, microRNA sponges, or other miR inhibitors, are used with the AAVs. microRNA sponges generally specifically inhibit miRNAs through a complementary heptameric seed sequence. In some embodiments, an entire family of miRNAs can be silenced using a single sponge sequence. Other methods for silencing miRNA function (derepression of miRNA targets) in cells will be apparent to one of ordinary skill in the art.

[0382] In some embodiments, a gene modifying system, template RNA, or polypeptide described herein is administered to or is active in (e.g., is more active in) a target tissue, e.g., a first tissue. In some embodiments, the gene modifying system, template RNA, or polypeptide is not administered to or is less active in (e.g., not active in) a non-target tissue. In some embodiments, a gene modifying system, template RNA, or polypeptide described herein is useful for modifying DNA in a target tissue, e.g., a first tissue, (e.g., and not modifying DNA in a non-target tissue).

[0383] In some embodiments, a gene modifying system comprises (a) a polypeptide described herein or a nucleic acid encoding the same, (b) a template nucleic acid (e.g., template RNA) described herein, and (c) one or more first tissue-specific expression-control sequences specific to the target tissue, wherein the one or more first tissue-specific expression-control sequences specific to the target tissue are in operative association with (a), (b), or (a) and (b), wherein, when associated with (a), (a) comprises a nucleic acid encoding the polypeptide.

[0384] In some embodiments, the nucleic acid in (b) comprises RNA.

[0385] In some embodiments, the nucleic acid in (b) comprises DNA.

[0386] In some embodiments, the nucleic acid in (b): (i) is single-stranded or comprises a single-stranded segment, e.g., is single-stranded DNA or comprises a single-stranded segment and one or more double stranded segments; (ii) has inverted terminal repeats; or (iii) both (i) and (ii).

[0387] In some embodiments, the nucleic acid in (b) is double-stranded or comprises a double-stranded segment.

[0388] In some embodiments, (a) comprises a nucleic acid encoding the polypeptide.

[0389] In some embodiments, the nucleic acid in (a) comprises RNA.

[0390] In some embodiments, the nucleic acid in (a) comprises DNA.

[0391] In some embodiments, the nucleic acid in (a): (i) is single-stranded or comprises a single-stranded segment, e.g., is single-stranded DNA or comprises a single-stranded segment and one or more double stranded segments; (ii) has inverted terminal repeats; or (iii) both (i) and (ii).

[0392] In some embodiments, the nucleic acid in (a) is double-stranded or comprises a double-stranded segment.

[0393] In some embodiments, the nucleic acid in (a), (b), or (a) and (b) is linear.

[0394] In some embodiments, the nucleic acid in (a), (b), or (a) and (b) is circular, e.g., a plasmid or minicircle.

[0395] In some embodiments, the heterologous object sequence is in operative association with a first promoter.

[0396] In some embodiments, the one or more first tissue-specific expression-control sequences comprises a tissue specific promoter.

[0397] In some embodiments, the tissue-specific promoter comprises a first promoter in operative association with: (i) the heterologous object sequence, (ii) a nucleic acid encoding the retroviral RT, or (iii) (i) and (ii).

[0398] In some embodiments, the one or more first tissue-specific expression-control sequences comprises a tissue-specific microRNA recognition sequence in operative association with: (i) the heterologous object sequence, (ii) a nucleic acid encoding the retroviral RT domain, or (iii) (i) and (ii).

[0399] In some embodiments, a system comprises a tissue-specific promoter, and the system further comprises one or more tissue-specific microRNA recognition sequences, wherein: (i) the tissue specific promoter is in operative association with: (I) the heterologous object sequence, (II) a nucleic acid encoding the retroviral RT domain, or (III) (I) and (II); and/or (ii) the one or more tissue-specific microRNA recognition sequences are in operative association with: (I) the heterologous object sequence, (II) a nucleic acid encoding the retroviral RT, or (III) (I) and (II).

[0400] In some embodiments, wherein (a) comprises a nucleic acid encoding the polypeptide, the nucleic acid comprises a promoter in operative association with the nucleic acid encoding the polypeptide.

[0401] In some embodiments, the nucleic acid encoding the polypeptide comprises one or more second tissue-specific expression-control sequences specific to the target tissue in operative association with the polypeptide coding sequence.

[0402] In some embodiments, the one or more second tissue-specific expression-control sequences comprises a tissue specific promoter.

[0403] In some embodiments, the tissue-specific promoter is the promoter in operative association with the nucleic acid encoding the polypeptide.

[0404] In some embodiments, the one or more second tissue-specific expression-control sequences comprises a tissue-specific microRNA recognition sequence.

[0405] In some embodiments, the promoter in operative association with the nucleic acid encoding the polypeptide is a tissue-specific promoter, the system further comprising one or more tissue-specific microRNA recognition sequences.

[0406] In some embodiments, a nucleic acid component of a system provided by the invention is a sequence (e.g., encoding the polypeptide or comprising a heterologous object sequence) flanked by untranslated regions (UTRs) that modify protein expression levels. Various 5′ and 3′ UTRs can affect protein expression. For example, in some embodiments, the coding sequence may be preceded by a 5′ UTR that modifies RNA stability or protein translation. In some embodiments, the sequence may be followed by a 3′ UTR that modifies RNA stability or translation. In some embodiments, the sequence may be preceded by a 5′ UTR and followed by a 3′ UTR that modify RNA stability or translation. In some embodiments, the 5′ and/or 3′ UTR may be selected from the 5′ and 3′ UTRs of complement factor 3 (C3) (CACTCCTCCCCATCCTCTCCCTCTGTCCCTCTGTCCCTCTGACCCTGCACTGTCCCAG CACC (SEQ ID NO: 4619)) or orosomucoid 1 (ORM1) (CAGGACACAGCCTTGGATCAGGACAGAGACTTGGGGGCCATCCTGCCCCTCCAACC CGACATGTGTACCTCAGCTTTTTCCCTCACTTGCATCAATAAAGCTTCTGTGTTTGGA ACAGCTAA (SEQ ID NO: 4620)) (Asrani et al. RNA Biology 2018). In certain embodiments, the 5′ UTR is the 5′ UTR from C3 and the 3′ UTR is the 3′ UTR from ORM1. In certain embodiments, a 5′ UTR and 3′ UTR for protein expression, e.g., mRNA (or DNA encoding the RNA) for a gene modifying polypeptide or heterologous object sequence, comprise optimized expression sequences. In some embodiments, the 5′ UTR comprises GGGAAAUAAGAGAGAAAAGAAGAGUAAGAAGAAAUAUAAGAGCCACC (SEQ ID NO: 4621) and/or the 3′ UTR comprising UGAUAAUAGGCUGGAGCCUCGGUGGCCAUGCUUCUUGCCCCUUGGGCCUCCCCCC AGCCCCUCCUCCCCUUCCUGCACCCGUACCCCCGUGGUCUUUGAAUAAAGUCUGA (SEQ ID NO: 4622), e.g., as described in Richner et al. Cell 168 (6): P1114-1125 (2017), the sequences of which are incorporated herein by reference.

[0407] In some embodiments, a 5′ and/or 3′ UTR may be selected to enhance protein expression. In some embodiments, a 5′ and/or 3′ UTR may be selected to modify protein expression such that overproduction inhibition is minimized. In some embodiments, UTRs are around a coding sequence, e.g., outside the coding sequence and in other embodiments proximal to the coding sequence. In some embodiments, additional regulatory elements (e.g., miRNA binding sites, cis-regulatory sites) are included in the UTRs.

[0408] In some embodiments, an open reading frame of a gene modifying system, e.g., an ORF of an mRNA (or DNA encoding an mRNA) encoding a gene modifying polypeptide or one or more ORFs of an mRNA (or DNA encoding an mRNA) of a heterologous object sequence, is flanked by a 5′ and/or 3′ untranslated region (UTR) that enhances the expression thereof. In some embodiments, the 5′ UTR of an mRNA component (or transcript produced from a DNA component) of the system comprises the sequence 5′-GGGAAAUAAGAGAGAAAAGAAGAGUAAGAAGAAAUAUAAGAGCCACC-3′ (SEQ ID NO: 4621). In some embodiments, the 3′ UTR of an mRNA component (or transcript produced from a DNA component) of the system comprises the sequence 5′-UGAUAAUAGGCUGGAGCCUCGGUGGCCAUGCUUCUUGCCCCUUGGGCCUCCCCCC AGCCCCUCCUCCCCUUCCUGCACCCGUACCCCCGUGGUCUUUGAAUAAAGUCUGA-3′ (SEQ ID NO: 4622). This combination of 5′ UTR and 3′ UTR has been shown to result in desirable expression of an operably linked ORF by Richner et al. Cell 168 (6): P1114-1125 (2017), the teachings and sequences of which are incorporated herein by reference. In some embodiments, a system described herein comprises a DNA encoding a transcript, wherein the DNA comprises the corresponding 5′ UTR and 3′ UTR sequences, with T substituting for U in the above-listed sequence). In some embodiments, a DNA vector used to produce an RNA component of the system further comprises a promoter upstream of the 5′ UTR for initiating in vitro transcription, e.g, a T7, T3, or SP6 promoter. The 5′ UTR above begins with GGG, which is a suitable start for optimizing transcription using T7 RNA polymerase. For tuning transcription levels and altering the transcription start site nucleotides to fit alternative 5′ UTRs, the teachings of Davidson et al. Pac Symp Biocomput 433-443 (2010) describe T7 promoter variants, and the methods of discovery thereof, that fulfill both of these traits.

### Viral Vectors and Components Thereof

[0409] Viruses are a useful source of delivery vehicles for the systems described herein, in addition to a source of relevant enzymes or domains as described herein, e.g., as sources of polymerases and polymerase functions used herein, e.g., DNA-dependent DNA polymerase, RNA-dependent RNA polymerase, RNA-dependent DNA polymerase, DNA-dependent RNA polymerase, reverse transcriptase. Some enzymes, e.g., reverse transcriptases, may have multiple activities, e.g., be capable of both RNA-dependent DNA polymerization and DNA-dependent DNA polymerization, e.g., first and second strand synthesis. In some embodiments, the virus used as a gene modifying delivery system or a source of components thereof may be selected from a group as described by Baltimore Bacteriol Rev 35 (3): 235-241 (1971).

[0410] In some embodiments, the virus is selected from a Group I virus, e.g., is a DNA virus and packages dsDNA into virions. In some embodiments, the Group I virus is selected from, e.g., Adenoviruses, Herpesviruses, Poxviruses.

[0411] In some embodiments, the virus is selected from a Group II virus, e.g., is a DNA virus and packages ssDNA into virions. In some embodiments, the Group II virus is selected from, e.g., Parvoviruses. In some embodiments, the parvovirus is a dependoparvovirus, e.g., an adeno-associated virus (AAV).

[0412] In some embodiments, the virus is selected from a Group III virus, e.g., is an RNA virus and packages dsRNA into virions. In some embodiments, the Group III virus is selected from, e.g., Reoviruses. In some embodiments, one or both strands of the dsRNA contained in such virions is a coding molecule able to serve directly as mRNA upon transduction into a host cell, e.g., can be directly translated into protein upon transduction into a host cell without requiring any intervening nucleic acid replication or polymerization steps.

[0413] In some embodiments, the virus is selected from a Group IV virus, e.g., is an RNA virus and packages ssRNA(+) into virions. In some embodiments, the Group IV virus is selected from, e.g., Coronaviruses, Picornaviruses, Togaviruses. In some embodiments, the ssRNA(+) contained in such virions is a coding molecule able to serve directly as mRNA upon transduction into a host cell, e.g., can be directly translated into protein upon transduction into a host cell without requiring any intervening nucleic acid replication or polymerization steps.

[0414] In some embodiments, the virus is selected from a Group V virus, e.g., is an RNA virus and packages ssRNA(−) into virions. In some embodiments, the Group V virus is selected from, e.g., Orthomyxoviruses, Rhabdoviruses. In some embodiments, an RNA virus with an ssRNA(−) genome also carries an enzyme inside the virion that is transduced to host cells with the viral genome, e.g., an RNA-dependent RNA polymerase, capable of copying the ssRNA(−) into ssRNA(+) that can be translated directly by the host.

[0415] In some embodiments, the virus is selected from a Group VI virus, e.g., is a retrovirus and packages ssRNA(+) into virions. In some embodiments, the Group VI virus is selected from, e.g., retroviruses. In some embodiments, the retrovirus is a lentivirus, e.g., HIV-1, HIV-2, SIV, BIV. In some embodiments, the retrovirus is a spumavirus, e.g., a foamy virus, e.g., HFV, SFV, BFV. In some embodiments, the ssRNA(+) contained in such virions is a coding molecule able to serve directly as mRNA upon transduction into a host cell, e.g., can be directly translated into protein upon transduction into a host cell without requiring any intervening nucleic acid replication or polymerization steps. In some embodiments, the ssRNA(+) is first reverse transcribed and copied to generate a dsDNA genome intermediate from which mRNA can be transcribed in the host cell. In some embodiments, an RNA virus with an ssRNA(+) genome also carries an enzyme inside the virion that is transduced to host cells with the viral genome, e.g., an RNA-dependent DNA polymerase, capable of copying the ssRNA(+) into dsDNA that can be transcribed into mRNA and translated by the host. In some embodiments, the reverse transcriptase from a Group VI retrovirus is incorporated as the reverse transcriptase domain of a gene modifying polypeptide.

[0416] In some embodiments, the virus is selected from a Group VII virus, e.g., is a retrovirus and packages dsRNA into virions. In some embodiments, the Group VII virus is selected from, e.g., Hepadnaviruses. In some embodiments, one or both strands of the dsRNA contained in such virions is a coding molecule able to serve directly as mRNA upon transduction into a host cell, e.g., can be directly translated into protein upon transduction into a host cell without requiring any intervening nucleic acid replication or polymerization steps. In some embodiments, one or both strands of the dsRNA contained in such virions is first reverse transcribed and copied to generate a dsDNA genome intermediate from which mRNA can be transcribed in the host cell. In some embodiments, an RNA virus with a dsRNA genome also carries an enzyme inside the virion that is transduced to host cells with the viral genome, e.g., an RNA-dependent DNA polymerase, capable of copying the dsRNA into dsDNA that can be transcribed into mRNA and translated by the host. In some embodiments, the reverse transcriptase from a Group VII retrovirus is incorporated as the reverse transcriptase domain of a gene modifying polypeptide.

[0417] In some embodiments, virions used to deliver nucleic acid in this invention may also carry enzymes involved in the process of gene modification. For example, a retroviral virion may contain a reverse transcriptase domain that is delivered into a host cell along with the nucleic acid. In some embodiments, an RNA template may be associated with a gene modifying polypeptide within a virion, such that both are co-delivered to a target cell upon transduction of the nucleic acid from the viral particle. In some embodiments, the nucleic acid in a virion may comprise DNA, e.g., linear ssDNA, linear dsDNA, circular ssDNA, circular dsDNA, minicircle DNA, dbDNA, ceDNA. In some embodiments, the nucleic acid in a virion may comprise RNA, e.g., linear ssRNA, linear dsRNA, circular ssRNA, circular dsRNA. In some embodiments, a viral genome may circularize upon transduction into a host cell, e.g., a linear ssRNA molecule may undergo a covalent linkage to form a circular ssRNA, a linear dsRNA molecule may undergo a covalent linkage to form a circular dsRNA or one or more circular ssRNA. In some embodiments, a viral genome may replicate by rolling circle replication in a host cell. In some embodiments, a viral genome may comprise a single nucleic acid molecule, e.g., comprise a non-segmented genome. In some embodiments, a viral genome may comprise two or more nucleic acid molecules, e.g., comprise a segmented genome. In some embodiments, a nucleic acid in a virion may be associated with one or proteins. In some embodiments, one or more proteins in a virion may be delivered to a host cell upon transduction. In some embodiments, a natural virus may be adapted for nucleic acid delivery by the addition of virion packaging signals to the target nucleic acid, wherein a host cell is used to package the target nucleic acid containing the packaging signals.

[0418] In some embodiments, a virion used as a delivery vehicle may comprise a commensal human virus. In some embodiments, a virion used as a delivery vehicle may comprise an anellovirus, the use of which is described in WO2018232017A1, which is incorporated herein by reference in its entirety.

### AAV Administration

[0419] In some embodiments, an adeno-associated virus (AAV) is used in conjunction with the system, template nucleic acid, and/or polypeptide described herein. In some embodiments, an AAV is used to deliver, administer, or package the system, template nucleic acid, and/or polypeptide described herein. In some embodiments, the AAV is a recombinant AAV (rAAV).

[0420] In some embodiments, a system comprises (a) a polypeptide described herein or a nucleic acid encoding the same, (b) a template nucleic acid (e.g., template RNA) described herein, and (c) one or more first tissue-specific expression-control sequences specific to the target tissue, wherein the one or more first tissue-specific expression-control sequences specific to the target tissue are in operative association with (a), (b), or (a) and (b), wherein, when associated with (a), (a) comprises a nucleic acid encoding the polypeptide.

[0421] In some embodiments, a system described herein further comprises a first recombinant adeno-associated virus (rAAV) capsid protein; wherein the at least one of (a) or (b) is associated with the first rAAV capsid protein, wherein at least one of (a) or (b) is flanked by AAV inverted terminal repeats (ITRs).

[0422] In some embodiments, (a) and (b) are associated with the first rAAV capsid protein.

[0423] In some embodiments, (a) and (b) are on a single nucleic acid.

[0424] In some embodiments, the system further comprises a second rAAV capsid protein, wherein at least one of (a) or (b) is associated with the second rAAV capsid protein, and wherein the at least one of (a) or (b) associated with the second rAAV capsid protein is different from the at least one of (a) or (b) is associated with the first rAAV capsid protein.

[0425] In some embodiments, the at least one of (a) or (b) is associated with the first or second rAAV capsid protein is dispersed in the interior of the first or second rAAV capsid protein, which first or second rAAV capsid protein is in the form of an AAV capsid particle.

[0426] In some embodiments, the system further comprises a nanoparticle, wherein the nanoparticle is associated with at least one of (a) or (b).

[0427] In some embodiments, (a) and (b), respectively are associated with: a) a first rAAV capsid protein and a second rAAV capsid protein; b) a nanoparticle and a first rAAV capsid protein; c) a first rAAV capsid protein; d) a first adenovirus capsid protein; e) a first nanoparticle and a second nanoparticle; or f) a first nanoparticle.

[0428] Viral vectors are useful for delivering all or part of a system provided by the invention, e.g., for use in methods provided by the invention. Systems derived from different viruses have been employed for the delivery of polypeptides or nucleic acids; for example: integrase-deficient lentivirus, adenovirus, adeno-associated virus (AAV), herpes simplex virus, and baculovirus (reviewed in Hodge et al. Hum Gene Ther 2017; Narayanavari et al. Crit Rev Biochem Mol Biol 2017; Bochme et al. Curr Gene Ther 2015).

[0429] Adenoviruses are common viruses that have been used as gene delivery vehicles given well-defined biology, genetic stability, high transduction efficiency, and ease of large-scale production (see, for example, review by Lee et al. Genes & Diseases 2017). They possess linear dsDNA genomes and come in a variety of serotypes that differ in tissue and cell tropisms. In order to prevent replication of infectious virus in recipient cells, adenovirus genomes used for packaging are deleted of some or all endogenous viral proteins, which are provided in trans in viral production cells. This renders the genomes helper-dependent, meaning they can only be replicated and packaged into viral particles in the presence of the missing components provided by so-called helper functions. A helper-dependent adenovirus system with all viral ORFs removed may be compatible with packaging foreign DNA of up to ˜37 kb (Parks et al. J Virol 1997). In some embodiments, an adenoviral vector is used to deliver DNA corresponding to the polypeptide or template component of the gene modifying system, or both are contained on separate or the same adenoviral vector. In some embodiments, the adenovirus is a helper-dependent adenovirus (HD-AdV) that is incapable of self-packaging. In some embodiments, the adenovirus is a high-capacity adenovirus (HC-AdV) that has had all or a substantial portion of endogenous viral ORFs deleted, while retaining the necessary sequence components for packaging into adenoviral particles. For this type of vector, the only adenoviral sequences required for genome packaging are noncoding sequences: the inverted terminal repeats (ITRs) at both ends and the packaging signal at the 5′-end (Jager et al. Nat Protoc 2009). In some embodiments, the adenoviral genome also comprises stuffer DNA to meet a minimal genome size for optimal production and stability (see, for example, Hausl et al. Mol Ther 2010). In some embodiments, an adenovirus is used to deliver a gene modifying system to the liver.

[0430] In some embodiments, an adenovirus is used to deliver a gene modifying system to HSCs, e.g., HDAd5/35++. HDAd5/35++ is an adenovirus with modified serotype 35 fibers that de-target the vector from the liver (Wang et al. Blood Adv 2019). In some embodiments, the adenovirus that delivers a gene modifying system to HSCs utilizes a receptor that is expressed specifically on primitive HSCs, e.g., CD46.

[0431] Adeno-associated viruses (AAV) belong to the parvoviridae family and more specifically constitute the dependoparvovirus genus. The AAV genome is composed of a linear single-stranded DNA molecule which contains approximately 4.7 kilobases (kb) and consists of two major open reading frames (ORFs) encoding the non-structural Rep (replication) and structural Cap (capsid) proteins. A second ORF within the cap gene was identified that encodes the assembly-activating protein (AAP). The DNAs flanking the AAV coding regions are two cis-acting inverted terminal repeat (ITR) sequences, approximately 145 nucleotides in length, with interrupted palindromic sequences that can be folded into energetically stable hairpin structures that function as primers of DNA replication. In addition to their role in DNA replication, the ITR sequences have been shown to be involved in viral DNA integration into the cellular genome, rescue from the host genome or plasmid, and encapsidation of viral nucleic acid into mature virions (Muzyczka, (1992) Curr. Top. Micro. Immunol. 158:97-129). In some embodiments, one or more gene modifying nucleic acid components is flanked by ITRs derived from AAV for viral packaging. See, e.g., WO2019113310.

[0432] In some embodiments, one or more components of the gene modifying system are carried via at least one AAV vector. In some embodiments, the at least one AAV vector is selected for tropism to a particular cell, tissue, organism. In some embodiments, the AAV vector is pseudotyped, e.g., AAV2/8, wherein AAV2 describes the design of the construct but the capsid protein is replaced by that from AAV8. It is understood that any of the described vectors could be pseudotype derivatives, wherein the capsid protein used to package the AAV genome is derived from that of a different AAV serotype. Without wishing to be limited in vector choice, a list of exemplary AAV serotypes can be found in Table 18. In some embodiments, an AAV to be employed for gene modifying may be evolved for novel cell or tissue tropism as has been demonstrated in the literature (e.g., Davidsson et al. Proc Natl Acad Sci USA 2019).

[0433] In some embodiments, the AAV delivery vector is a vector which has two AAV inverted terminal repeats (ITRs) and a nucleotide sequence of interest (for example, a sequence coding for a gene modifying polypeptide or a DNA template, or both), each of said ITRs having an interrupted (or noncontiguous) palindromic sequence, i.e., a sequence composed of three segments: a first segment and a last segment that are identical when read 5′->3′ but hybridize when placed against each other, and a segment that is different that separates the identical segments. See, for example, WO2012123430.

[0434] Conventionally, AAV virions with capsids are produced by introducing a plasmid or plasmids encoding the rAAV or scAAV genome, Rep proteins, and Cap proteins (Grimm et al, 1998). Upon introduction of these helper plasmids in trans, the AAV genome is “rescued” (i.e., released and subsequently recovered) from the host genome, and is further encapsidated to produce infectious AAV. In some embodiments, one or more gene modifying nucleic acids are packaged into AAV particles by introducing the ITR-flanked nucleic acids into a packaging cell in conjunction with the helper functions.

[0435] In some embodiments, the AAV genome is a so called self-complementary genome (referred to as scAAV), such that the sequence located between the ITRs contains both the desired nucleic acid sequence (e.g., DNA encoding the gene modifying polypeptide or template, or both) in addition to the reverse complement of the desired nucleic acid sequence, such that these two components can fold over and self-hybridize. In some embodiments, the self-complementary modules are separated by an intervening sequence that permits the DNA to fold back on itself, e.g., forms a stem-loop. An scAAV has the advantage of being poised for transcription upon entering the nucleus, rather than being first dependent on ITR priming and second-strand synthesis to form dsDNA. In some embodiments, one or more gene modifying components is designed as an scAAV, wherein the sequence between the AAV ITRs contains two reverse complementing modules that can self-hybridize to create dsDNA.

[0436] In some embodiments, nucleic acid (e.g., encoding a polypeptide, or a template, or both) delivered to cells is closed-ended, linear duplex DNA (CELiD DNA or ceDNA). In some embodiments, ceDNA is derived from the replicative form of the AAV genome (Li et al. PLOS One 2013). In some embodiments, the nucleic acid (e.g., encoding a polypeptide, or a template DNA, or both) is flanked by ITRs, e.g., AAV ITRs, wherein at least one of the ITRs comprises a terminal resolution site and a replication protein binding site (sometimes referred to as a replicative protein binding site). In some embodiments, the ITRs are derived from an adeno-associated virus, e.g., AAV1, AAV2, AAV3, AAV4, AAV5, AAV6, AAV7, AAV8, AAV9, AAV10, AAV11, AAV12, or a combination thereof. In some embodiments, the ITRs are symmetric. In some embodiments, the ITRs are asymmetric. In some embodiments, at least one Rep protein is provided to enable replication of the construct. In some embodiments, the at least one Rep protein is derived from an adeno-associated virus, e.g., AAV1, AAV2, AAV3, AAV4, AAV5, AAV6, AAV7, AAV8, AAV9, AAV10, AAV11, AAV12, or a combination thereof. In some embodiments, ceDNA is generated by providing a production cell with (i) DNA flanked by ITRs, e.g., AAV ITRs, and (ii) components required for ITR-dependent replication, e.g., AAV proteins Rep78 and Rep52 (or nucleic acid encoding the proteins). In some embodiments, ceDNA is free of any capsid protein, e.g., is not packaged into an infectious AAV particle. In some embodiments, ceDNA is formulated into LNPs (see, for example, WO2019051289A1).

[0437] In some embodiments, the ceDNA vector consists of two self-complementary sequences, e.g., asymmetrical or symmetrical or substantially symmetrical ITRs as defined herein, flanking said expression cassette, wherein the ceDNA vector is not associated with a capsid protein. In some embodiments, the ceDNA vector comprises two self-complementary sequences found in an AAV genome, where at least one ITR comprises an operative Rep-binding element (RBE) (also sometimes referred to herein as “RBS”) and a terminal resolution site (trs) of AAV or a functional variant of the RBE. See, for example, WO2019113310.

[0438] In some embodiments, the AAV genome comprises two genes that encode four replication proteins and three capsid proteins, respectively. In some embodiments, the genes are flanked on either side by 145-bp inverted terminal repeats (ITRs). In some embodiments, the virion comprises up to three capsid proteins (Vp1, Vp2, and/or Vp3), e.g., produced in a 1:1:10 ratio. In some embodiments, the capsid proteins are produced from the same open reading frame and/or from differential splicing (Vp1) and alternative translational start sites (Vp2 and Vp3, respectively). Generally, Vp3 is the most abundant subunit in the virion and participates in receptor recognition at the cell surface defining the tropism of the virus. In some embodiments, Vp1 comprises a phospholipase domain, e.g., which functions in viral infectivity, in the N-terminus of Vp1.

[0439] In some embodiments, packaging capacity of the viral vectors limits the size of the gene modifying system that can be packaged into the vector. For example, the packaging capacity of the AAVs can be about 4.5 kb (e.g., about 3.0, 3.5, 4.0, 4.5, 5.0, 5.5, or 6.0 kb), e.g., including one or two inverted terminal repeats (ITRs), e.g., 145 base ITRs.

[0440] In some embodiments, recombinant AAV (rAAV) comprises cis-acting 145-bp ITRs flanking vector transgene cassettes, e.g., providing up to 4.5 kb for packaging of foreign DNA. Subsequent to infection, rAAV can, in some instances, express a fusion protein of the invention and persist without integration into the host genome by existing episomally in circular head-to-tail concatemers. rAAV can be used, for example, in vitro and in vivo. In some embodiments, AAV-mediated gene delivery requires that the length of the coding sequence of the gene is equal or greater in size than the wild-type AAV genome.

[0441] AAV delivery of genes that exceed this size and/or the use of large physiological regulatory elements can be accomplished, for example, by dividing the protein(s) to be delivered into two or more fragments. In some embodiments, the N-terminal fragment is fused to an intein-N sequence. In some embodiments, the C-terminal fragment is fused to an intein-C sequence. In embodiments, the fragments are packaged into two or more AAV vectors.

[0442] In some embodiments, dual AAV vectors are generated by splitting a large transgene expression cassette in two separate halves (5′ and 3′ ends, or head and tail), e.g., wherein each half of the cassette is packaged in a single AAV vector (of <5 kb). The re-assembly of the full-length transgene expression cassette can, in some embodiments, then be achieved upon co-infection of the same cell by both dual AAV vectors. In some embodiments, co-infection is followed by one or more of: (1) homologous recombination (HR) between 5′ and 3′ genomes (dual AAV overlapping vectors); (2) ITR-mediated tail-to-head concatemerization of 5′ and 3′ genomes (dual AAV trans-splicing vectors); and/or (3) a combination of these two mechanisms (dual AAV hybrid vectors). In some embodiments, the use of dual AAV vectors in vivo results in the expression of full-length proteins. In some embodiments, the use of the dual AAV vector platform represents an efficient and viable gene transfer strategy for transgenes of greater than about 4.0, 4.1, 4.2, 4.3, 4.4, 4.5, 4.6, 4.7, 4.8, 4.9, or 5.0 kb in size. In some embodiments, AAV vectors can also be used to transduce cells with target nucleic acids, e.g., in the in vitro production of nucleic acids and peptides. In some embodiments, AAV vectors can be used for in vivo and ex vivo gene therapy procedures (see, e.g., West et al., Virology 160:38-47 (1987); U.S. Pat. No. 4,797,368; WO 93/24641; Kotin, Human Gene Therapy 5:793-801 (1994); Muzyczka, J. Clin. Invest. 94:1351 (1994); each of which is incorporated herein by reference in their entirety). The construction of recombinant AAV vectors is described in a number of publications, including U.S. Pat. No. 5,173,414; Tratschin et al., Mol. Cell. Biol. 5:3251-3260 (1985); Tratschin, et al., Mol. Cell. Biol. 4:2072-2081 (1984); Hermonat & Muzyczka, PNAS 81:6466-6470 (1984); and Samulski et al., J. Virol. 63:03822-3828 (1989) (incorporated by reference herein in their entirety).

[0443] In some embodiments, a gene modifying polypeptide described herein (e.g., with or without one or more guide nucleic acids) can be delivered using AAV, lentivirus, adenovirus or other plasmid or viral vector types, in particular, using formulations and doses from, for example, U.S. Pat. No. 8,454,972 (formulations, doses for adenovirus), U.S. Pat. No. 8,404,658 (formulations, doses for AAV) and U.S. Pat. No. 5,846,946 (formulations, doses for DNA plasmids) and from clinical trials and publications regarding the clinical trials involving lentivirus, AAV and adenovirus. For example, for AAV, the route of administration, formulation and dose can be as described in U.S. Pat. No. 8,454,972 and as in clinical trials involving AAV. For adenovirus, the route of administration, formulation and dose can be as described in U.S. Pat. No. 8,404,658 and as in clinical trials involving adenovirus. For plasmid delivery, the route of administration, formulation and dose can be as described in U.S. Pat. No. 5,846,946 and as in clinical studies involving plasmids. Doses can be based on or extrapolated to an average 70 kg individual (e.g. a male adult human), and can be adjusted for patients, subjects, mammals of different weight and species. Frequency of administration is within the ambit of the medical or veterinary practitioner (e.g., physician, veterinarian), depending on usual factors including the age, sex, general health, other conditions of the patient or subject and the particular condition or symptoms being addressed. In some embodiments, the viral vectors can be injected into the tissue of interest. For cell-type specific gene modifying, the expression of the gene modifying polypeptide and optional guide nucleic acid can, in some embodiments, be driven by a cell-type specific promoter.

[0444] In some embodiments, AAV allows for low toxicity, for example, due to the purification method not requiring ultracentrifugation of cell particles that can activate the immune response. In some embodiments, AAV allows low probability of causing insertional mutagenesis, for example, because it does not substantially integrate into the host genome.

[0445] In some embodiments, AAV has a packaging limit of about 4.4, 4.5, 4.6, 4.7, or 4.75 kb. In some embodiments, a gene modifying polypeptide-encoding sequence, promoter, and transcription terminator can fit into a single viral vector. SpCas9 (4.1 kb) may, in some instances, be difficult to package into AAV. Therefore, in some embodiments, a gene modifying polypeptide coding sequence is used that is shorter in length than other gene modifying polypeptide coding sequences or base editors. In some embodiments, the gene modifying polypeptide encoding sequences are less than about 4.5 kb, 4.4 kb, 4.3 kb, 4.2 kb, 4.1 kb, 4 kb, 3.9 kb, 3.8 kb, 3.7 kb, 3.6 kb, 3.5 kb, 3.4 kb, 3.3 kb, 3.2 kb, 3.1 kb, 3 kb, 2.9 kb, 2.8 kb, 2.7 kb, 2.6 kb, 2.5 kb, 2 kb, or 1.5 kb.

[0446] An AAV can be AAV1, AAV2, AAV5 or any combination thereof. In some embodiments, the type of AAV is selected with respect to the cells to be targeted; e.g., AAV serotypes 1, 2, 5 or a hybrid capsid AAV1, AAV2, AAV5 or any combination thereof can be selected for targeting brain or neuronal cells; or AAV4 can be selected for targeting cardiac tissue. In some embodiments, AAV8 is selected for delivery to the liver. Exemplary AAV serotypes as to these cells are described, for example, in Grimm, D. et al, J. Virol. 82:5887-5911 (2008) (incorporated herein by reference in its entirety). In some embodiments, AAV refers all serotypes, subtypes, and naturally-occurring AAV as well as recombinant AAV. AAV may be used to refer to the virus itself or a derivative thereof. In some embodiments, AAV includes AAV1, AAV2, AAV3, AAV3B, AAV4, AAV5, AAV6, AAV6.2, AAV7, AAVrh.64R1, AAVhu.37, AAVrh.8, AAVrh.32.33, AAV8, AAV9, AAV-DJ, AAV2/8, AAVrhlO, AAVLK03, AV10, AAV11, AAV 12, rhlO, and hybrids thereof, avian AAV, bovine AAV, canine AAV, equine AAV, primate AAV, non-primate AAV, and ovine AAV. The genomic sequences of various serotypes of AAV, as well as the sequences of the native terminal repeats (TRs), Rep proteins, and capsid subunits are known in the art. Such sequences may be found in the literature or in public databases such as GenBank. Additional exemplary AAV serotypes are listed in Table 18.

TABLE 18
Exemplary AAV serotypes.

| Target Tissue | Vehicle | Reference |
|---|---|---|
| Liver | AAV (AAV8¹, AAVrh.8¹, AAVhu.37¹, AAV2/8, | 1. Wang et al., Mol. Ther. 18, 118-25 (2010) |
| | AAV2/rh10², AAV9, AAV2, NP 40³, NP59^{2,3} | 2. Ginn et al., JHEP Reports, 100065 (2019) |
| | AAV3B⁵, AAV-DJ⁴, AAV-LK01⁴, AAV-LK02⁴, | 3. Paulk et al., Mol. Ther. 26, 289-303 (2018). |
| | AAV-LK03⁴, AAV-LK19⁴, AAV5⁷ | 4. L. Lisowski et al., Nature. 506, 382-6 (2014). |
| | Adenovirus (Ad5, HC-AdV⁶) | 5. L. Wang et al., Mol. Ther. 23, 1877-87 (2015). |
| | | 6. Hausl Mol Ther (2010) |
| | | 7. Davidoff et al., Mol. Ther. 11, 875-88 (2005) |
| Lung | AAV (AAV4, AAV5, AAV6¹, AAV9, H22²) | 1. Duncan et al., Mol Ther Methods Clin Dev |
| | Adenovirus (Ad5, Ad3, Ad21, Ad14)³ | (2018) |
| | | 2. Cooney et al., Am J Respir Cell Mol Biol |
| | | (2019) |
| | | 3. Li et al., Mol Ther Methods Clin Dev (2019) |
| Skin | AAV (AAV6¹, AAV-LK 19²) | 1. Petek et al., Mol. Ther. (2010) |
| | | 2. L. Lisowski et al., Nature. 506, 382-6 (2014). |
| HSCs | Adenovirus (HDAd5/35++) | Wang et al. Blood Adv (2019) |

[0447] In some embodiments, a pharmaceutical composition (e.g., comprising an AAV as described herein) has less than 10% empty capsids, less than 8% empty capsids, less than 7% empty capsids, less than 5% empty capsids, less than 3% empty capsids, or less than 1% empty capsids. In some embodiments, the pharmaceutical composition has less than about 5% empty capsids. In some embodiments, the number of empty capsids is below the limit of detection. In some embodiments, it is advantageous for the pharmaceutical composition to have low amounts of empty capsids, e.g., because empty capsids may generate an adverse response (e.g., immune response, inflammatory response, liver response, and/or cardiac response), e.g., with little or no substantial therapeutic benefit.

[0448] In some embodiments, the residual host cell protein (rHCP) in the pharmaceutical composition is less than or equal to 100 ng/ml rHCP per 1×10¹³ vg/ml, e.g., less than or equal to 40 ng/ml rHCP per 1×10¹³ vg/ml or 1-50 ng/ml rHCP per 1×10¹³ vg/ml. In some embodiments, the pharmaceutical composition comprises less than 10 ng rHCP per 1.0×10¹³ vg, or less than 5 ng rHCP per 1.0×10¹³ vg, less than 4 ng rHCP per 1.0×10¹³ vg, or less than 3 ng rHCP per 1.0×10¹³ vg, or any concentration in between. In some embodiments, the residual host cell DNA (hcDNA) in the pharmaceutical composition is less than or equal to 5×10⁶ pg/ml hcDNA per 1×10¹³ vg/ml, less than or equal to 1.2×10⁶ pg/ml hcDNA per 1×10¹³ vg/ml, or 1×10⁵ pg/ml hcDNA per 1×10¹³ vg/ml. In some embodiments, the residual host cell DNA in said pharmaceutical composition is less than 5.0×10⁵ μg per 1×10¹³ vg, less than 2.0×10⁵ μg per 1.0×10¹³ vg, less than 1.1×10⁵ μg per 1.0×10¹³ vg, less than 1.0×10⁵ pg hcDNA per 1.0×10¹³ vg, less than 0.9×10⁵ pg hcDNA per 1.0×10¹³ vg, less than 0.8×10⁵ pg hcDNA per 1.0×10¹³ vg, or any concentration in between.

[0449] In some embodiments, the residual plasmid DNA in the pharmaceutical composition is less than or equal to 1.7×10⁵ pg/ml per 1.0×10¹³ vg/ml, or 1×10⁵ pg/ml per 1×1.0×10¹³ vg/ml, or 1.7×10⁶ pg/ml per 1.0×10¹³ vg/ml. In some embodiments, the residual DNA plasmid in the pharmaceutical composition is less than 10.0×10⁵ pg by 1.0×10¹³ vg, less than 8.0×10⁵ pg by 1.0×10¹³ vg or less than 6.8×10⁵ pg by 1.0×10¹³ vg. In embodiments, the pharmaceutical composition comprises less than 0.5 ng per 1.0×10¹³ vg, less than 0.3 ng per 1.0×10¹³ vg, less than 0.22 ng per 1.0×10¹³ vg or less than 0.2 ng per 1.0×10¹³ vg or any intermediate concentration of bovine serum albumin (BSA). In embodiments, the benzonase in the pharmaceutical composition is less than 0.2 ng by 1.0×10¹³ vg, less than 0.1 ng by 1.0×10¹³ vg, less than 0.09 ng by 1.0×10¹³ vg, less than 0.08 ng by 1.0×10¹³ vg or any intermediate concentration. In embodiments, Poloxamer 188 in the pharmaceutical composition is about 10 to 150 ppm, about 15 to 100 ppm or about 20 to 80 ppm. In embodiments, the cesium in the pharmaceutical composition is less than 50 pg/g (ppm), less than 30 pg/g (ppm) or less than 20 pg/g (ppm) or any intermediate concentration.

[0450] In embodiments, the pharmaceutical composition comprises total impurities, e.g., as determined by SDS-PAGE, of less than 10%, less than 8%, less than 7%, less than 6%, less than 5%, less than 4%, less than 3%, less than 2%, or any percentage in between. In embodiments, the total purity, e.g., as determined by SDS-PAGE, is greater than 90%, greater than 92%, greater than 93%, greater than 94%, greater than 95%, greater than 96%, greater than 97%, greater than 98%, or any percentage in between. In embodiments, no single unnamed related impurity, e.g., as measured by SDS-PAGE, is greater than 5%, greater than 4%, greater than 3% or greater than 2%, or any percentage in between. In embodiments, the pharmaceutical composition comprises a percentage of filled capsids relative to total capsids (e.g., peak 1+peak 2 as measured by analytical ultracentrifugation) of greater than 85%, greater than 86%, greater than 87%, greater than 88%, greater than 89%, greater than 90%, greater than 91%, greater than 91.9%, greater than 92%, greater than 93%, or any percentage in between. In embodiments of the pharmaceutical composition, the percentage of filled capsids measured in peak 1 by analytical ultracentrifugation is 20-80%, 25-75%, 30-75%, 35-75%, or 37.4-70.3%. In embodiments of the pharmaceutical composition, the percentage of filled capsids measured in peak 2 by analytical ultracentrifugation is 20-80%, 20-70%, 22-65%, 24-62%, or 24.9-60.1%.

[0451] In one embodiment, the pharmaceutical composition comprises a genomic titer of 1.0 to 5.0×10¹³ vg/mL, 1.2 to 3.0×10¹³ vg/mL or 1.7 to 2.3×10¹³ vg/ml. In one embodiment, the pharmaceutical composition exhibits a biological load of less than 5 CFU/mL, less than 4 CFU/mL, less than 3 CFU/mL, less than 2 CFU/mL or less than 1 CFU/mL or any intermediate contraction. In embodiments, the amount of endotoxin according to USP, for example, USP <85> (incorporated by reference in its entirety) is less than 1.0 EU/mL, less than 0.8 EU/mL or less than 0.75 EU/mL. In embodiments, the osmolarity of a pharmaceutical composition according to USP, for example, USP <785> (incorporated by reference in its entirety) is 350 to 450 mOsm/kg, 370 to 440 mOsm/kg or 390 to 430 mOsm/kg. In embodiments, the pharmaceutical composition contains less than 1200 particles that are greater than 25 μm per container, less than 1000 particles that are greater than 25 μm per container, less than 500 particles that are greater than 25 μm per container or any intermediate value. In embodiments, the pharmaceutical composition contains less than 10,000 particles that are greater than 10 μm per container, less than 8000 particles that are greater than 10 μm per container or less than 600 particles that are greater than 10 μm per container.

[0452] In one embodiment, the pharmaceutical composition has a genomic titer of 0.5 to 5.0×10¹³ vg/mL, 1.0 to 4.0×10¹³ vg/mL, 1.5 to 3.0×10¹³ vg/ml or 1.7 to 2.3×10¹³ vg/ml. In one embodiment, the pharmaceutical composition described herein comprises one or more of the following: less than about 0.09 ng benzonase per 1.0×10¹³ vg, less than about 30 pg/g (ppm) of cesium, about 20 to 80 ppm Poloxamer 188, less than about 0.22 ng BSA per 1.0×10¹³ vg, less than about 6.8×10⁵ μg of residual DNA plasmid per 1.0×10¹³ vg, less than about 1.1×105 μg of residual hcDNA per 1.0×10¹³ vg, less than about 4 ng of rHCP per 1.0×10¹³ vg, pH 7.7 to 8.3, about 390 to 430 mOsm/kg, less than about 600 particles that are >25 μm in size per container, less than about 6000 particles that are >10 μm in size per container, about 1.7×10¹³-2.3×10¹³ vg/mL genomic titer, infectious titer of about 3.9×10⁸ to 8.4×10¹⁰ IU per 1.0×10¹³ vg, total protein of about 100-300 μg per 1.0×10¹³ vg, mean survival of >24 days in A7SMA mice with about 7.5×10¹³ vg/kg dose of viral vector, about 70 to 130% relative potency based on an in vitro cell based assay and/or less than about 5% empty capsid. In various embodiments, the pharmaceutical compositions described herein comprise any of the viral particles discussed here, retain a potency of between +20%, between +15%, between +10% or within +5% of a reference standard. In some embodiments, potency is measured using a suitable in vitro cell assay or in vivo animal model.

[0453] Additional methods of preparation, characterization, and dosing AAV particles are taught in WO2019094253, which is incorporated herein by reference in its entirety.

[0454] Additional rAAV constructs that can be employed consonant with the invention include those described in Wang et al 2019, available at://doi.org/10.1038/s41573-019-0012-9, including Table 1 thereof, which is incorporated by reference in its entirety.

### Lipid Nanoparticles

[0455] The methods and systems provided herein may employ any suitable carrier or delivery modality, including, in certain embodiments, lipid nanoparticles (LNPs). Lipid nanoparticles, in some embodiments, comprise one or more ionic lipids, such as non-cationic lipids (e.g., neutral or anionic, or zwitterionic lipids); one or more conjugated lipids (such as PEG-conjugated lipids or lipids conjugated to polymers described in Table 5 of WO2019217941; incorporated herein by reference in its entirety); one or more sterols (e.g., cholesterol); and, optionally, one or more targeting molecules (e.g., conjugated receptors, receptor ligands, antibodies); or combinations of the foregoing.

[0456] Lipids that can be used in nanoparticle formations (e.g., lipid nanoparticles) include, for example those described in Table 4 of WO2019217941, which is incorporated by reference—e.g., a lipid-containing nanoparticle can comprise one or more of the lipids in Table 4 of WO2019217941. Lipid nanoparticles can include additional elements, such as polymers, such as the polymers described in Table 5 of WO2019217941, incorporated by reference.

[0457] In some embodiments, conjugated lipids, when present, can include one or more of PEG-diacylglycerol (DAG) (such as 1-(monomethoxy-polyethyleneglycol)-2,3-dimyristoylglycerol (PEG-DMG)), PEG-dialkyloxypropyl (DAA), PEG-phospholipid, PEG-ceramide (Cer), a pegylated phosphatidylethanoloamine (PEG-PE), PEG succinate diacylglycerol (PEGS-DAG) (such as 4-0-(2′,3′-di(tetradecanoyloxy)propyl-1-0-(w-methoxy(polyethoxy)ethyl)butanedioate (PEG-S-DMG)), PEG dialkoxypropylcarbam, N-(carbonyl-methoxypoly ethylene glycol 2000)-1,2-distearoyl-sn-glycero-3-phosphoethanolamine sodium salt, and those described in Table 2 of WO2019051289 (incorporated by reference), and combinations of the foregoing.

[0458] In some embodiments, sterols that can be incorporated into lipid nanoparticles include one or more of cholesterol or cholesterol derivatives, such as those in WO2009/127060 or US2010/0130588, which are incorporated by reference. Additional exemplary sterols include phytosterols, including those described in Eygeris et al (2020), dx.doi.org/10.1021/acs.nanolett.0c01386, incorporated herein by reference.

[0459] In some embodiments, the lipid particle comprises an ionizable lipid, a non-cationic lipid, a conjugated lipid that inhibits aggregation of particles, and a sterol. The amounts of these components can be varied independently and to achieve desired properties. For example, in some embodiments, the lipid nanoparticle comprises an ionizable lipid is in an amount from about 20 mol % to about 90 mol % of the total lipids (in other embodiments it may be 20-70% (mol), 30-60% (mol) or 40-50% (mol); about 50 mol % to about 90 mol % of the total lipid present in the lipid nanoparticle), a non-cationic lipid in an amount from about 5 mol % to about 30 mol % of the total lipids, a conjugated lipid in an amount from about 0.5 mol % to about 20 mol % of the total lipids, and a sterol in an amount from about 20 mol % to about 50 mol % of the total lipids. The ratio of total lipid to nucleic acid (e.g., encoding the gene modifying polypeptide or template nucleic acid) can be varied as desired. For example, the total lipid to nucleic acid (mass or weight) ratio can be from about 10:1 to about 30:1.

[0460] In some embodiments, an ionizable lipid may be a cationic lipid, an ionizable cationic lipid, e.g., a cationic lipid that can exist in a positively charged or neutral form depending on pH, or an amine-containing lipid that can be readily protonated. In some embodiments, the cationic lipid is a lipid capable of being positively charged, e.g., under physiological conditions. Exemplary cationic lipids include one or more amine group(s) which bear the positive charge. In some embodiments, the lipid particle comprises a cationic lipid in formulation with one or more of neutral lipids, ionizable amine-containing lipids, biodegradable alkyn lipids, steroids, phospholipids including polyunsaturated lipids, structural lipids (e.g., sterols), PEG, cholesterol and polymer conjugated lipids. In some embodiments, the cationic lipid may be an ionizable cationic lipid. An exemplary cationic lipid as disclosed herein may have an effective pKa over 6.0. In embodiments, a lipid nanoparticle may comprise a second cationic lipid having a different effective pKa (e.g., greater than the first effective pKa), than the first cationic lipid. A lipid nanoparticle may comprise between 40 and 60 mol percent of a cationic lipid, a neutral lipid, a steroid, a polymer conjugated lipid, and a therapeutic agent, e.g., a nucleic acid (e.g., RNA) described herein (e.g., a template nucleic acid or a nucleic acid encoding a gene modifying polypeptide), encapsulated within or associated with the lipid nanoparticle. In some embodiments, the nucleic acid is co-formulated with the cationic lipid. The nucleic acid may be adsorbed to the surface of an LNP, e.g., an LNP comprising a cationic lipid. In some embodiments, the nucleic acid may be encapsulated in an LNP, e.g., an LNP comprising a cationic lipid. In some embodiments, the lipid nanoparticle may comprise a targeting moiety, e.g., coated with a targeting agent. In embodiments, the LNP formulation is biodegradable. In some embodiments, a lipid nanoparticle comprising one or more lipid described herein, e.g., Formula (i), (ii), (ii), (vii) and/or (ix) encapsulates at least 1%, at least 5%, at least 10%, at least 20%, at least 30%, at least 40%, at least 50%, at least 60%, at least 70%, at least 80%, at least 90%, at least 92%, at least 95%, at least 97%, at least 98% or 100% of an RNA molecule, e.g., template RNA and/or a mRNA encoding the gene modifying polypeptide.

[0461] In some embodiments, the lipid to nucleic acid ratio (mass/mass ratio; w/w ratio) can be in the range of from about 1:1 to about 25:1, from about 10:1 to about 14:1, from about 3:1 to about 15:1, from about 4:1 to about 10:1, from about 5:1 to about 9:1, or about 6:1 to about 9:1. The amounts of lipids and nucleic acid can be adjusted to provide a desired N/P ratio, for example, N/P ratio of 3, 4, 5, 6, 7, 8, 9, 10 or higher. Generally, the lipid nanoparticle formulation's overall lipid content can range from about 5 mg/ml to about 30 mg/mL.

[0462] Exemplary ionizable lipids that can be used in lipid nanoparticle formulations include, without limitation, those listed in Table 1 of WO2019051289, incorporated herein by reference. Additional exemplary lipids include, without limitation, one or more of the following formulae: X of US2016/0311759; I of US20150376115 or in US2016/0376224; I, II or III of US20160151284; I, IA, II, or IIA of US20170210967; I-c of US20150140070; A of US2013/0178541; I of US2013/0303587 or US2013/0123338; I of US2015/0141678; II, III, IV, or V of US2015/0239926; I of US2017/0119904; I or II of WO2017/117528; A of US2012/0149894; A of US2015/0057373; A of WO2013/116126; A of US2013/0090372; A of US2013/0274523; A of US2013/0274504; A of US2013/0053572; A of WO2013/016058; A of WO2012/162210; I of US2008/042973; I, II, III, or IV of US2012/01287670; I or II of US2014/0200257; I, II, or III of US2015/0203446; I or III of US2015/0005363; I, IA, IB, IC, ID, II, IIA, IIB, IIC, IID, or III-XXIV of US2014/0308304; of US2013/0338210; I, II, III, or IV of WO2009/132131; A of US2012/01011478; I or XXXV of US2012/0027796; XIV or XVII of US2012/0058144; of US2013/0323269; I of US2011/0117125; I, II, or III of US2011/0256175; I, II, III, IV, V, VI, VII, VIII, IX, X, XI, XII of US2012/0202871; I, II, III, IV, V, VI, VII, VIII, X, XII, XIII, XIV, XV, or XVI of US2011/0076335; I or II of US2006/008378; I of US2013/0123338; I or X-A-Y-Z of US2015/0064242; XVI, XVII, or XVIII of US2013/0022649; I, II, or III of US2013/0116307; I, II, or III of US2013/0116307; I or II of US2010/0062967; I-X of US2013/0189351; I of US2014/0039032; V of US2018/0028664; I of US2016/0317458; I of US2013/0195920; 5, 6, or 10 of U.S. Pat. No. 10,221,127; III-3 of WO2018/081480; I-5 or 1-8 of WO2020/081938; 18 or 25 of U.S. Pat. No. 9,867,888; A of US2019/0136231; II of WO2020/219876; 1 of US2012/0027803; OF-02 of US2019/0240349; 23 of U.S. Pat. No. 10,086,013; cKK-E12/A6 of Miao et al (2020); C12-200 of WO2010/053572; 7C1 of Dahlman et al (2017); 304-013 or 503-013 of Whitehead et al; TS-P4C2 of U.S. Pat. No. 9,708,628; I of WO2020/106946; I of WO2020/106946.

[0463] In some embodiments, the ionizable lipid is MC3 (6Z,9Z,28Z,31Z)-heptatriaconta-6,9,28,31-tetraen-19-yl-4-(dimethylamino) butanoate (DLin-MC3-DMA or MC3), e.g., as described in Example 9 of WO2019051289A9 (incorporated by reference herein in its entirety). In some embodiments, the ionizable lipid is the lipid ATX-002, e.g., as described in Example 10 of WO2019051289A9 (incorporated by reference herein in its entirety). In some embodiments, the ionizable lipid is (13Z,16Z)-A,A-dimethyl-3-nonyldocosa-13, 16-dien-1-amine (Compound 32), e.g., as described in Example 11 of WO2019051289A9 (incorporated by reference herein in its entirety). In some embodiments, the ionizable lipid is Compound 6 or Compound 22, e.g., as described in Example 12 of WO2019051289A9 (incorporated by reference herein in its entirety). In some embodiments, the ionizable lipid is heptadecan-9-yl 8-((2-hydroxyethyl) (6-oxo-6-(undecyloxy)hexyl)amino)octanoate (SM-102); e.g., as described in Example 1 of U.S. Pat. No. 9,867,888 (incorporated by reference herein in its entirety). In some embodiments, the ionizable lipid is 9Z, 12Z)-3-((4,4-bis(octyloxy)butanoyl)oxy)-2-((((3-(diethylamino)propoxy)carbonyl)oxy)methyl)propyl octadeca-9,12-dienoate (LP01) e.g., as synthesized in Example 13 of WO2015/095340 (incorporated by reference herein in its entirety). In some embodiments, the ionizable lipid is Di((Z)-non-2-en-1-yl) 9-((4-dimethylamino)butanoyl)oxy)heptadecanedioate (L319), e.g. as synthesized in Example 7, 8, or 9 of US2012/0027803 (incorporated by reference herein in its entirety). In some embodiments, the ionizable lipid is 1,1′-((2-(4-(2-((2-(Bis(2-hydroxydodecyl)amino)ethyl)(2-hydroxydodecyl)amino)ethyl)piperazin-1-yl)ethyl)azanediyl)bis(dodecan-2-ol) (C12-200), e.g., as synthesized in Examples 14 and 16 of WO2010/053572 (incorporated by reference herein in its entirety). In some embodiments, the ionizable lipid is; Imidazole cholesterol ester (ICE) lipid (3S, 10R, 13R, 17R)-10, 13-dimethyl-17-((R)-6-methylheptan-2-yl)-2, 3, 4, 7, 8, 9, 10, 11, 12, 13, 14, 15, 16, 17-tetradecahydro-1H-cyclopenta[a]phenanthren-3-yl 3-(1H-imidazol-4-yl) propanoate, e.g., Structure (I) from WO2020/106946 (incorporated by reference herein in its entirety).

[0464] Some non-limiting examples of lipid compounds that may be used (e.g., in combination with other lipid components) to form lipid nanoparticles for the delivery of compositions described herein, e.g., nucleic acid (e.g., RNA) described herein (e.g., a template nucleic acid or a nucleic acid encoding a gene modifying polypeptide) includes,

[chemical structure]

[0465] In some embodiments an LNP comprising Formula (i) is used to deliver a gene modifying composition described herein to the liver and/or hepatocyte cells.

[chemical structure]

[0466] In some embodiments an LNP comprising Formula (ii) is used to deliver a gene modifying composition described herein to the liver and/or hepatocyte cells.

[chemical structure]

[0467] In some embodiments an LNP comprising Formula (iii) is used to deliver a gene modifying composition described herein to the liver and/or hepatocyte cells.

[chemical structure]

[0468] In some embodiments an LNP comprising Formula (v) is used to deliver a gene modifying composition described herein to the liver and/or hepatocyte cells.

[chemical structure]

[0469] In some embodiments an LNP comprising Formula (vi) is used to deliver a gene modifying composition described herein to the liver and/or hepatocyte cells.

[chemical structure]

[0470] In some embodiments an LNP comprising Formula (viii) is used to deliver a gene modifying composition described herein to the liver and/or hepatocyte cells.

[chemical structure]

[0471] In some embodiments an LNP comprising Formula (ix) is used to deliver a gene modifying composition described herein to the liver and/or hepatocyte cells.

[chemical structure]

wherein
X¹ is O, NR¹, or a direct bond, X² is C2-5 alkylene, X³ is C(═O) or a direct bond, R¹ is H or Me, R³ is Ci-3 alkyl, R² is Ci-3 alkyl, or R2 taken together with the nitrogen atom to which it is attached and 1-3 carbon atoms of X2 form a 4-, 5-, or 6-membered ring, or X′ is NR′, R′ and R² taken together with the nitrogen atoms to which they are attached form a 5- or 6-membered ring, or R² taken together with R³ and the nitrogen atom to which they are attached form a 5-, 6-, or 7-membered ring, Y¹ is C2-12 alkylene, Y² is selected from

[chemical structure]

(in either n is 0 to 3, R⁴ is Ci-15 alkyl, Z¹ is Ci-6 alkylene or a direct bond,

### Z² is

[chemical structure]

(in either orientation) or absent, provided that if Z¹ is a direct bond, Z² is absent;
R⁵ is C5-9 alkyl or C6-10 alkoxy, R⁶ is C5-9 alkyl or C6-10 alkoxy, W is methylene or a direct bond, and R⁷ is H or Me, or a salt thereof, provided that if R³ and R² are C2 alkyls, X¹ is O, X² is linear C3 alkylene, X³ is C(═O), Y¹ is linear Ce alkylene, (Y²)n-R4 is

[chemical structure]

R⁴ is linear C5 alkyl, Z¹ is C2 alkylene, Z² is absent, W is methylene, and R⁷ is H, then R⁵ and R⁶ are not Cx alkoxy.
In some embodiments an LNP comprising Formula (xii) is used to deliver a gene modifying composition described herein to the liver and/or hepatocyte cells.

[chemical structure]

[0473] In some embodiments an LNP comprising Formula (xi) is used to deliver a gene modifying composition described herein to the liver and/or hepatocyte cells.

[chemical structure]

[0474] In some embodiments an LNP comprises a compound of Formula (xiii) and a compound of Formula (xiv).

[chemical structure]

[0475] In some embodiments an LNP comprising Formula (xv) is used to deliver a gene modifying composition described herein to the liver and/or hepatocyte cells.

[chemical structure]

[0476] In some embodiments an LNP comprising a formulation of Formula (xvi) is used to deliver a gene modifying composition described herein to the lung endothelial cells.

[chemical structure]

where X=

[chemical structure]

[chemical structure]

[0477] In some embodiments, a lipid compound used to form lipid nanoparticles for the delivery of compositions described herein, e.g., nucleic acid (e.g., RNA) described herein (e.g., a template nucleic acid or a nucleic acid encoding a gene modifying polypeptide) is made by one of the following reactions:

[chemical structure]

[0478] Exemplary non-cationic lipids include, but are not limited to, distearoyl-sn-glycero-phosphoethanolamine, distearoylphosphatidylcholine (DSPC), dioleoylphosphatidylcholine (DOPC), dipalmitoylphosphatidylcholine (DPPC), dioleoylphosphatidylglycerol (DOPG), dipalmitoylphosphatidylglycerol (DPPG), dioleoyl-phosphatidylethanolamine (DOPE), 1,2-dioleoyl-sn-glycero-3-phosphoethanolamine (DOPE), palmitoyloleoylphosphatidylcholine (POPC), palmitoyloleoylphosphatidylethanolamine (POPE), dioleoyl-phosphatidylethanolamine 4-(N-maleimidomethyl)-cyclohexane-1-carboxylate (DOPE-mal), dipalmitoyl phosphatidyl ethanolamine (DPPE), dimyristoylphosphoethanolamine (DMPE), distearoyl-phosphatidyl-ethanolamine (DSPE), monomethyl-phosphatidylethanolamine (such as 16-O-monomethyl PE), dimethyl-phosphatidylethanolamine (such as 16-O-dimethyl PE), 18-1-trans PE, 1-stearoyl-2-oleoyl-phosphatidyethanolamine (SOPE), hydrogenated soy phosphatidylcholine (HSPC), egg phosphatidylcholine (EPC), dioleoylphosphatidylserine (DOPS), sphingomyelin (SM), dimyristoyl phosphatidylcholine (DMPC), dimyristoyl phosphatidylglycerol (DMPG), distearoylphosphatidylglycerol (DSPG), dierucoylphosphatidylcholine (DEPC), palmitoyloleyolphosphatidylglycerol (POPG), dielaidoyl-phosphatidylethanolamine (DEPE), lecithin, phosphatidylethanolamine, lysolecithin, lysophosphatidylethanolamine, phosphatidylserine, phosphatidylinositol, sphingomyelin, egg sphingomyelin (ESM), cephalin, cardiolipin, phosphatidicacid, cerebrosides, dicetylphosphate, lysophosphatidylcholine, dilinoleoylphosphatidylcholine, or mixtures thereof. It is understood that other diacylphosphatidylcholine and diacylphosphatidylethanolamine phospholipids can also be used. The acyl groups in these lipids are preferably acyl groups derived from fatty acids having C10-C24 carbon chains, e.g., lauroyl, myristoyl, paimitoyl, stearoyl, or oleoyl. Additional exemplary lipids, in certain embodiments, include, without limitation, those described in Kim et al. (2020) dx.doi.org/10.1021/acs.nanolett.0c01386, incorporated herein by reference. Such lipids include, in some embodiments, plant lipids found to improve liver transfection with mRNA (e.g., DGTS). In some embodiments, the non-cationic lipid may have the following structure,

[chemical structure]

[0479] Other examples of non-cationic lipids suitable for use in the lipid nanoparticles include, without limitation, nonphosphorous lipids such as, e.g., stearylamine, dodecylamine, hexadecylamine, acetyl palmitate, glycerol ricinoleate, hexadecyl stereate, isopropyl myristate, amphoteric acrylic polymers, triethanolamine-lauryl sulfate, alkyl-aryl sulfate polyethyloxylated fatty acid amides, dioctadecyl dimethyl ammonium bromide, ceramide, sphingomyelin, and the like. Other non-cationic lipids are described in WO2017/099823 or US patent publication US2018/0028664, the contents of which is incorporated herein by reference in their entirety.

[0480] In some embodiments, the non-cationic lipid is oleic acid or a compound of Formula I, II, or IV of US2018/0028664, incorporated herein by reference in its entirety. The non-cationic lipid can comprise, for example, 0-30% (mol) of the total lipid present in the lipid nanoparticle. In some embodiments, the non-cationic lipid content is 5-20% (mol) or 10-15% (mol) of the total lipid present in the lipid nanoparticle. In embodiments, the molar ratio of ionizable lipid to the neutral lipid ranges from about 2:1 to about 8:1 (e.g., about 2:1, 3:1, 4:1, 5:1, 6:1, 7:1, or 8:1).

[0481] In some embodiments, the lipid nanoparticles do not comprise any phospholipids.

[0482] In some embodiments, the lipid nanoparticle can further comprise a component, such as a sterol, to provide membrane integrity. One exemplary sterol that can be used in the lipid nanoparticle is cholesterol and derivatives thereof. Non-limiting examples of cholesterol derivatives include polar analogues such as 5a-choiestanol, 53-coprostanol, choiesteryl-(2′-hydroxy)-ethyl ether, choiesteryl-(4′-hydroxy)-butyl ether, and 6-ketocholestanol; non-polar analogues such as 5a-cholestane, cholestenone, 5a-cholestanone, 5p-cholestanone, and cholesteryl decanoate; and mixtures thereof. In some embodiments, the cholesterol derivative is a polar analogue, e.g., choiesteryl-(4′-hydroxy)-butyl ether. Exemplary cholesterol derivatives are described in PCT publication WO2009/127060 and US patent publication US2010/0130588, each of which is incorporated herein by reference in its entirety.

[0483] In some embodiments, the component providing membrane integrity, such as a sterol, can comprise 0-50% (mol) (e.g., 0-10%, 10-20%, 20-30%, 30-40%, or 40-50%) of the total lipid present in the lipid nanoparticle. In some embodiments, such a component is 20-50% (mol) 30-40% (mol) of the total lipid content of the lipid nanoparticle.

[0484] In some embodiments, the lipid nanoparticle can comprise a polyethylene glycol (PEG) or a conjugated lipid molecule. Generally, these are used to inhibit aggregation of lipid nanoparticles and/or provide steric stabilization. Exemplary conjugated lipids include, but are not limited to, PEG-lipid conjugates, polyoxazoline (POZ)-lipid conjugates, polyamide-lipid conjugates (such as ATTA-lipid conjugates), cationic-polymer lipid (CPL) conjugates, and mixtures thereof. In some embodiments, the conjugated lipid molecule is a PEG-lipid conjugate, for example, a (methoxy polyethylene glycol)-conjugated lipid.

[0485] Exemplary PEG-lipid conjugates include, but are not limited to, PEG-diacylglycerol (DAG) (such as 1-(monomethoxy-polyethyleneglycol)-2,3-dimyristoylglycerol (PEG-DMG)), PEG-dialkyloxypropyl (DAA), PEG-phospholipid, PEG-ceramide (Cer), a pegylated phosphatidylethanoloamine (PEG-PE), 1,2-dimyristoyl-sn-glycerol, methoxypoly ethylene glycol (DMG-PEG-2K), PEG succinate diacylglycerol (PEGS-DAG) (such as 4-0-(2′,3′-di(tetradecanoyloxy)propyl-1-0-(w-methoxy(polyethoxy)ethyl)butanedioate (PEG-S-DMG)), PEG dialkoxypropylcarbam, N-(carbonyl-methoxypolyethylene glycol 2000)-1,2-distearoyl-sn-glycero-3-phosphoethanolamine sodium salt, or a mixture thereof. Additional exemplary PEG-lipid conjugates are described, for example, in U.S. Pat. Nos. 5,885,613, 6,287,591, US2003/0077829, US2003/0077829, US2005/0175682, US2008/0020058, US2011/0117125, US2010/0130588, US2016/0376224, US2017/0119904, and US/099823, the contents of all of which are incorporated herein by reference in their entirety. In some embodiments, a PEG-lipid is a compound of Formula III, III-a-I, III-a-2, III-b-1, III-b-2, or V of US2018/0028664, the content of which is incorporated herein by reference in its entirety. In some embodiments, a PEG-lipid is of Formula II of US20150376115 or US2016/0376224, the content of both of which is incorporated herein by reference in its entirety. In some embodiments, the PEG-DAA conjugate can be, for example, PEG-dilauryloxypropyl, PEG-dimyristyloxypropyl, PEG-dipalmityloxypropyl, or PEG-distearyloxypropyl. The PEG-lipid can be one or more of PEG-DMG, PEG-dilaurylglycerol, PEG-dipalmitoylglycerol, PEG-disterylglycerol, PEG-dilaurylglycamide, PEG-dimyristylglycamide, PEG-dipalmitoylglycamide, PEG-disterylglycamide, PEG-cholesterol (1-[8′-(Cholest-5-en-3 [beta]-oxy) carboxamido-3′,6′-dioxaoctanyl] carbamoyl-[omega]-methyl-poly(ethylene glycol), PEG-DMB (3,4-Ditetradecoxylbenzyl-[omega]-methyl-poly(ethylene glycol) ether), and 1,2-dimyristoyl-sn-glycero-3-phosphoethanolamine-N-[methoxy (polyethylene glycol)-2000]. In some embodiments, the PEG-lipid comprises PEG-DMG, 1,2-dimyristoyl-sn-glycero-3-phosphoethanolamine-N-[methoxy (polyethylene glycol)-2000]. In some embodiments, the PEG-lipid comprises a structure selected from:

[chemical structure]

[0486] In some embodiments, lipids conjugated with a molecule other than a PEG can also be used in place of PEG-lipid. For example, polyoxazoline (POZ)-lipid conjugates, polyamide-lipid conjugates (such as ATTA-lipid conjugates), and cationic-polymer lipid (GPL) conjugates can be used in place of or in addition to the PEG-lipid.

[0487] Exemplary conjugated lipids, i.e., PEG-lipids, (POZ)-lipid conjugates, ATTA-lipid conjugates and cationic polymer-lipids are described in the PCT and LIS patent applications listed in Table 2 of WO2019051289A9 and in WO2020106946A1, the contents of all of which are incorporated herein by reference in their entirety.

[0488] In some embodiments an LNP comprises a compound of Formula (xix), a compound of Formula (xxi) and a compound of Formula (xxv). In some embodiments an LNP comprising a formulation of Formula (xix), Formula (xxi) and Formula (xxv) is used to deliver a gene modifying composition described herein to the lung or pulmonary cells.

[0489] In some embodiments, a lipid nanoparticle may comprise one or more cationic lipids selected from Formula (i), Formula (ii), Formula (iii), Formula (vii), and Formula (ix). In some embodiments, the LNP may further comprise one or more neutral lipid, e.g., DSPC, DPPC, DMPC, DOPC, POPC, DOPE, SM, a steroid, e.g., cholesterol, and/or one or more polymer conjugated lipid, e.g., a pegylated lipid, e.g., PEG-DAG, PEG-PE, PEG-S-DAG, PEG-cer or a PEG dialkyoxypropylcarbamate.

[0490] In some embodiments, the PEG or the conjugated lipid can comprise 0-20% (mol) of the total lipid present in the lipid nanoparticle. In some embodiments, PEG or the conjugated lipid content is 0.5-10% or 2-5% (mol) of the total lipid present in the lipid nanoparticle. Molar ratios of the ionizable lipid, non-cationic-lipid, sterol, and PEG/conjugated lipid can be varied as needed. For example, the lipid particle can comprise 30-70% ionizable lipid by mole or by total weight of the composition, 0-60% cholesterol by mole or by total weight of the composition, 0-30% non-cationic-lipid by mole or by total weight of the composition and 1-10% conjugated lipid by mole or by total weight of the composition. Preferably, the composition comprises 30-40% ionizable lipid by mole or by total weight of the composition, 40-50% cholesterol by mole or by total weight of the composition, and 10-20% non-cationic-lipid by mole or by total weight of the composition. In some other embodiments, the composition is 50-75% ionizable lipid by mole or by total weight of the composition, 20-40% cholesterol by mole or by total weight of the composition, and 5 to 10% non-cationic-lipid, by mole or by total weight of the composition and 1-10% conjugated lipid by mole or by total weight of the composition. The composition may contain 60-70% ionizable lipid by mole or by total weight of the composition, 25-35% cholesterol by mole or by total weight of the composition, and 5-10% non-cationic-lipid by mole or by total weight of the composition. The composition may also contain up to 90% ionizable lipid by mole or by total weight of the composition and 2 to 15% non-cationic lipid by mole or by total weight of the composition. The formulation may also be a lipid nanoparticle formulation, for example comprising 8-30% ionizable lipid by mole or by total weight of the composition, 5-30% non-cationic lipid by mole or by total weight of the composition, and 0-20% cholesterol by mole or by total weight of the composition; 4-25% ionizable lipid by mole or by total weight of the composition, 4-25% non-cationic lipid by mole or by total weight of the composition, 2 to 25% cholesterol by mole or by total weight of the composition, 10 to 35% conjugate lipid by mole or by total weight of the composition, and 5% cholesterol by mole or by total weight of the composition; or 2-30% ionizable lipid by mole or by total weight of the composition, 2-30% non-cationic lipid by mole or by total weight of the composition, 1 to 15% cholesterol by mole or by total weight of the composition, 2 to 35% conjugate lipid by mole or by total weight of the composition, and 1-20% cholesterol by mole or by total weight of the composition; or even up to 90% ionizable lipid by mole or by total weight of the composition and 2-10% non-cationic lipids by mole or by total weight of the composition, or even 100% cationic lipid by mole or by total weight of the composition. In some embodiments, the lipid particle formulation comprises ionizable lipid, phospholipid, cholesterol and a PEG-ylated lipid in a molar ratio of 50:10:38.5:1.5. In some other embodiments, the lipid particle formulation comprises ionizable lipid, cholesterol and a PEG-ylated lipid in a molar ratio of 60:38.5:1.5.

[0491] In some embodiments, the lipid particle comprises ionizable lipid, non-cationic lipid (e.g. phospholipid), a sterol (e.g., cholesterol) and a PEG-ylated lipid, where the molar ratio of lipids ranges from 20 to 70 mole percent for the ionizable lipid, with a target of 40-60, the mole percent of non-cationic lipid ranges from 0 to 30, with a target of 0 to 15, the mole percent of sterol ranges from 20 to 70, with a target of 30 to 50, and the mole percent of PEG-ylated lipid ranges from 1 to 6, with a target of 2 to 5.

[0492] In some embodiments, the lipid particle comprises ionizable lipid/non-cationic-lipid/sterol/conjugated lipid at a molar ratio of 50:10:38.5:1.5.

[0493] In an aspect, the disclosure provides a lipid nanoparticle formulation comprising phospholipids, lecithin, phosphatidylcholine and phosphatidylethanolamine.

[0494] In some embodiments, one or more additional compounds can also be included. Those compounds can be administered separately or the additional compounds can be included in the lipid nanoparticles of the invention. In other words, the lipid nanoparticles can contain other compounds in addition to the nucleic acid or at least a second nucleic acid, different than the first. Without limitations, other additional compounds can be selected from the group consisting of small or large organic or inorganic molecules, monosaccharides, disaccharides, trisaccharides, oligosaccharides, polysaccharides, peptides, proteins, peptide analogs and derivatives thereof, peptidomimetics, nucleic acids, nucleic acid analogs and derivatives, an extract made from biological materials, or any combinations thereof.

[0495] In some embodiments, a lipid nanoparticle (or a formulation comprising lipid nanoparticles) lacks reactive impurities (e.g., aldehydes or ketones), or comprises less than a preselected level of reactive impurities (e.g., aldehydes or ketones). While not wishing to be bound by theory, in some embodiments, a lipid reagent is used to make a lipid nanoparticle formulation, and the lipid reagent may comprise a contaminating reactive impurity (e.g., an aldehyde or ketone). A lipid regent may be selected for manufacturing based on having less than a preselected level of reactive impurities (e.g., aldehydes or ketones). Without wishing to be bound by theory, in some embodiments, aldehydes can cause modification and damage of RNA, e.g., cross-linking between bases and/or covalently conjugating lipid to RNA (e.g., forming lipid-RNA adducts). This may, in some instances, lead to failure of a reverse transcriptase reaction and/or incorporation of inappropriate bases, e.g., at the site(s) of lesion(s), e.g., a mutation in a newly synthesized target DNA.

[0496] In some embodiments, a lipid nanoparticle formulation is produced using a lipid reagent comprising less than 5%, 4%, 3%, 2%, 1%, 0.9%, 0.8%, 0.7%, 0.6%, 0.5%, 0.4%, 0.3%, 0.2%, or 0.1% total reactive impurity (e.g., aldehyde) content. In some embodiments, a lipid nanoparticle formulation is produced using a lipid reagent comprising less than 5%, 4%, 3%, 2%, 1%, 0.9%, 0.8%, 0.7%, 0.6%, 0.5%, 0.4%, 0.3%, 0.2%, or 0.1% of any single reactive impurity (e.g., aldehyde) species. In some embodiments, a lipid nanoparticle formulation is produced using a lipid reagent comprising: (i) less than 5%, 4%, 3%, 2%, 1%, 0.9%, 0.8%, 0.7%, 0.6%, 0.5%, 0.4%, 0.3%, 0.2%, or 0.1% total reactive impurity (e.g., aldehyde) content; and (ii) less than 5%, 4%, 3%, 2%, 1%, 0.9%, 0.8%, 0.7%, 0.6%, 0.5%, 0.4%, 0.3%, 0.2%, or 0.1% of any single reactive impurity (e.g., aldehyde) species. In some embodiments, the lipid nanoparticle formulation is produced using a plurality of lipid reagents, and each lipid reagent of the plurality independently meets one or more criterion described in this paragraph. In some embodiments, each lipid reagent of the plurality meets the same criterion, e.g., a criterion of this paragraph.

[0497] In some embodiments, the lipid nanoparticle formulation comprises less than 5%, 4%, 3%, 2%, 1%, 0.9%, 0.8%, 0.7%, 0.6%, 0.5%, 0.4%, 0.3%, 0.2%, or 0.1% total reactive impurity (e.g., aldehyde) content. In some embodiments, the lipid nanoparticle formulation comprises less than 5%, 4%, 3%, 2%, 1%, 0.9%, 0.8%, 0.7%, 0.6%, 0.5%, 0.4%, 0.3%, 0.2%, or 0.1% of any single reactive impurity (e.g., aldehyde) species. In some embodiments, the lipid nanoparticle formulation comprises: (i) less than 5%, 4%, 3%, 2%, 1%, 0.9%, 0.8%, 0.7%, 0.6%, 0.5%, 0.4%, 0.3%, 0.2%, or 0.1% total reactive impurity (e.g., aldehyde) content; and (ii) less than 5%, 4%, 3%, 2%, 1%, 0.9%, 0.8%, 0.7%, 0.6%, 0.5%, 0.4%, 0.3%, 0.2%, or 0.1% of any single reactive impurity (e.g., aldehyde) species.

[0498] In some embodiments, one or more, or optionally all, of the lipid reagents used for a lipid nanoparticle as described herein or a formulation thereof comprise less than 5%, 4%, 3%, 2%, 1%, 0.9%, 0.8%, 0.7%, 0.6%, 0.5%, 0.4%, 0.3%, 0.2%, or 0.1% total reactive impurity (e.g., aldehyde) content. In some embodiments, one or more, or optionally all, of the lipid reagents used for a lipid nanoparticle as described herein or a formulation thereof comprise less than 5%, 4%, 3%, 2%, 1%, 0.9%, 0.8%, 0.7%, 0.6%, 0.5%, 0.4%, 0.3%, 0.2%, or 0.1% of any single reactive impurity (e.g., aldehyde) species. In some embodiments, one or more, or optionally all, of the lipid reagents used for a lipid nanoparticle as described herein or a formulation thereof comprise: (i) less than 5%, 4%, 3%, 2%, 1%, 0.9%, 0.8%, 0.7%, 0.6%, 0.5%, 0.4%, 0.3%, 0.2%, or 0.1% total reactive impurity (e.g., aldehyde) content; and (ii) less than 5%, 4%, 3%, 2%, 1%, 0.9%, 0.8%, 0.7%, 0.6%, 0.5%, 0.4%, 0.3%, 0.2%, or 0.1% of any single reactive impurity (e.g., aldehyde) species.

[0499] In some embodiments, total aldehyde content and/or quantity of any single reactive impurity (e.g., aldehyde) species is determined by liquid chromatography (LC), e.g., coupled with tandem mass spectrometry (MS/MS), e.g., according to the method described in Example 40 of PCT/US21/20948. In some embodiments, reactive impurity (e.g., aldehyde) content and/or quantity of reactive impurity (e.g., aldehyde) species is determined by detecting one or more chemical modifications of a nucleic acid molecule (e.g., an RNA molecule, e.g., as described herein) associated with the presence of reactive impurities (e.g., aldehydes), e.g., in the lipid reagents. In some embodiments, reactive impurity (e.g., aldehyde) content and/or quantity of reactive impurity (e.g., aldehyde) species is determined by detecting one or more chemical modifications of a nucleotide or nucleoside (e.g., a ribonucleotide or ribonucleoside, e.g., comprised in or isolated from a template nucleic acid, e.g., as described herein) associated with the presence of reactive impurities (e.g., aldehydes), e.g., in the lipid reagents, e.g., according to the method described in Example 41 of PCT/US21/20948. In embodiments, chemical modifications of a nucleic acid molecule, nucleotide, or nucleoside are detected by determining the presence of one or more modified nucleotides or nucleosides, e.g., using LC-MS/MS analysis, e.g., according to the method described in Example 41 of PCT/US21/20948.

[0500] In some embodiments, a nucleic acid (e.g., RNA) described herein (e.g., a template nucleic acid or a nucleic acid encoding a gene modifying polypeptide) does not comprise an aldehyde modification, or comprises less than a preselected amount of aldehyde modifications. In some embodiments, on average, a nucleic acid has less than 50, 20, 10, 5, 2, or 1 aldehyde modifications per 1000 nucleotides, e.g., wherein a single cross-linking of two nucleotides is a single aldehyde modification. In some embodiments, the aldehyde modification is an RNA adduct (e.g., a lipid-RNA adduct). In some embodiments, the aldehyde-modified nucleotide is cross-linking between bases. In some embodiments, a nucleic acid (e.g., RNA) described herein comprises less than 50, 20, 10, 5, 2, or 1 cross-links between nucleotide.

[0501] In some embodiments, LNPs are directed to specific tissues by the addition of targeting domains. For example, biological ligands may be displayed on the surface of LNPs to enhance interaction with cells displaying cognate receptors, thus driving association with and cargo delivery to tissues wherein cells express the receptor. In some embodiments, the biological ligand may be a ligand that drives delivery to the liver, e.g., LNPs that display GalNAc result in delivery of nucleic acid cargo to hepatocytes that display asialoglycoprotein receptor (ASGPR). The work of Akinc et al. Mol Ther 18 (7): 1357-1364 (2010) teaches the conjugation of a trivalent GalNAc ligand to a PEG-lipid (GalNAc-PEG-DSG) to yield LNPs dependent on ASGPR for observable LNP cargo effect (see, e.g., FIG. 6 therein). Other ligand-displaying LNP formulations, e.g., incorporating folate, transferrin, or antibodies, are discussed in WO2017223135, which is incorporated herein by reference in its entirety, in addition to the references used therein, namely Kolhatkar et al., Curr Drug Discov Technol. 2011 8:197-206; Musacchio and Torchilin, Front Biosci. 2011 16:1388-1412; Yu et al., Mol Membr Biol. 2010 27:286-298; Patil et al., Crit Rev Ther Drug Carrier Syst. 2008 25:1-61; Benoit et al., Biomacromolecules. 2011 12:2708-2714; Zhao et al., Expert Opin Drug Deliv. 2008 5:309-319; Akinc et al., Mol Ther. 2010 18:1357-1364; Srinivasan et al., Methods Mol Biol. 2012 820:105-116; Ben-Arie et al., Methods Mol Biol. 2012 757:497-507; Peer 2010 J Control Release. 20:63-68; Peer et al., Proc Natl Acad Sci USA. 2007 104:4095-4100; Kim et al., Methods Mol Biol. 2011 721:339-353; Subramanya et al., Mol Ther. 2010 18:2028-2037; Song et al., Nat Biotechnol. 2005 23:709-717; Peer et al., Science. 2008 319:627-630; and Peer and Lieberman, Gene Ther. 2011 18:1127-1133.

[0502] In some embodiments, LNPs are selected for tissue-specific activity by the addition of a Selective ORgan Targeting (SORT) molecule to a formulation comprising traditional components, such as ionizable cationic lipids, amphipathic phospholipids, cholesterol and poly(ethylene glycol) (PEG) lipids. The teachings of Cheng et al. Nat Nanotechnol 15 (4): 313-320 (2020) demonstrate that the addition of a supplemental “SORT” component precisely alters the in vivo RNA delivery profile and mediates tissue-specific (e.g., lungs, liver, spleen) gene delivery and editing as a function of the percentage and biophysical property of the SORT molecule.

[0503] In some embodiments, the LNPs comprise biodegradable, ionizable lipids. In some embodiments, the LNPs comprise (9Z,12Z)-3-((4,4-bis(octyloxy)butanoyl)oxy)-2-((((3-(diethylamino)propoxy)carbonyl)oxy)methyl)propyl octadeca-9,12-dienoate, also called 3-((4,4-bis(octyloxy)butanoyl)oxy)-2-((((3-(diethylamino)propoxy)carbonyl)oxy)methyl)propyl (9Z,12Z)-octadeca-9,12-dienoate) or another ionizable lipid. See, e.g, lipids of WO2019/067992, WO/2017/173054, WO2015/095340, and WO2014/136086, as well as references provided therein. In some embodiments, the term cationic and ionizable in the context of LNP lipids is interchangeable, e.g., wherein ionizable lipids are cationic depending on the pH.

[0504] In some embodiments, an LNP described herein comprises a lipid described in Table 19

TABLE 19
Exemplary lipids

| | | Molecu- | |
|---|---|---|---|
| | | lar | |
| LIPID ID | Chemical Name | Weight | Structure |
| LIPIDV003 | (9Z,12Z)-3-((4,4- bis(octyloxy)butanoyl)oxy)-2-((((3- (diethylamino)propoxy)carbo- nyl)oxy)methyl)propyl octadeca-9,12-dienoate | 852.29 | [chemical structure] |
| LIPIDV004 | Heptadecan-9-yl-8-((2-hydroxy- ethyl)(8-(nonyloxy)-8- oxooctyl)amino)octanoate | 710.18 | [chemical structure] |
| LIPIDV005 | | 919.56 | [chemical structure] |

[0505] In some embodiments, multiple components of a gene modifying system may be prepared as a single LNP formulation, e.g., an LNP formulation comprises mRNA encoding for the gene modifying polypeptide and an RNA template. Ratios of nucleic acid components may be varied in order to maximize the properties of a therapeutic. In some embodiments, the ratio of RNA template to mRNA encoding a gene modifying polypeptide is about 1:1 to 100:1, e.g., about 1:1 to 20:1, about 20:1 to 40:1, about 40:1 to 60:1, about 60:1 to 80:1, or about 80:1 to 100:1, by molar ratio. In other embodiments, a system of multiple nucleic acids may be prepared by separate formulations, e.g., one LNP formulation comprising a template RNA and a second LNP formulation comprising an mRNA encoding a gene modifying polypeptide. In some embodiments, the system may comprise more than two nucleic acid components formulated into LNPs. In some embodiments, the system may comprise a protein, e.g., a gene modifying polypeptide, and a template RNA formulated into at least one LNP formulation.

[0506] In some embodiments, the average LNP diameter of the LNP formulation may be between 10s of nm and 100s of nm, e.g., measured by dynamic light scattering (DLS). In some embodiments, the average LNP diameter of the LNP formulation may be from about 40 nm to about 150 nm, such as about 40 nm, 45 nm, 50 nm, 55 nm, 60 nm, 65 nm, 70 nm, 75 nm, 80 nm, 85 nm, 90 nm, 95 nm, 100 nm, 105 nm, 110 nm, 115 nm, 120 nm, 125 nm, 130 nm, 135 nm, 140 nm, 145 nm, or 150 nm. In some embodiments, the average LNP diameter of the LNP formulation may be from about 50 nm to about 100 nm, from about 50 nm to about 90 nm, from about 50 nm to about 80 nm, from about 50 nm to about 70 nm, from about 50 nm to about 60 nm, from about 60 nm to about 100 nm, from about 60 nm to about 90 nm, from about 60 nm to about 80 nm, from about 60 nm to about 70 nm, from about 70 nm to about 100 nm, from about 70 nm to about 90 nm, from about 70 nm to about 80 nm, from about 80 nm to about 100 nm, from about 80 nm to about 90 nm, or from about 90 nm to about 100 nm. In some embodiments, the average LNP diameter of the LNP formulation may be from about 70 nm to about 100 nm. In a particular embodiment, the average LNP diameter of the LNP formulation may be about 80 nm. In some embodiments, the average LNP diameter of the LNP formulation may be about 100 nm. In some embodiments, the average LNP diameter of the LNP formulation ranges from about 1 mm to about 500 mm, from about 5 mm to about 200 mm, from about 10 mm to about 100 mm, from about 20 mm to about 80 mm, from about 25 mm to about 60 mm, from about 30 mm to about 55 mm, from about 35 mm to about 50 mm, or from about 38 mm to about 42 mm.

[0507] An LNP may, in some instances, be relatively homogenous. A polydispersity index may be used to indicate the homogeneity of an LNP, e.g., the particle size distribution of the lipid nanoparticles. A small (e.g., less than 0.3) polydispersity index generally indicates a narrow particle size distribution. An LNP may have a polydispersity index from about 0 to about 0.25, such as 0.01, 0.02, 0.03, 0.04, 0.05, 0.06, 0.07, 0.08, 0.09, 0.10, 0.11, 0.12, 0.13, 0.14, 0.15, 0.16, 0.17, 0.18, 0.19, 0.20, 0.21, 0.22, 0.23, 0.24, or 0.25. In some embodiments, the polydispersity index of an LNP may be from about 0.10 to about 0.20.

[0508] The zeta potential of an LNP may be used to indicate the electrokinetic potential of the composition. In some embodiments, the zeta potential may describe the surface charge of an LNP. Lipid nanoparticles with relatively low charges, positive or negative, are generally desirable, as more highly charged species may interact undesirably with cells, tissues, and other elements in the body. In some embodiments, the zeta potential of an LNP may be from about −10 mV to about +20 mV, from about −10 mV to about +15 mV, from about −10 mV to about +10 mV, from about −10 mV to about +5 mV, from about −10 mV to about 0 mV, from about −10 mV to about −5 mV, from about −5 mV to about +20 mV, from about −5 mV to about +15 mV, from about −5 mV to about +10 mV, from about −5 mV to about +5 mV, from about −5 mV to about 0 mV, from about 0 mV to about +20 mV, from about 0 mV to about +15 mV, from about 0 mV to about +10 mV, from about 0 mV to about +5 mV, from about +5 mV to about +20 mV, from about +5 mV to about +15 mV, or from about +5 mV to about +10 mV.

[0509] The efficiency of encapsulation of a protein and/or nucleic acid, e.g., gene modifying polypeptide or mRNA encoding the polypeptide, describes the amount of protein and/or nucleic acid that is encapsulated or otherwise associated with an LNP after preparation, relative to the initial amount provided. The encapsulation efficiency is desirably high (e.g., close to 100%). The encapsulation efficiency may be measured, for example, by comparing the amount of protein or nucleic acid in a solution containing the lipid nanoparticle before and after breaking up the lipid nanoparticle with one or more organic solvents or detergents. An anion exchange resin may be used to measure the amount of free protein or nucleic acid (e.g., RNA) in a solution. Fluorescence may be used to measure the amount of free protein and/or nucleic acid (e.g., RNA) in a solution. For the lipid nanoparticles described herein, the encapsulation efficiency of a protein and/or nucleic acid may be at least 50%, for example 50%, 55%, 60%, 65%, 70%, 75%, 80%, 85%, 90%, 91%, 92%, 93%, 94%, 95%, 96%, 97%, 98%, 99%, or 100%. In some embodiments, the encapsulation efficiency may be at least 80%. In some embodiments, the encapsulation efficiency may be at least 90%. In some embodiments, the encapsulation efficiency may be at least 95%.

[0510] An LNP may optionally comprise one or more coatings. In some embodiments, an LNP may be formulated in a capsule, film, or table having a coating. A capsule, film, or tablet including a composition described herein may have any useful size, tensile strength, hardness or density.

[0511] Additional exemplary lipids, formulations, methods, and characterization of LNPs are taught by WO2020061457, which is incorporated herein by reference in its entirety.

[0512] In some embodiments, in vitro or ex vivo cell lipofections are performed using Lipofectamine MessengerMax (Thermo Fisher) or TransIT-mRNA Transfection Reagent (Mirus Bio). In certain embodiments, LNPs are formulated using the Gen Voy_ILM ionizable lipid mix (Precision NanoSystems). In certain embodiments, LNPs are formulated using 2,2-dilinoleyl-4-dimethylaminoethyl-[1,3]-dioxolane (DLin-KC2-DMA) or dilinoleylmethyl-4-dimethylaminobutyrate (DLin-MC3-DMA or MC3), the formulation and in vivo use of which are taught in Jayaraman et al. Angew Chem Int Ed Engl 51 (34): 8529-8533 (2012), incorporated herein by reference in its entirety.

[0513] LNP formulations optimized for the delivery of CRISPR-Cas systems, e.g., Cas9-gRNA RNP, gRNA, Cas9 mRNA, are described in WO2019067992 and WO2019067910, both incorporated by reference.

[0514] Additional specific LNP formulations useful for delivery of nucleic acids are described in U.S. Pat. Nos. 8,158,601 and 8,168,775, both incorporated by reference, which include formulations used in patisiran, sold under the name ONPATTRO.

[0515] Exemplary dosing of gene modifying LNP may include about 0.1, 0.25, 0.3, 0.5, 1, 2, 3, 4, 5, 6, 8, 10, or 100 mg/kg (RNA). Exemplary dosing of AAV comprising a nucleic acid encoding one or more components of the system may include an MOI of about 10¹¹, 10¹², 10¹³, and 10¹⁴ vg/kg.

### Kits, Articles of Manufacture, and Pharmaceutical Compositions

[0516] In an aspect the disclosure provides a kit comprising a gene modifying polypeptide or a gene modifying system, e.g., as described herein. In some embodiments, the kit comprises a gene modifying polypeptide (or a nucleic acid encoding the polypeptide) and a template RNA (or DNA encoding the template RNA). In some embodiments, the kit further comprises a reagent for introducing the system into a cell, e.g., transfection reagent, LNP, and the like. In some embodiments, the kit is suitable for any of the methods described herein. In some embodiments, the kit comprises one or more elements, compositions (e.g., pharmaceutical compositions), gene modifying polypeptides, and/or gene modifying systems, or a functional fragment or component thereof, e.g., disposed in an article of manufacture. In some embodiments, the kit comprises instructions for use thereof.

[0517] In an aspect, the disclosure provides an article of manufacture, e.g., in which a kit as described herein, or a component thereof, is disposed.

[0518] In an aspect, the disclosure provides a pharmaceutical composition comprising a gene modifying polypeptide or a gene modifying system, e.g., as described herein. In some embodiments, the pharmaceutical composition further comprises a pharmaceutically acceptable carrier or excipient. In some embodiments, the pharmaceutical composition comprises a template RNA and/or an RNA encoding the polypeptide. In embodiments, the pharmaceutical composition has one or more (e.g., 1, 2, 3, or 4) of the following characteristics:
[0519] (a) less than 1% (e.g., less than 0.5%, 0.4%, 0.3%, 0.2%, or 0.1%) DNA template relative to the template RNA and/or the RNA encoding the polypeptide, e.g., on a molar basis;
[0520] (b) less than 1% (e.g., less than 0.5%, 0.4%, 0.3%, 0.2%, or 0.1%) uncapped RNA relative to the template RNA and/or the RNA encoding the polypeptide, e.g., on a molar basis;
[0521] (c) less than 1% (e.g., less than 0.5%, 0.4%, 0.3%, 0.2%, or 0.1%) partial length RNAs relative to the template RNA and/or the RNA encoding the polypeptide, e.g., on a molar basis;
[0522] (d) substantially lacks unreacted cap dinucleotides.

### Chemistry, Manufacturing, and Controls (CMC)

[0523] Purification of protein therapeutics is described, for example, in Franks, Protein Biotechnology: Isolation, Characterization, and Stabilization, Humana Press (2013); and in Cutler, Protein Purification Protocols (Methods in Molecular Biology), Humana Press (2010).

[0524] In some embodiments, a gene modifying system, polypeptide, and/or template nucleic acid (e.g., template RNA) conforms to certain quality standards. In some embodiments, a gene modifying system, polypeptide, and/or template nucleic acid (e.g., template RNA) produced by a method described herein conforms to certain quality standards. Accordingly, the disclosure is directed, in some aspects, to methods of manufacturing a gene modifying system, polypeptide, and/or template nucleic acid (e.g., template RNA) that conforms to certain quality standards, e.g., in which said quality standards are assayed. The disclosure is also directed, in some aspects, to methods of assaying said quality standards in a gene modifying system, polypeptide, and/or template nucleic acid (e.g., template RNA). In some embodiments, quality standards include, but are not limited to, one or more (e.g., 1, 2, 3, 4, 5, 6, 7, 8, 9, 10, 11, or 12) of the following:
[0525] (i) the length of the template RNA, e.g., whether the template RNA has a length that is above a reference length or within a reference length range, e.g., whether at least 80%, 85%, 90%, 95%, 96%, 97%, 98%, or 99% of the template RNA present is greater than 100, 125, 150, 175, or 200 nucleotides long;
[0526] (ii) the presence, absence, and/or length of a polyA tail on the template RNA, e.g., whether at least 80%, 85%, 90%, 95%, 96%, 97%, 98%, or 99% of the template RNA present contains a polyA tail (e.g., a polyA tail that is at least 5, 10, 20, 30, 50, 70, 100 nucleotides in length);
[0527] (iii) the presence, absence, and/or type of a 5′ cap on the template RNA, e.g., whether at least 80%, 85%, 90%, 95%, 96%, 97%, 98%, or 99% of the template RNA present contains a 5′ cap, e.g., whether that cap is a 7-methylguanosine cap, e.g., a O-Me-m7G cap;
[0528] (iv) the presence, absence, and/or type of one or more modified nucleotides (e.g., selected from pseudouridine, dihydrouridine, inosine, 7-methylguanosine, 1-N-methylpseudouridine (1-Me-Y′), 5-methoxyuridine (5-MO-U), 5-methylcytidine (5mC), or a locked nucleotide) in the template RNA, e.g., whether at least 80%, 85%, 90%, 95%, 96%, 97%, 98%, or 99% of the template RNA present contains one or more modified nucleotides;
[0529] (v) the stability of the template RNA (e.g., over time and/or under a pre-selected condition), e.g., whether at least 80%, 85%, 90%, 95%, 96%, 97%, 98%, or 99% of the template RNA remains intact (e.g., greater than 100, 125, 150, 175, or 200 nucleotides long) after a stability test;
[0530] (vi) the potency of the template RNA in a system for modifying DNA, e.g., whether at least 1% of target sites are modified after a system comprising the template RNA is assayed for potency;
[0531] (vii) the length of the polypeptide, first polypeptide, or second polypeptide, e.g., whether the polypeptide, first polypeptide, or second polypeptide has a length that is above a reference length or within a reference length range, e.g., whether at least 80%, 85%, 90%, 95%, 96%, 97%, 98%, or 99% of the polypeptide, first polypeptide, or second polypeptide present is greater than 600, 650, 700, 750, 800, 850, 900, 950, 1000, 1050, 1100, 1150, 1200, 1250, 1300, 1350, 1400, 1450, 1500, 1600, 1700, 1800, 1900, or 2000 amino acids long (and optionally, no larger than 2500, 2000, 1500, 1400, 1300, 1200, 1100, 1000, 900, 800, 700, or 600 amino acids long);
[0532] (viii) the presence, absence, and/or type of post-translational modification on the polypeptide, first polypeptide, or second polypeptide, e.g., whether at least 80, 85, 90, 95, 96, 97, 98, or 99% of the polypeptide, first polypeptide, or second polypeptide contains phosphorylation, methylation, acetylation, myristoylation, palmitoylation, isoprenylation, glipyatyon, or lipoylation, or any combination thereof;
[0533] (ix) the presence, absence, and/or type of one or more artificial, synthetic, or non-canonical amino acids (e.g., selected from ornithine, β-alanine, GABA, 8-Aminolevulinic acid, PABA, a D-amino acid (e.g., D-alanine or D-glutamate), aminoisobutyric acid, dehydroalanine, cystathionine, lanthionine, Djenkolic acid, Diaminopimelic acid, Homoalanine, Norvaline, Norleucine, Homonorleucine, homoserine, O-methyl-homoserine and O-ethyl-homoserine, ethionine, selenocysteine, selenohomocysteine, selenomethionine, selenoethionine, tellurocysteine, or telluromethionine) in the polypeptide, first polypeptide, or second polypeptide, e.g., whether at least 80%, 85%, 90%, 95%, 96%, 97%, 98%, or 99% of the polypeptide, first polypeptide, or second polypeptide present contains one or more artificial, synthetic, or non-canonical amino acids;
[0534] (x) the stability of the polypeptide, first polypeptide, or second polypeptide (e.g., over time and/or under a pre-selected condition), e.g., whether at least 80%, 85%, 90%, 95%, 96%, 97%, 98%, or 99% of the polypeptide, first polypeptide, or second polypeptide remains intact (e.g., greater than 600, 650, 700, 750, 800, 850, 900, 950, 1000, 1050, 1100, 1150, 1200, 1250, 1300, 1350, 1400, 1450, 1500, 1600, 1700, 1800, 1900, or 2000 amino acids long (and optionally, no larger than 2500, 2000, 1500, 1400, 1300, 1200, 1100, 1000, 900, 800, 700, or 600 amino acids long)) after a stability test;
[0535] (xi) the potency of the polypeptide, first polypeptide, or second polypeptide in a system for modifying DNA, e.g., whether at least 1% of target sites are modified after a system comprising the polypeptide, first polypeptide, or second polypeptide is assayed for potency; or
[0536] (xii) the presence, absence, and/or level of one or more of a pyrogen, virus, fungus, bacterial pathogen, or host cell protein, e.g., whether the system is free or substantially free of pyrogen, virus, fungus, bacterial pathogen, or host cell protein contamination.

[0537] In some embodiments, a system or pharmaceutical composition described herein is endotoxin free.

[0538] In some embodiments, the presence, absence, and/or level of one or more of a pyrogen, virus, fungus, bacterial pathogen, and/or host cell protein is determined. In embodiments, whether the system is free or substantially free of pyrogen, virus, fungus, bacterial pathogen, and/or host cell protein contamination is determined.

[0539] In some embodiments, a pharmaceutical composition or system as described herein has one or more (e.g., 1, 2, 3, or 4) of the following characteristics:
[0540] (a) less than 1% (e.g., less than 0.5%, 0.4%, 0.3%, 0.2%, or 0.1%) DNA template relative to the template RNA and/or the RNA encoding the polypeptide, e.g., on a molar basis;
[0541] (b) less than 1% (e.g., less than 0.5%, 0.4%, 0.3%, 0.2%, or 0.1%) uncapped RNA relative to the template RNA and/or the RNA encoding the polypeptide, e.g., on a molar basis;
[0542] (c) less than 1% (e.g., less than 0.5%, 0.4%, 0.3%, 0.2%, or 0.1%) partial length RNAs relative to the template RNA and/or the RNA encoding the polypeptide, e.g., on a molar basis;
[0543] (d) substantially lacks unreacted cap dinucleotides.

### EXAMPLES

[0544] The invention is further illustrated by the following examples. The examples are provided for illustrative purposes only and are not to be construed as limiting the scope or content of the invention in any way.

### Example 1: Gene Modifying Systems Comprising Cas-Pol Fusions with Various Pol Domains to Enable Precise Editing in Human Cells

[0545] This example describes the ability of Cas-Pol fusions to programmably install mutations in genomic DNA in human cells. More specifically, the polymerase domain of Cas-Pol fusions, e.g., a polymerase domain described in this application, e.g., the human DNA Pole, is varied to determine the genome editing capacity of Cas-Pol fusions employing novel polymerase combinations. Template nucleic acids are co-delivered with Cas-Pol expression plasmids in human cells to determine the target editing activity of Cas-Pol fusions.

[0546] In order to generate domain libraries for genome engineering polypeptides, Cas effector proteins are selected; see in Table 3 and Table 4. Additional Cas9 domains are further selected for use in the genome engineering polypeptides described herein, as features including PAM requirements of a target sequence, predicted mutations for conferring nickase activity (e.g., D10A, H840A, or N863A for SpCas9), and gRNA features including single-guide composition, e.g., specific spacer parameters and gRNA scaffold sequence for conferring polypeptide binding for the cognate Cas enzyme, are able to be determined (Table 8). Linker sequences to connect Cas and Pol domains are collected based on a search for diversity of length, flexibility, and composition in order to optimize fusion proteins (Table 6). Polymerase domains are mined from a variety of sources using literature and polymerase protein domain signatures as described in this application, including wild-type polymerases capable of RNA and/or DNA-dependent DNA polymerization activity, derived polymerases with improved properties (e.g., thermostability, processivity, fidelity), derived polymerases with inactivated or reactivated functional domains (e.g., inactivated or reactivated domains conferring 5′-3′ or 3′-5′ exonuclease activity, proofreading activity, helicase activity, or RNase activity), and polymerases with synthetically evolved RNA-dependent and/or DNA-dependent DNA polymerase activity (e.g., the RTX polymerase derived from PolB of Thermococcus kodakarensis (KOD), as described in Ellefson et al Science 352 (6293): 1590-1593 (2016), incorporated herein by reference in its entirety).

[0547] Specifically, to assess the use of novel Pol domains in the context of a gene modifying polypeptide to successfully edit the genome, a subset of exemplary Pol domains are selected for fusion to a Cas9 (N863A) nickase. Briefly, the protein sequences of monomeric human polymerases are determined using UniProt (The UniProt Consortium Nucleic Acids Res 49 (D1): D480-D489 (2021)) and functional domains further predicted and annotated using InterPro (Blum et al Nucleic Acids Res 49 (D1): D344-D354 (2021)) and InterProScan (Jones et al Bioinformatics 30 (9): 1236-1240 (2014)) (Table X therein). Though not wishing to be limited by such example, proteins from the polymerase families Y, X, and A have been described that comprise a single subunit (see, e.g., Hoitsma et al Cell Mol Life Sci 77 (1): 35-59 (2020), incorporated herein by reference in its entirety).

[0548] To generate precise edits using genome engineering system Cas-Pol fusions, Template nucleic acids are constructed to template polymerization of an edit into the genomic target site by the Pol domain. Template nucleic acids are designed to comprise (i) a gRNA spacer sequence for guiding the Cas-Pol to the target region, e.g., a sequence complementary to a 20-nucleotide sequence in the HEK3 locus; (ii) a primer-binding sequence (PBS) capable of complementary base pairing with a single strand of the nicked DNA for target-primed polymerization; (iii) a heterologous object sequence providing a template for polymerization that further comprises the intended final target sequence; and (iv) a gRNA scaffold sequence to associate with the Cas9 domain of the Cas9-Pol polypeptide fusion. The constructs employed here specifically follow the 5′ to 3′ orientation (i), (iv), (iii), (ii). In some embodiments, (iii) may comprise RNA and/or DNA nucleotides. In some embodiments, (ii) may comprise RNA and/or DNA nucleotides. Without wishing to be limited by example, (i) and (iv) comprise RNA nucleotides in these experiments. Template compositions are described in Table 21 (Templates P1, P2, P3), where (ii) and (iii) may each be included as either RNA or DNA nucleotides. Template molecules optionally further comprise a 5′ cap and 3′ polyA tail.

TABLE 20
Template nucleic acids and second-nick gRNA used in Example 1

| | | | SEQ | | SEQ | Pol | SEQ | | SEQ | Full | SEQ |
|---|---|---|---|---|---|---|---|---|---|---|---|
| | | Spacer | ID | Scaffold | ID | template | ID | PBS | ID | Template | ID |
| Name | Description | (i) | NO: | (iv) | NO: | (iii) | NO: | (ii) | NO: | Molecule | NO: |
| Template | HEK3_8PBS_ | GGCCCAGA | 4623 | GTTTTAGAGC | 4595 | TCTGCCAT | 4627 | CGTGCTC | | GGCCCAGAC | 4632 |
| P1 | 10RT | CTGAGCAC | | TAGAAATAGC | | CAAAG | | A | | TGAGCACGT | |
| | (CTTat1) | GTGA | | AAGTTAAAAT | | | | | | GAGTTTTAG | |
| | | | | AAGGCTAGTC | | | | | | AGCTAGAAA | |
| | | | | CGTTATCAAC | | | | | | TAGCAAGTT | |
| | | | | TTGAAAAAGT | | | | | | AAAATAAGG | |
| | | | | GGCACCGAGT | | | | | | CTAGTCCGT | |
| | | | | CGGTGC | | | | | | TATCAACTT | |
| | | | | | | | | | | GAAAAAGTG | |
| | | | | | | | | | | GCACCGAGT | |
| | | | | | | | | | | CGGTGCTCT | |
| | | | | | | | | | | GCCATCAAA | |
| | | | | | | | | | | GCGTGCTCA | |
| Template | HEK3_13PBS_ | GGCCCAGA | 4623 | GTTTTAGAGC | 4595 | TCTGCCAT | 4627 | CGTGCTC | 4629 | GGCCCAGAC | 4633 |
| P2 | 10RT | CTGAGCAC | | TAGAAATAGC | | CAAAG | | AGTCTG | | TGAGCACGT | |
| | (CTTat1) | GTGA | | AAGTTAAAAT | | | | | | GAGTTTTAG | |
| | | | | AAGGCTAGTC | | | | | | AGCTAGAAA | |
| | | | | CGTTATCAAC | | | | | | TAGCAAGTT | |
| | | | | TTGAAAAAGT | | | | | | AAAATAAGG | |
| | | | | GGCACCGAGT | | | | | | CTAGTCCGT | |
| | | | | CGGTGC | | | | | | TATCAACTT | |
| | | | | | | | | | | GAAAAAGTG | |
| | | | | | | | | | | GCACCGAGT | |
| | | | | | | | | | | CGGTGCTCT | |
| | | | | | | | | | | GCCATCAAA | |
| | | | | | | | | | | GCGTGCTCA | |
| | | | | | | | | | | GTCTG | |
| Template | HEK3_17PBS_ | GGCCCAGA | 4623 | GTTTTAGAGC | 4595 | TCTGCCAT | 4627 | CGTGCTC | 4630 | GGCCCAGAC | 4634 |
| P3 | 10RT | CTGAGCAC | | TAGAAATAGC | | CAAAG | | AGTCTGG | | TGAGCACGT | |
| | (CTTat1) | GTGA | | AAGTTAAAAT | | | | GCC | | GAGTTTTAG | |
| | | | | AAGGCTAGTC | | | | | | AGCTAGAAA | |
| | | | | CGTTATCAAC | | | | | | TAGCAAGTT | |
| | | | | TTGAAAAAGT | | | | | | AAAATAAGG | |
| | | | | GGCACCGAGT | | | | | | CTAGTCCGT | |
| | | | | CGGTGC | | | | | | TATCAACTT | |
| | | | | | | | | | | GAAAAAGTG | |
| | | | | | | | | | | GCACCGAGT | |
| | | | | | | | | | | CGGTGCTCT | |
| | | | | | | | | | | GCCATCAAA | |
| | | | | | | | | | | GCGTGCTCA | |
| | | | | | | | | | | GTCTGGGCC | |
| Template | HBB_13PBS_ | GCATGGTG | 4624 | GTTTTAGAGC | 4595 | AGACTTCT | 4628 | GAGTCAG | 4631 | GCATGGTGC | 4635 |
| P4 | 10RT | CACCTGAC | | TAGAAATAGC | | CCACAG | | GTGCAC | | ACCTGACTC | |
| | (TtoAat4) | TCCTG | | AAGTTAAAAT | | | | | | CTGGTTTTA | |
| | | | | AAGGCTAGTC | | | | | | GAGCTAGAA | |
| | | | | CGTTATCAAC | | | | | | ATAGCAAGT | |
| | | | | TTGAAAAAGT | | | | | | TAAAATAAG | |
| | | | | GGCACCGAGT | | | | | | GCTAGTCCG | |
| | | | | CGGTGC | | | | | | TTATCAACTT | |
| | | | | | | | | | | GAAAAAGTG | |
| | | | | | | | | | | GCACCGAGT | |
| | | | | | | | | | | CGGTGCAGA | |
| | | | | | | | | | | CTTCTCCAC | |
| | | | | | | | | | | AGGAGTCAG | |
| | | | | | | | | | | GTGCAC | |
| 2gRNA | HEK3_+90 | GTCAACCA | 4625 | GTTTTAGAGC | 4595 | NA | | NA | | NA | |
| P5 | | GTATCCCG | | TAGAAATAGC | | | | | | | |
| | | GTGC | | AAGTTAAAAT | | | | | | | |
| | | | | AAGGCTAGTC | | | | | | | |
| | | | | CGTTATCAAC | | | | | | | |
| | | | | TTGAAAAAGT | | | | | | | |
| | | | | GGCACCGAGT | | | | | | | |
| | | | | CGGTGC | | | | | | | |
| 2gRNA | HBB_+72 | GCCTTGAT | 4626 | GTTTTAGAGC | 4595 | NA | | NA | | NA | |
| P6 | | ACCAACCT | | TAGAAATAGC | | | | | | | |
| | | GCCCA | | AAGTTAAAAT | | | | | | | |
| | | | | AAGGCTAGTC | | | | | | | |
| | | | | CGTTATCAAC | | | | | | | |
| | | | | TTGAAAAAGT | | | | | | | |
| | | | | GGCACCGAGT | | | | | | | |
| | | | | CGGTGC | | | | | | | |

[0549] U2OS or HEK293T cells are transfected by electroporation of 250,000 cells/well with ˜800 ng of Cas9-Pol fusion (e.g., pol theta fusion) expression plasmid, 200 ng of a chemically synthesized template nucleic acid molecule, and optionally 83 ng of an additional second-nick gRNA (2gRNA P5 for Templates P1, P2, P3 or 2gRNA P6 for Template P4) (Table 21). To assess the genome editing capacity of Cas-Pol fusions, genomic DNA (gDNA) is collected on day 3 post-transfection. The frequencies of intended (exact and scarless edit as designed) and unintended (any non-intended changes to the target sequence) edits at target loci (HEK3 for Templates P1, P2, P3 or HBB for Template P4) are analyzed by amplicon sequencing. As used herein, amplicon sequencing of a target site comprises the use of site-specific primers in PCR amplification of the target site, sequencing of amplicons on an Illumina MiSeq, and detection and characterization of editing events using the CRISPResso2 pipeline (Clement et al Nat Biotechnol 37 (3): 224-226 (2019)). In some embodiments, active Cas-Pol fusions result in detectable levels of edits, e.g., at least 0.1% of sequencing reads demonstrate the target site edit. In some embodiments, desirable Cas-Pol fusions demonstrate a higher frequency of intended to unintended edits, e.g., at least 2-fold higher frequency of intended edits to unintended edits.

### Example 2: Improvement of Expression of Cas-Pol Fusions Through Linker Selection

[0550] This example illustrates the optimization of Cas-Pol fusions to improve protein expression in mammalian cells. Construction of novel Cas-Pol fusions by the substitution of new functional domains as described in Example 1 above may result in low or moderate expression of the genome engineering polypeptide. Thus, it is contemplated here that modified configurations of the fusions may be advantageous in the context of different domains. Without wishing to be limited by the example, one such approach for improving the expression and stability of new fusions is through the use of a linker library. Here, the peptide linker sequence between the Cas and Pol domains of a Cas-Pol fusion is varied using a library of linker sequences. More specifically, linkers from Table 21 below are used to generate new variants of a Cas9 fusion constructs and delivered to human cells to screen for improved Cas-Pol protein expression.

[0551] A set of 22 peptide linkers (Table 21) with varying degrees of length, flexibility, hydrophobicity, and secondary structure are first used to generate variants of a Cas-Pol fusion protein by substitution of the original linker (see example 30 referenced above). HEK293T cells are transfected by electroporation of 250,000 cells/well with ˜800 ng of each Cas9-Pol fusion plasmid along with 200 ng of a single-guide RNA plasmid. To assess the expression level of Cas9-Pol fusions, cell lysates are collected on day 2 post-transfection and analyzed by Western blot using a primary antibody against Cas9.

TABLE 21
Peptide sequences for use as linkers between the Cas and Pol domains in genome
engineering polypeptides comprising Cas-Pol fusions

| # | Linker sequence | SEQ ID NO: | Notes |
|---|---|---|---|
| 1 | GGS | | Short |
| 2 | GGGGS | 4027 | Flexible, short |
| 3 | (GGGGS)2 | 4108 | Flexible |
| 4 | (GGGGS)3 | 4109 | Flexible, long |
| 5 | (GGGGS)4 | 4110 | Flexible, very long |
| 6 | (G)6 | 4116 | Flexible |
| 7 | (G)8 | 4118 | Flexible |
| 8 | GSAGSAAGSGEF | 4221 | Flexible |
| 9 | (GSSGSS) | 4120 | Mid |
| 10 | (GSSGSS)2 | 4122 | Mid, Flexible |
| 11 | (GSSGSS)3 | 4124 | Mid |
| 12 | SGSETPGTSESATPES | 4220 | XTEN |
| 13 | (EAAAK) | 4028 | Rigid helix, short |
| 14 | (EAAAK)2 | 4126 | Rigid helix, mid |
| 15 | (EAAAK)3 | 4127 | Rigid helix, long |
| 16 | PAP | | Rigid, short |
| 17 | PAPAP | 4132 | Rigid, short |
| 18 | PAPAPAPAP | 4134 | Rigid, mid |
| 19 | A(EAAAK)4ALEA(EAAAK)4A | 4217 | Rigid, very long with |
| | | | helices |
| 20 | GGGGS(EAAAK)GGGGS | 4218 | Flexible-helix-flex |
| 21 | (EAAAK)GGGGS(EAAAK) | 4219 | Helix-flex-helix |
| 22 | SGGSSGGSSGSETPGTSESATPESSGGSSGGSS | 4006 | Flexible-XTEN- |
| | | | flexible |

### Example 3: Gene Modifying Polypeptide Selection by Pooled Screening in HEK293T & U2OS Cells

[0552] This example describes the use of an RNA gene modifying system for the targeted editing of a coding sequence in the human genome. More specifically, this example describes the infection of HEK293T and U2OS cells with a library of gene modifying candidates, followed by transfection of a template guide RNA (tgRNA) for in vitro gene modifying in the cells, e.g., as a means of evaluating a new gene modifying polypeptide for editing activity in human cells by a pooled screening approach.

[0553] The gene modifying polypeptide library candidates assayed herein each comprise: 1) a S. pyogenes (Spy) Cas9 nickase containing an N863A mutation that inactivates one endonuclease active site; 2) one of the 122 peptide linkers depicted at Table 6; and 3) a reverse transcriptase (RT) domain from Table 2 of retroviral origin. The particular retroviral RT domains utilized were selected if they were expected to function as a monomer. For each selected RT domain, the wild-type sequences were tested, as well as versions with point mutations installed in the primary wild-type sequence. In particular, 143 RT domains were tested, either wild type or containing various mutations. In total, 17,446 Cas-linker-RT gene modifying polypeptides were tested.

[0554] The system described here is a two-component system comprising: 1) an expression plasmid encoding a human codon-optimized gene modifying polypeptide library candidate within a lentiviral cassette, and 2) a tgRNA expression plasmid expressing a non-coding tgRNA sequence that is recognized by Cas and localizes it to the genomic locus of interest, and that also templates reverse transcription of the desired edit into the genome by the RT domain, driven by a U6 promoter. The lentiviral cassette comprises: (i) a CMV promoter for expression in mammalian cells; (ii) a gene modifying polypeptide library candidate as shown; (iii) a self-cleaving T2A polypeptide; (iv) a puromycin resistance gene enabling selection in mammalian cells; and (v) a polyA tail termination signal.

[0555] To prepare a pool of cells expressing gene modifying polypeptide library candidates, HEK293T or U2OS cells were transduced with pooled lentiviral preparations of the gene modifying candidate plasmid library. HEK293 Lenti-X cells were seeded in 15 cm plates (12×10⁶ cells) prior to lentiviral plasmid transfection. Lentiviral plasmid transfection using the Lentiviral Packaging Mix (Biosettia, 27 ug) and the plasmid DNA for the gene modifying candidate library (27 ug) was performed the following day using Lipofectamine 2000 and Opti-MEM media according to the manufacturer's protocol. Extracellular DNA was removed by a full media change the next day and virus-containing media was harvested 48 hours after. Lentiviral media was concentrated using Lenti-X Concentrator (TaKaRa Biosciences) and 5 mL lentiviral aliquots were made and stored at −80° C. Lentiviral titering was performed by enumerating colony forming units post Puromycin selection. HEK293T or U2OS cells carrying a BFP-expressing genomic landing pad were seeded at 6×10⁷ cells in culture plates and transduced at a 0.3 multiplicity of infection (MOI) to minimize multiple infections per cell. Puromycin (2.5 ug/mL) was added 48 hours post infection to allow for selection of infected cells. Cells were kept under puromycin selection for at least 7 days and then scaled up for tgRNA electroporation.

[0556] To determine the genome-editing capacity of the gene modifying library candidates in the assay, infected BFP-expressing HEK293T or U2OS cells were then transfected by electroporation of 250,000 cells/well with 200 ng of a tgRNA (either g4 or g10) plasmid, designed to convert BFP to GFP, at sufficient cell count for >1000× coverage per library candidate.

[0557] The g4 tgRNA (5′ to 3′) is as follows: 20 nucleotide spacer region (GCCGAAGCACTGCACGCCGT (SEQ ID NO: 4636)), a scaffold region (GTTTTAGAGCTAGAAATAGCAAGTTAAAATAAGGCTAGTCCGTTATCAACTTGAAA AAGTGGCACCGAGTCGGTGC (SEQ ID NO: 4595)), the template region encoding the single base pair substitution to change BFP to GFP (bold) and a PAM inactivation that introduces a synonymous point mutation in the SpyCas9 PAM (NGG to NCG) that prevents re-engagement of the gene modifying polypeptide upon completion of a functional gene modifying reaction (underline) (ACCCTGACGTACG (SEQ ID NO: 4637)), and the 13 nucleotide PBS (GCGTGCAGTGCTT (SEQ ID NO: 4638)).

[0558] Similarly, the g10 tgRNA (5′ to 3′) is as follows: 20 nucleotide spacer region (AGAAGTCGTGCTGCTTCATG (SEQ ID NO: 4639)), a scaffold region (GTTTTAGAGCTAGAAATAGCAAGTTAAAATAAGGCTAGTCCGTTATCAACTTGAAA AAGTGGCACCGAGTCGGTGC (SEQ ID NO: 4595)), the template region encoding the single base pair substitution to change BFP to GFP (bold) and a PAM inactivation that introduces a synonymous point mutation in the SpyCas9 PAM (NGG to NGA) that prevents re-engagement of the gene modifying polypeptide upon completion of a functional gene modifying reaction (underline) (ACCCTGACCTACGGCGTGCAGTGCTTCGGCCGCTACCCCGATCACAT (SEQ ID NO: 4640)), and 13 nucleotide PBS (GAAGCAGCACGAC (SEQ ID NO: 4641)).

[0559] To assess the genome-editing capacity of the various constructs in the assay, cells were sorted by Fluorescence-Activated Cell Sorting (FACS) for GFP expression 6-7 days post-electroporation. Cells were sorted and harvested as distinct populations of unedited (BFP+) cells, edited (GFP+) cells and imperfect edit (BFP−, GFP−) cells. A sample of unsorted cells was also harvested as the input population to determine enrichment during analysis.

[0560] To determine which gene modifying library candidates have genome-editing capacity in this assay, genomic DNA (gDNA) was harvested from sorted and unsorted cell populations, and analyzed by sequencing the gene modifying library candidates in each population. Briefly, gene modifying sequences were amplified from the genome using primers specific to the lentiviral cassette, amplified in a second round of PCR to dilute genomic DNA, and then sequenced using Oxford Nanopore Sequencing Technology according to the manufacturer's protocol.

[0561] After quality control of sequencing reads, reads of at least 1500 and no more than 3200 nucleotides were mapped to the gene modifying polypeptide library sequences and those containing a minimum of an 80% match to a library sequence were considered to be successfully aligned to a given candidate. To identify gene modifying candidates capable of performing gene editing in the assay, the read count of each library candidate in the edited population was compared to its read count in the initial, unsorted population. For purposes of this pooled screen, gene modifying candidates with genome-editing capacity were selected as those candidates that were enriched in the converted (GFP+) population relative to unsorted (input) cells and wherein the enrichment was determined to be at or above the enrichment level of a reference (Element ID No: 17380).

[0562] A large number of gene modifying polypeptide candidates were determined to be enriched in the GFP+ cell populations. For example, of the 17,446 candidates tested, over 3,300 exhibited enrichment in GFP+ sorted populations (relative to unsorted) that was at least equivalent to that of the reference under similar experimental conditions (HEK293T using g4 tgRNA; HEK293T cells using g10 tgRNA; or U2OS cells using g4 tgRNA), shown in Table D. Although the 17,446 candidates were also tested in U2OS cells using g10 tgRNA, the pooled screen did not yield candidates that were enriched in the converted (GFP+) population relative to unsorted (input) cells under that experimental condition; further investigation is required to explain these results.

TABLE D
Combinations of linker and RT sequences screened. The amino acid sequence of
each RT in this table is provided in Table 6.

| | SEQ | |
|---|---|---|
| Linker amino acid sequence | ID NO: | RT domain name |
| EAAAKGSS | 4152 | PERV_Q4VFZ2_3mutA_WS |
| EAAAKEAAAKEAAAKEAAAK | 4128 | MLVMS_P03355_PLV919 |
| PAPEAAAK | 4156 | MLVFF_P26809_3mutA |
| EAAAKPAPGGG | 4208 | MLVFF_P26809_3mutA |
| GSSGSSGSSGSSGSSGSS | 4124 | PERV_Q4VFZ2_3mut |
| PAPGGGEAAAK | 4209 | MLVAV_P03356_3mutA |
| AEAAAKEAAAKEAAAKEAAAKALEAEAAAKEAAAKEAAAKEAAAKA | 4217 | MLVMS_P03355_PLV919 |
| GSSEAAAK | 4151 | MLVFF_P26809_3mutA |
| EAAAKPAPGGS | 4190 | MLVFF_P26809_3mutA |
| GGSGGSGGSGGSGGSGGS | 4106 | MLVFF_P26809_3mutA |
| AEAAAKEAAAKEAAAKEAAAKALEAEAAAKEAAAKEAAAKEAAAKA | 4217 | XMRV6_A1Z651_3mutA |
| AEAAAKEAAAKEAAAKEAAAKALEAEAAAKEAAAKEAAAKEAAAKA | 4217 | PERV_Q4VFZ2_3mutA_WS |
| EAAAKEAAAKEAAAK | 4127 | MLVFF_P26809_3mutA |
| PAPEAAAKGSS | 4216 | MLVFF_P26809_3mutA |
| AEAAAKEAAAKEAAAKEAAAKALEAEAAAKEAAAKEAAAKEAAAKA | 4217 | PERV_Q4VFZ2_3mutA_WS |
| EAAAKEAAAKEAAAK | 4127 | PERV_Q4VFZ2_3mutA_WS |
| AEAAAKEAAAKEAAAKEAAAKALEAEAAAKEAAAKEAAAKEAAAKA | 4217 | AVIRE_P03360_3mutA |
| PAPAPAPAPAP | 4135 | MLVCB_P08361_3mutA |
| PAPAPAPAPAP | 4135 | MLVFF_P26809_3mutA |
| EAAAKGGSPAP | 4189 | PERV_Q4VFZ2_3mutA_WS |
| PAP | | MLVMS_P03355_PLV919 |
| PAPGGGGSS | 4203 | WMSV_P03359_3mutA |
| SGSETPGTSESATPES | 4220 | MLVFF_P26809_3mutA |
| PAPEAAAKGSS | 4216 | XMRV6_A1Z651_3mutA |
| EAAAKGGSGGG | 4167 | MLVMS_P03355_PLV919 |
| GGGGSGGGGS | 4108 | MLVFF_P26809_3mutA |
| GGGPAPGSS | 4200 | MLVAV_P03356_3mutA |
| GGSGGSGGSGGSGGSGGS | 4106 | XMRV6_A1Z651_3mut |
| GGGGSGGGGSGGGGSGGGGSGGGGSGGGGS | 4112 | MLVCB_P08361_3mutA |
| GSSPAP | 4153 | AVIRE_P03360_3mutA |
| EAAAKGSSPAP | 4213 | MLVFF_P26809_3mutA |
| GSSGGGEAAAK | 4195 | MLVFF_P26809_3mutA |
| GGSGGSGGSGGSGGSGGS | 4106 | MLVMS_P03355_3mutA_WS |
| PAPAPAPAP | 4134 | MLVFF_P26809_3mutA |
| EAAAKEAAAKEAAAKEAAAK | 4128 | XMRV6_A1Z651_3mutA |
| EAAAKGGSPAP | 4189 | MLVMS_P03355_3mutA_WS |
| PAPGGSEAAAK | 4191 | AVIRE_P03360_3mutA |
| GGGGSGGGGSGGGGSGGGGSGGGGSGGGGS | 4112 | AVIRE_P03360_3mutA |
| EAAAKGGGGSEAAAK | 4219 | MLVCB_P08361_3mutA |
| AEAAAKEAAAKEAAAKEAAAKALEAEAAAKEAAAKEAAAKEAAAKA | 4217 | WMSV_P03359_3mutA |
| GSS | | MLVMS_P03355_PLV919 |
| GSSGSSGSSGSS | 4122 | MLVMS_P03355_PLV919 |
| GSSPAPEAAAK | 4212 | XMRV6_A1Z651_3mutA |
| GGSPAPEAAAK | 4188 | MLVFF_P26809_3mutA |
| GGGEAAAKGGS | 4166 | MLVFF_P26809_3mutA |
| EAAAKEAAAKEAAAKEAAAKEAAAK | 4129 | PERV_Q4VFZ2_3mutA_WS |
| GGGGGGGG | 4118 | PERV_Q4VFZ2_3mut |
| GGGPAP | 4149 | MLVCB_P08361_3mutA |
| PAPAPAPAPAPAP | 4136 | MLVCB_P08361_3mutA |
| GGSGGSGGSGGSGGSGGS | 4106 | MLVCB_P08361_3mutA |
| PAP | | MLVMS_P03355_3mutA_WS |
| GGSGGSGGSGGSGGSGGS | 4106 | PERV_Q4VFZ2_3mutA_WS |
| PAPAPAPAPAPAP | 4136 | MLVMS_P03355_PLV919 |
| EAAAKPAPGSS | 4214 | MLVMS_P03355_3mutA_WS |
| EAAAKEAAAKEAAAKEAAAK | 4128 | MLVMS_P03355_3mutA_WS |
| EAAAKGGS | 4142 | MLVMS_P03355_3mutA_WS |
| GGGGSEAAAKGGGGS | 4218 | MLVFF_P26809_3mutA |
| EAAAKPAPGSS | 4214 | MLVFF_P26809_3mutA |
| GGGGSGGGGSGGGGSGGGGS | 4110 | MLVMS_P03355_PLV919 |
| EAAAKGGGGGS | 4168 | MLVMS_P03355_PLV919 |
| GGSPAP | 4143 | XMRV6_A1Z651_3mutA |
| EAAAKGGGPAP | 4207 | MLVMS_P03355_PLV919 |
| EAAAKEAAAKEAAAKEAAAKEAAAK | 4129 | MLVFF_P26809_3mutA |
| PAP | | MLVCB_P08361_3mutA |
| EAAAK | 4028 | XMRV6_A1Z651_3mutA |
| GGSGSSPAP | 4181 | PERV_Q4VFZ2_3mutA_WS |
| GSSGSSGSSGSSGSSGSS | 4124 | MLVMS_P03355_PLV919 |
| GSSEAAAKGGG | 4196 | MLVAV_P03356_3mutA |
| GGGEAAAKGGS | 4166 | XMRV6_A1Z651_3mutA |
| EAAAKGGGGSEAAAK | 4219 | MLVAV_P03356_3mutA |
| GGGGSGGGGSGGGGS | 4109 | MLVFF_P26809_3mutA |
| GGGGSGGGGSGGGGSGGGGS | 4110 | AVIRE_P03360_3mutA |
| SGSETPGTSESATPES | 4220 | AVIRE_P03360_3mutA |
| GGGEAAAKPAP | 4205 | MLVFF_P26809_3mutA |
| EAAAKGSSGGG | 4198 | MLVMS_P03355_3mutA_WS |
| EAAAKEAAAKEAAAKEAAAKEAAAK | 4129 | WMSV_P03359_3mut |
| GGSGGSGGSGGS | 4104 | XMRV6_A1Z651_3mutA |
| GGSEAAAKPAP | 4187 | MLVFF_P26809_3mutA |
| EAAAKGSSGGG | 4198 | XMRV6_A1Z651_3mutA |
| GGGGS | 4027 | MLVFF_P26809_3mutA |
| GGGEAAAKGSS | 4194 | MLVMS_P03355_PLV919 |
| PAPAPAPAPAPAP | 4136 | MLVAV_P03356_3mutA |
| GGGGSGGGGSGGGGSGGGGS | 4110 | MLVCB_P08361_3mutA |
| GGGEAAAKGSS | 4194 | MLVCB_P08361_3mutA |
| PAPGGSGSS | 4185 | MLVFF_P26809_3mutA |
| GSAGSAAGSGEF | 4221 | MLVCB_P08361_3mutA |
| PAPGGSEAAAK | 4191 | MLVMS_P03355_3mutA_WS |
| GGSGSS | 4139 | XMRV6_A1Z651_3mutA |
| PAPGGGGSS | 4203 | MLVMS_P03355_PLV919 |
| GSSGSSGSS | 4121 | XMRV6_A1Z651_3mut |
| AEAAAKEAAAKEAAAKEAAAKALEAEAAAKEAAAKEAAAKEAAAKA | 4217 | MLVMS_P03355_3mutA_WS |
| EAAAK | 4028 | MLVMS_P03355_PLV919 |
| GSSGSSGSSGSS | 4122 | MLVFF_P26809_3mutA |
| PAPGGGGSS | 4203 | MLVCB_P08361_3mutA |
| GGGEAAAKGGS | 4166 | MLVCB_P08361_3mutA |
| PAPGGGEAAAK | 4209 | MLVMS_P03355_PLV919 |
| GGGGGSPAP | 4171 | XMRV6_A1Z651_3mutA |
| EAAAKGGS | 4142 | XMRV6_A1Z651_3mutA |
| EAAAKGSSPAP | 4213 | XMRV6_A1Z651_3mut |
| PAPEAAAK | 4156 | MLVAV_P03356_3mutA |
| GGSGGSGGSGGS | 4104 | MLVMS_P03355_3mutA_WS |
| GGGPAPGGS | 4172 | MLVMS_P03355_PLV919 |
| GSSGSSGSSGSS | 4122 | PERV_Q4VFZ2_3mutA_WS |
| EAAAKPAPGGS | 4190 | MLVCB_P08361_3mutA |
| GSSGSS | 4120 | MLVFF_P26809_3mutA |
| EAAAKEAAAKEAAAKEAAAK | 4128 | MLVCB_P08361_3mutA |
| EAAAKEAAAKEAAAKEAAAK | 4128 | FLV_P10273_3mutA |
| GSS | | MLVFF_P26809_3mutA |
| EAAAKEAAAK | 4126 | MLVMS_P03355_3mutA_WS |
| PAPEAAAKGGG | 4210 | MLVAV_P03356_3mutA |
| GGSGSSEAAAK | 4175 | MLVFF_P26809_3mutA |
| EAAAKEAAAKEAAAKEAAAKEAAAK | 4129 | PERV_Q4VFZ2 |
| GSSEAAAKPAP | 4211 | AVIRE_P03360_3mutA |
| EAAAKEAAAKEAAAKEAAAKEAAAK | 4129 | MLVCB_P08361_3mutA |
| EAAAKGGG | 4148 | MLVFF_P26809_3mutA |
| GSSPAPGGG | 4202 | MLVCB_P08361_3mutA |
| GGGPAPGSS | 4200 | MLVMS_P03355_PLV919 |
| GGGGGS | 4138 | MLVMS_P03355_3mutA_WS |
| EAAAKEAAAKEAAAKEAAAKEAAAKEAAAK | 4130 | PERV_Q4VFZ2_3mut |
| GGGGSGGGGSGGGGSGGGGSGGGGS | 4111 | WMSV_P03359_3mutA |
| EAAAKEAAAKEAAAK | 4127 | PERV_Q4VFZ2_3mut |
| PAPAPAPAP | 4134 | MLVCB_P08361_3mutA |
| GSSGSSGSSGSSGSS | 4123 | PERV_Q4VFZ2_3mut |
| GGGGSSEAAAK | 4193 | MLVMS_P03355_3mutA_WS |
| GGSGGSGGSGGS | 4104 | MLVCB_P08361_3mutA |
| PAPEAAAKGGS | 4192 | MLVCB_P08361_3mutA |
| EAAAKEAAAKEAAAKEAAAKEAAAKEAAAK | 4130 | MLVCB_P08361_3mutA |
| EAAAKGGGGSEAAAK | 4219 | MLVMS_P03355_PLV919 |
| EAAAKGGGGSEAAAK | 4219 | MLVMS_P03355_3mutA_WS |
| EAAAKGGGPAP | 4207 | XMRV6_A1Z651_3mut |
| EAAAKEAAAKEAAAKEAAAKEAAAK | 4129 | MLVMS_P03355_3mutA_WS |
| AEAAAKEAAAKEAAAKEAAAKALEAEAAAKEAAAKEAAAKEAAAKA | 4217 | FLV_P10273_3mutA |
| GGSEAAAKGGG | 4164 | MLVMS_P03355_3mutA_WS |
| GGGGSGGGGSGGGGSGGGGSGGGGSGGGGS | 4112 | KORV_Q9TTC1-Pro_3mutA |
| GGGPAPGGS | 4172 | MLVCB_P08361_3mutA |
| PAPAPAPAPAPAP | 4136 | XMRV6_A1Z651_3mutA |
| GGSGSSGGG | 4158 | XMRV6_A1Z651_3mutA |
| GGSGSSGGG | 4158 | MLVCB_P08361_3mutA |
| GGGEAAAKGGS | 4166 | MLVMS_P03355_3mutA_WS |
| EAAAK | 4028 | MLVCB_P08361_3mutA |
| GGSPAPGSS | 4182 | MLVMS_P03355_3mutA_WS |
| GGGGSSEAAAK | 4193 | PERV_Q4VFZ2_3mut |
| PAPAPAPAPAP | 4135 | MLVBM_Q7SVK7_3mut |
| EAAAKEAAAKEAAAKEAAAK | 4128 | MLVAV_P03356_3mutA |
| GGGGGSGSS | 4159 | MLVCB_P08361_3mutA |
| EAAAKGSSPAP | 4213 | MLVMS_P03355_3mutA_WS |
| PAPAPAPAPAPAP | 4136 | MLVMS_P03355_3mutA_WS |
| GSSGGGGGS | 4162 | MLVMS_P03355_3mutA_WS |
| PAPGSSGGG | 4204 | MLVMS_P03355_PLV919 |
| GGSGGGPAP | 4169 | MLVCB_P08361_3mutA |
| GGGGGGG | 4117 | MLVCB_P08361_3mutA |
| GSSGSSGSSGSSGSSGSS | 4124 | MLVCB_P08361_3mutA |
| GGGPAPGGS | 4172 | MLVFF_P26809_3mutA |
| EAAAKGGSGGG | 4167 | PERV_Q4VFZ2_3mut |
| EAAAKGGGGSS | 4197 | MLVMS_P03355_3mutA_WS |
| GSSGSSGSSGSSGSSGSS | 4124 | MLVMS_P03355_3mut |
| GGGGSGGGGSGGGGSGGGGS | 4110 | MLVBM_Q7SVK7_3mutA_WS |
| PAPAPAPAPAP | 4135 | MLVMS_P03355_PLV919 |
| GGGEAAAKGGS | 4166 | MLVMS_P03355_PLV919 |
| AEAAAKEAAAKEAAAKEAAAKALEAEAAAKEAAAKEAAAKEAAAKA | 4217 | MLVMS_P03355_3mut |
| GSAGSAAGSGEF | 4221 | MLVMS_P03355_3mutA_WS |
| GSSGSSGSSGSSGSS | 4123 | MLVFF_P26809_3mutA |
| EAAAKGGSGSS | 4179 | MLVFF_P26809_3mutA |
| PAPGGG | 4150 | MLVFF_P26809_3mutA |
| GGGPAPGSS | 4200 | XMRV6_A1Z651_3mutA |
| PAPEAAAKGGS | 4192 | AVIRE_P03360_3mutA |
| PAPGGGEAAAK | 4209 | MLVFF_P26809_3mut |
| GGGGSSEAAAK | 4193 | MLVCB_P08361_3mutA |
| EAAAK | 4028 | MLVMS_P03355_PLV919 |
| GGGGSGGGGSGGGGSGGGGSGGGGSGGGGS | 4112 | BAEVM_P10272_3mutA |
| GGSGGGEAAAK | 4163 | MLVMS_P03355_PLV919 |
| AEAAAKEAAAKEAAAKEAAAKALEAEAAAKEAAAKEAAAKEAAAKA | 4217 | MLVFF_P26809_3mutA |
| GSSPAPGGS | 4184 | XMRV6_A1Z651_3mutA |
| GGSGGGPAP | 4169 | MLVMS_P03355_PLV919 |
| EAAAK | 4028 | AVIRE_P03360_3mutA |
| GSS | | XMRV6_A1Z651_3mutA |
| GGSGGSGGS | 4103 | MLVFF_P26809_3mutA |
| EAAAKEAAAKEAAAKEAAAK | 4128 | AVIRE_P03360_3mut |
| PAPEAAAKGGG | 4210 | PERV_Q4VFZ2_3mutA_WS |
| GGGGGSEAAAK | 4165 | BAEVM_P10272_3mutA |
| GGSGSSGGG | 4158 | MLVMS_P03355_3mutA_WS |
| GGGGGGG | 4117 | MLVMS_P03355_3mutA_WS |
| GSSEAAAKPAP | 4211 | PERV_Q4VFZ2_3mut |
| GGGGGSEAAAK | 4165 | WMSV_P03359_3mut |
| GGGGSGGGGSGGGGSGGGGSGGGGS | 4111 | MLVFF_P26809_3mut |
| GGGEAAAKGGS | 4166 | AVIRE_P03360_3mutA |
| GGSPAPGGG | 4170 | AVIRE_P03360_3mutA |
| GSAGSAAGSGEF | 4221 | MLVAV_P03356_3mutA |
| EAAAK | 4028 | MLVAV_P03356_3mutA |
| EAAAKPAPGSS | 4214 | WMSV_P03359_3mutA |
| EAAAKEAAAKEAAAKEAAAKEAAAKEAAAK | 4130 | PERV_Q4VFZ2_3mutA_WS |
| GGSEAAAKPAP | 4187 | MLVCB_P08361_3mutA |
| PAPAPAPAPAPAP | 4136 | MLVBM_Q7SVK7_3mutA_WS |
| GGSPAPGGG | 4170 | MLVMS_P03355_3mutA_WS |
| GGSEAAAKGGG | 4164 | MLVMS_P03355_3mut |
| GGSGGSGGSGGS | 4104 | MLVFF_P26809_3mutA |
| EAAAKEAAAKEAAAKEAAAKEAAAKEAAAK | 4130 | MLVFF_P26809_3mutA |
| GGG | | AVIRE_P03360_3mutA |
| AEAAAKEAAAKEAAAKEAAAKALEAEAAAKEAAAKEAAAKEAAAKA | 4217 | PERV_Q4VFZ2_3mut |
| GGSGGSGGSGGS | 4104 | MLVMS_P03355_3mutA_WS |
| GGGEAAAK | 4147 | MLVCB_P08361_3mutA |
| GSSGSSGSSGSSGSSGSS | 4124 | MLVMS_P03355_3mutA_WS |
| GSSGGGPAP | 4201 | MLVMS_P03355_3mutA_WS |
| GSSEAAAKPAP | 4211 | MLVFF_P26809_3mutA |
| EAAAKEAAAK | 4126 | MLVMS_P03355_PLV919 |
| GGGGSGGGGSGGGGSGGGGSGGGGSGGGGS | 4112 | MLVCB_P08361_3mut |
| GGGGGG | 4116 | MLVMS_P03355_3mutA_WS |
| GGSGSSGGG | 4158 | MLVFF_P26809_3mutA |
| GSSGGGEAAAK | 4195 | PERV_Q4VFZ2_3mutA_WS |
| PAPAPAPAPAP | 4135 | PERV_Q4VFZ2_3mut |
| EAAAKEAAAKEAAAKEAAAKEAAAKEAAAK | 4130 | SFV3L_P27401_2mut |
| EAAAKGGSGGG | 4167 | BAEVM_P10272_3mutA |
| GGGGSSPAP | 4199 | PERV_Q4VFZ2_3mutA_WS |
| GGGEAAAKPAP | 4205 | MLVMS_P03355_PLV919 |
| GGSGGGPAP | 4169 | BAEVM_P10272_3mutA |
| PAPGSSGGS | 4186 | MLVMS_P03355_PLV919 |
| GGSGGGPAP | 4169 | MLVMS_P03355_3mutA_WS |
| EAAAKGGSPAP | 4189 | PERV_Q4VFZ2_3mutA_WS |
| EAAAKGGSGGG | 4167 | MLVMS_P03355_3mutA_WS |
| PAPGSSGGG | 4204 | MLVFF_P26809_3mutA |
| GSSEAAAKGGS | 4178 | MLVFF_P26809_3mutA |
| PAPGSSEAAAK | 4215 | MLVFF_P26809_3mutA |
| EAAAKGSSPAP | 4213 | KORV_Q9TTC1-Pro_3mutA |
| EAAAKEAAAKEAAAKEAAAKEAAAK | 4129 | MLVBM_Q7SVK7_3mutA_WS |
| PAPGSSEAAAK | 4215 | MLVMS_P03355_PLV919 |
| EAAAKGSSGGG | 4198 | MLVMS_P03355_3mutA_WS |
| EAAAKGGGGGS | 4168 | AVIRE_P03360_3mutA |
| EAAAKEAAAKEAAAK | 4127 | MLVMS_P03355_PLV919 |
| PAPAPAPAPAPAP | 4136 | MLVFF_P26809_3mutA |
| GGGGSGGGGSGGGGS | 4109 | MLVCB_P08361_3mutA |
| PAPGGSEAAAK | 4191 | MLVCB_P08361_3mutA |
| PAPGSSEAAAK | 4215 | MLVBM_Q7SVK7_3mutA_WS |
| PAPEAAAKGSS | 4216 | AVIRE_P03360_3mutA |
| GGSPAPGSS | 4182 | WMSV_P03359_3mutA |
| PAPGGSGGG | 4173 | MLVMS_P03355_PLV919 |
| EAAAKGGSGSS | 4179 | MLVMS_P03355_3mutA_WS |
| GGSGGG | 4137 | MLVFF_P26809_3mutA |
| GGSEAAAKGSS | 4176 | KORV_Q9TTC1_3mutA |
| AEAAAKEAAAKEAAAKEAAAKALEAEAAAKEAAAKEAAAKEAAAKA | 4217 | MLVCB_P08361_3mutA |
| PAPAPAPAPAPAP | 4136 | PERV_Q4VFZ2_3mutA_WS |
| PAPEAAAK | 4156 | MLVMS_P03355_3mutA_WS |
| GGSEAAAKGGG | 4164 | MLVMS_P03355_PLV919 |
| GSSPAP | 4153 | MLVMS_P03355_3mutA_WS |
| GGGGSS | 4145 | MLVMS_P03355_PLV919 |
| GGGEAAAKPAP | 4205 | AVIRE_P03360_3mutA |
| EAAAKPAPGGS | 4190 | MLVAV_P03356_3mutA |
| EAAAKGGGPAP | 4207 | MLVAV_P03356_3mutA |
| PAPGGSEAAAK | 4191 | BAEVM_P10272_3mutA |
| PAPGGSGSS | 4185 | MLVMS_P03355_3mutA_WS |
| PAPGGSGSS | 4185 | AVIRE_P03360_3mutA |
| GGSGGGPAP | 4169 | MLVMS_P03355_3mutA_WS |
| EAAAKEAAAKEAAAKEAAAK | 4128 | BAEVM_P10272_3mutA |
| GGGGSGGGGSGGGGSGGGGSGGGGS | 4111 | MLVMS_P03355_PLV919 |
| GGGGSSPAP | 4199 | MLVCB_P08361_3mutA |
| GSSGGGPAP | 4201 | MLVFF_P26809_3mutA |
| GGGGSSGGS | 4160 | MLVMS_P03355_PLV919 |
| GGSGGG | 4137 | MLVCB_P08361_3mutA |
| GSSGGGGGS | 4162 | MLVMS_P03355_PLV919 |
| SGGSSGGSSGSETPGTSESATPESSGGSSGGSS | 4006 | XMRV6_A1Z651_3mutA |
| GGGGGSGSS | 4159 | KORV_Q9TTC1_3mut |
| GGGEAAAKGGS | 4166 | BAEVM_P10272_3mutA |
| GGSGGG | 4137 | BAEVM_P10272_3mutA |
| PAPAPAP | 4133 | KORV_Q9TTC1-Pro_3mut |
| AEAAAKEAAAKEAAAKEAAAKALEAEAAAKEAAAKEAAAKEAAAKA | 4217 | SFV3L_P27401_2mutA |
| AEAAAKEAAAKEAAAKEAAAKALEAEAAAKEAAAKEAAAKEAAAKA | 4217 | MLVBM_Q7SVK7_3mutA_WS |
| GSSGSSGSSGSSGSS | 4123 | MLVMS_P03355_3mutA_WS |
| GSSGGGEAAAK | 4195 | MLVMS_P03355_3mutA_WS |
| GSSGGSEAAAK | 4177 | MLVFF_P26809_3mutA |
| PAP | | MLVMS_P03355_PLV919 |
| EAAAKGGGGSEAAAK | 4219 | MLVBM_Q7SVK7_3mutA_WS |
| PAPAP | 4132 | AVIRE_P03360_3mutA |
| PAP | | MLVFF_P26809_3mutA |
| GSSGGG | 4146 | MLVMS_P03355_3mut |
| GSSPAPGGS | 4184 | MLVFF_P26809_3mutA |
| PAPAPAPAP | 4134 | XMRV6_A1Z651_3mutA |
| EAAAKGSSGGS | 4180 | PERV_Q4VFZ2_3mut |
| PAPEAAAKGGG | 4210 | KORV_Q9TTC1-Pro_3mutA |
| PAPGGS | 4144 | MLVCB_P08361_3mutA |
| EAAAKGGG | 4148 | MLVCB_P08361_3mutA |
| GSSEAAAKPAP | 4211 | MLVMS_P03355_PLV919 |
| PAPGGS | 4144 | MLVFF_P26809_3mutA |
| EAAAKGGS | 4142 | MLVCB_P08361_3mutA |
| EAAAKEAAAKEAAAKEAAAKEAAAKEAAAK | 4130 | FLV_P10273_3mutA |
| PAPGGSEAAAK | 4191 | MLVAV_P03356_3mutA |
| GSS | | MLVCB_P08361_3mutA |
| GSSGSSGSSGSS | 4122 | AVIRE_P03360_3mutA |
| GSSGSSGSS | 4121 | MLVFF_P26809_3mutA |
| GSSGGG | 4146 | MLVMS_P03355_PLV919 |
| EAAAK | 4028 | MLVFF_P26809_3mutA |
| GGSPAPEAAAK | 4188 | MLVCB_P08361_3mutA |
| GGSGSS | 4139 | MLVCB_P08361_3mutA |
| GSSPAPGGG | 4202 | MLVMS_P03355_PLV919 |
| EAAAKEAAAKEAAAKEAAAKEAAAK | 4129 | MLVAV_P03356_3mutA |
| EAAAKGSSPAP | 4213 | FLV_P10273_3mutA |
| GGGGSS | 4145 | XMRV6_A1Z651_3mutA |
| GGSPAPGSS | 4182 | MLVMS_P03355_PLV919 |
| EAAAKEAAAKEAAAKEAAAKEAAAK | 4129 | MLVMS_P03355_3mutA_WS |
| PAPEAAAKGGG | 4210 | FLV_P10273_3mutA |
| EAAAKPAPGGS | 4190 | XMRV6_A1Z651_3mut |
| PAPAP | 4132 | BAEVM_P10272_3mutA |
| EAAAKEAAAKEAAAKEAAAK | 4128 | MLVMS_P03355_PLV919 |
| GSSPAPGGG | 4202 | MLVMS_P03355_PLV919 |
| EAAAKGGGPAP | 4207 | KORV_Q9TTC1_3mutA |
| PAPEAAAK | 4156 | MLVMS_P03355_PLV919 |
| PAPGGGEAAAK | 4209 | PERV_Q4VFZ2_3mutA_WS |
| EAAAKGSSGGS | 4180 | MLVMS_P03355_3mutA_WS |
| EAAAKEAAAKEAAAK | 4127 | MLVMS_P03355_PLV919 |
| GSSEAAAK | 4151 | MLVMS_P03355_3mutA_WS |
| GSSGSSGSSGSS | 4123 | MLVMS_P03355_3mutA_WS |
| GGGGSGGGGSGGGGSGGGGS | 4110 | MLVMS_P03355_3mutA_WS |
| EAAAKGGGGSEAAAK | 4219 | MLVMS_P03355_3mut |
| GGS | | MLVCB_P08361_3mutA |
| GGGGSGGGGSGGGGSGGGGSGGGGSGGGGS | 4112 | XMRV6_A1Z651_3mutA |
| GGSGSSPAP | 4181 | MLVCB_P08361_3mutA |
| GGGGSGGGGSGGGGS | 4109 | XMRV6_A1Z651_3mutA |
| PAPAPAPAPAP | 4135 | BAEVM_P10272_3mutA |
| PAPAPAPAPAP | 4135 | MLVMS_P03355_3mutA_WS |
| EAAAKEAAAKEAAAKEAAAK | 4128 | MLVBM_Q7SVK7_3mut |
| GGGGSGGGGSGGGGSGGGGSGGGGS | 4111 | BAEVM_P10272_3mutA |
| GGSGGSGGS | 4103 | MLVMS_P03355_3mutA_WS |
| EAAAKPAPGSS | 4214 | MLVMS_P03355_PLV919 |
| GSS | | MLVMS_P03355_3mutA_WS |
| PAPEAAAKGGS | 4192 | MLVMS_P03355_3mutA_WS |
| GGGPAPGGS | 4172 | MLVMS_P03355_3mutA_WS |
| EAAAKGGGGSS | 4197 | MLVAV_P03356_3mutA |
| GSSGSSGSSGSSGSS | 4123 | MLVFF_P26809_3mut |
| SGSETPGTSESATPES | 4220 | PERV_Q4VFZ2_3mut |
| GGSEAAAKGGG | 4164 | MLVMS_P03355_3mut |
| GSSGSSGSSGSSGSSGSS | 4124 | AVIRE_P03360_3mutA |
| PAPAPAPAPAPAP | 4136 | AVIRE_P03360_3mut |
| GGSGGS | 4102 | XMRV6_A1Z651_3mutA |
| PAPGSSEAAAK | 4215 | MLVCB_P08361_3mut |
| GGSPAPEAAAK | 4188 | PERV_Q4VFZ2_3mut |
| EAAAKGGGGGS | 4168 | MLVCB_P08361_3mutA |
| GGSGGSGGSGGS | 4104 | MLVMS_P03355_PLV919 |
| GGGGSSEAAAK | 4193 | MLVMS_P03355_PLV919 |
| GSSEAAAKGGG | 4196 | MLVFF_P26809_3mutA |
| PAPGGS | 4144 | MLVMS_P03355_3mutA_WS |
| EAAAKGGSGGG | 4167 | MLVCB_P08361_3mutA |
| EAAAKGGG | 4148 | PERV_Q4VFZ2_3mut |
| PAPGGS | 4144 | XMRV6_A1Z651_3mutA |
| GSSPAPGGG | 4202 | XMRV6_A1Z651_3mutA |
| PAPEAAAKGGG | 4210 | MLVMS_P03355_3mutA_WS |
| GSSEAAAKGGG | 4196 | PERV_Q4VFZ2_3mutA_WS |
| PAPGGSEAAAK | 4191 | XMRV6_A1Z651_3mutA |
| GGGGGS | 4138 | MLVMS_P03355_3mutA_WS |
| GGSPAPEAAAK | 4188 | MLVMS_P03355_3mutA_WS |
| GGGPAP | 4149 | MLVFF_P26809_3mutA |
| PAPGSSGGG | 4204 | XMRV6_A1Z651_3mutA |
| PAPGSSGGG | 4204 | MLVBM_Q7SVK7_3mutA_WS |
| GGGEAAAKGSS | 4194 | MLVMS_P03355_3mutA_WS |
| GSSEAAAKGGS | 4178 | MLVCB_P08361_3mutA |
| PAPGGSGSS | 4185 | MLVCB_P08361_3mutA |
| EAAAKGGGGSEAAAK | 4219 | BAEVM_P10272_3mutA |
| PAPAPAP | 4133 | PERV_Q4VFZ2_3mutA_WS |
| GGGGGG | 4116 | MLVAV_P03356_3mutA |
| GSSPAPEAAAK | 4212 | MLVCB_P08361_3mutA |
| GGSGGSGGS | 4103 | MLVMS_P03355_3mutA_WS |
| GSSGSSGSSGSSGSS | 4123 | XMRV6_A1Z651_3mut |
| GGGPAPGGS | 4172 | XMRV6_A1Z651_3mutA |
| GGGPAPEAAAK | 4206 | BAEVM_P10272_3mutA |
| GGSGGG | 4137 | AVIRE_P03360_3mutA |
| SGSETPGTSESATPES | 4220 | PERV_Q4VFZ2_3mutA_WS |
| EAAAKGSSPAP | 4213 | MLVMS_P03355_PLV919 |
| GSSEAAAK | 4151 | XMRV6_A1Z651_3mut |
| GSSGGSGGG | 4161 | MLVFF_P26809_3mutA |
| EAAAKEAAAKEAAAKEAAAKEAAAK | 4129 | WMSV_P03359_3mutA |
| GGGGSEAAAKGGGGS | 4218 | MLVMS_P03355_PLV919 |
| PAPGGGGSS | 4203 | MLVMS_P03355_3mutA_WS |
| SGSETPGTSESATPES | 4220 | MLVMS_P03355_3mutA_WS |
| GGSPAPEAAAK | 4188 | KORV_Q9TTC1-Pro_3mutA |
| GSSEAAAKGGG | 4196 | MLVMS_P03355_3mutA_WS |
| GSSEAAAK | 4151 | WMSV_P03359_3mutA |
| GGGGSEAAAKGGGGS | 4218 | AVIRE_P03360_3mutA |
| GSS | | WMSV_P03359_3mutA |
| PAPGGSEAAAK | 4191 | MLVFF_P26809_3mutA |
| GGGGS | 4027 | MLVMS_P03355_3mutA_WS |
| GGGPAP | 4149 | MLVMS_P03355_3mutA_WS |
| EAAAKEAAAKEAAAKEAAAKEAAAKEAAAK | 4130 | MLVMS_P03355_3mutA_WS |
| EAAAKPAPGSS | 4214 | PERV_Q4VFZ2_3mut |
| EAAAKPAPGSS | 4214 | MLVCB_P08361_3mutA |
| GGGGGG | 4116 | WMSV_P03359_3mutA |
| EAAAKPAPGGS | 4190 | MLVMS_P03355_PLV919 |
| PAPGGGEAAAK | 4209 | PERV_Q4VFZ2_3mut |
| EAAAKEAAAKEAAAKEAAAKEAAAK | 4129 | AVIRE_P03360_3mutA |
| GSSEAAAKPAP | 4211 | XMRV6_A1Z651_3mutA |
| PAPGGSEAAAK | 4191 | MLVBM_Q7SVK7_3mutA_WS |
| PAPGSS | 4154 | MLVCB_P08361_3mutA |
| EAAAKGGG | 4148 | MLVMS_P03355_3mutA_WS |
| EAAAKPAP | 4155 | MLVCB_P08361_3mutA |
| PAPEAAAKGGS | 4192 | MLVBM_Q7SVK7_3mutA_WS |
| GGSPAPGGG | 4170 | MLVCB_P08361_3mutA |
| PAPGGSGSS | 4185 | WMSV_P03359_3mutA |
| EAAAKEAAAKEAAAKEAAAKEAAAKEAAAK | 4130 | MLVMS_P03355_PLV919 |
| GGSGGGPAP | 4169 | MLVMS_P03355_PLV919 |
| AEAAAKEAAAKEAAAKEAAAKALEAEAAAKEAAAKEAAAKEAAAKA | 4217 | MLVMS_P03355 |
| PAPEAAAKGSS | 4216 | MLVCB_P08361_3mutA |
| EAAAKGSS | 4152 | MLVMS_P03355_3mutA_WS |
| GGSGGS | 4102 | MLVMS_P03355_3mutA_WS |
| EAAAKEAAAKEAAAKEAAAKEAAAK | 4129 | BAEVM_P10272_3mutA |
| GGGGSEAAAKGGGGS | 4218 | FLV_P10273_3mutA |
| GGSEAAAKGGG | 4164 | MLVCB_P08361_3mutA |
| GSSGSSGSSGSSGSS | 4123 | BAEVM_P10272_3mutA |
| GGGGSGGGGSGGGGSGGGGSGGGGSGGGGS | 4112 | MLVFF_P26809_3mutA |
| EAAAKGGG | 4148 | PERV_Q4VFZ2_3mut |
| GGGGGSEAAAK | 4165 | MLVCB_P08361_3mutA |
| EAAAKPAPGGS | 4190 | MLVMS_P03355_3mutA_WS |
| GGGGGSGSS | 4159 | XMRV6_A1Z651_3mutA |
| PAPGSSEAAAK | 4215 | MLVMS_P03355_3mutA_WS |
| GSSEAAAKPAP | 4211 | MLVCB_P08361_3mutA |
| EAAAKGSSPAP | 4213 | MLVAV_P03356_3mutA |
| GGGPAPGGS | 4172 | WMSV_P03359_3mutA |
| GGSPAP | 4143 | MLVMS_P03355_3mutA_WS |
| GGSEAAAKGGG | 4164 | MLVMS_P03355_3mutA_WS |
| GGGGGGGG | 4118 | MLVFF_P26809_3mutA |
| GGGGSGGGGSGGGGSGGGGSGGGGSGGGGS | 4112 | MLVMS_P03355_3mutA_WS |
| GGGGSGGGGSGGGGSGGGGSGGGGSGGGGS | 4112 | MLVBM_Q7SVK7_3mutA_WS |
| GSSPAPGGG | 4202 | MLVAV_P03356_3mutA |
| GGGGGG | 4116 | AVIRE_P03360_3mutA |
| GSSGGS | 4140 | MLVMS_P03355_3mutA_WS |
| GGSPAPGSS | 4182 | MLVFF_P26809_3mutA |
| PAPEAAAKGGG | 4210 | PERV_Q4VFZ2_3mut |
| EAAAKGGGPAP | 4207 | MLVFF_P26809_3mutA |
| GGGEAAAKGGS | 4166 | MLVMS_P03355_PLV919 |
| GGSGSSPAP | 4181 | MLVFF_P26809_3mutA |
| SGSETPGTSESATPES | 4220 | WMSV_P03359_3mutA |
| PAPGGSEAAAK | 4191 | MLVBM_Q7SVK7_3mutA_WS |
| GGSGGG | 4137 | MLVMS_P03355_PLV919 |
| GGGGSSPAP | 4199 | PERV_Q4VFZ2_3mut |
| GGGEAAAKGSS | 4194 | MLVAV_P03356_3mutA |
| PAPAPAPAPAPAP | 4136 | MLVMS_P03355_3mutA_WS |
| EAAAKGGGGSEAAAK | 4219 | PERV_Q4VFZ2 |
| EAAAKEAAAKEAAAKEAAAKEAAAK | 4129 | MLVMS_P03355_PLV919 |
| GGGGGSEAAAK | 4165 | PERV_Q4VFZ2_3mut |
| PAPGSSEAAAK | 4215 | MLVCB_P08361_3mutA |
| GSAGSAAGSGEF | 4221 | PERV_Q4VFZ2_3mutA_WS |
| EAAAKGGGGSEAAAK | 4219 | MLVFF_P26809_3mutA |
| GGSPAPGGG | 4170 | PERV_Q4VFZ2_3mutA_WS |
| GSSEAAAKGGG | 4196 | AVIRE_P03360_3mutA |
| GGGEAAAKPAP | 4205 | MLVMS_P03355_3mutA_WS |
| GGGPAP | 4149 | AVIRE_P03360_3mutA |
| GGSEAAAK | 4141 | MLVCB_P08361_3mutA |
| SGGSSGGSSGSETPGTSESATPESSGGSSGGSS | 4006 | PERV_Q4VFZ2_3mut |
| EAAAKPAPGGS | 4190 | MLVBM_Q7SVK7_3mutA_WS |
| AEAAAKEAAAKEAAAKEAAAKALEAEAAAKEAAAKEAAAKEAAAKA | 4217 | XMRV6_A1Z651_3mut |
| GGGGGGGG | 4118 | MLVCB_P08361_3mutA |
| PAPGSS | 4154 | PERV_Q4VFZ2_3mut |
| EAAAK | 4028 | PERV_Q4VFZ2_3mut |
| GSAGSAAGSGEF | 4221 | MLVMS_P03355_3mutA_WS |
| PAPGGGEAAAK | 4209 | PERV_Q4VFZ2_3mut |
| EAAAKGSSGGS | 4180 | MLVFF_P26809_3mut |
| GGGGSEAAAKGGGGS | 4218 | BAEVM_P10272_3mutA |
| GGGGSGGGGSGGGGS | 4109 | MLVMS_P03355_PLV919 |
| EAAAKGGGGSEAAAK | 4219 | BAEVM_P10272_3mut |
| PAPGGGEAAAK | 4209 | MLVMS_P03355_3mutA_WS |
| GGSEAAAKPAP | 4187 | MLVMS_P03355_3mutA_WS |
| PAPAP | 4132 | MLVCB_P08361_3mutA |
| PAPAP | 4132 | MLVFF_P26809_3mutA |
| GGSPAP | 4143 | AVIRE_P03360_3mutA |
| EAAAKGSSGGS | 4180 | MLVCB_P08361_3mutA |
| PAPGSSGGS | 4186 | AVIRE_P03360_3mutA |
| EAAAKGGGGSEAAAK | 4219 | XMRV6_A1Z651_3mutA |
| PAPAPAP | 4133 | BAEVM_P10272_3mutA |
| GGSGGSGGSGGSGGSGGS | 4106 | MLVMS_P03355_PLV919 |
| GGGGGSGSS | 4159 | MLVMS_P03355_PLV919 |
| PAPGSSEAAAK | 4215 | XMRV6_A1Z651_3mut |
| GGSEAAAKPAP | 4187 | XMRV6_A1Z651_3mutA |
| EAAAKEAAAKEAAAKEAAAK | 4128 | XMRV6_A1Z651_3mut |
| AEAAAKEAAAKEAAAKEAAAKALEAEAAAKEAAAKEAAAKEAAAKA | 4217 | WMSV_P03359_3mut |
| GGSGGGEAAAK | 4163 | XMRV6_A1Z651_3mutA |
| GGGEAAAK | 4147 | XMRV6_A1Z651_3mutA |
| GGGGSGGGGSGGGGS | 4109 | MLVMS_P03355_3mutA_WS |
| GGSGGSGGSGGSGGS | 4105 | MLVFF_P26809_3mutA |
| GSSGGGGGS | 4162 | MLVMS_P03355_3mut |
| PAPGGSEAAAK | 4191 | MLVMS_P03355_3mutA_WS |
| GSSGGSPAP | 4183 | MLVMS_P03355_3mutA_WS |
| SGSETPGTSESATPES | 4220 | XMRV6_A1Z651_3mutA |
| GGGGSGGGGS | 4108 | MLVMS_P03355_PLV919 |
| PAPAPAPAPAP | 4135 | MLVMS_P03355_3mut |
| GSSGSS | 4120 | XMRV6_A1Z651_3mutA |
| GSSEAAAKPAP | 4211 | PERV_Q4VFZ2_3mut |
| GGSGSSGGG | 4158 | MLVMS_P03355_3mutA_WS |
| EAAAKEAAAK | 4126 | MLVCB_P08361_3mutA |
| GSSGSSGSSGSS | 4122 | MLVMS_P03355_3mutA_WS |
| GSSPAPGGG | 4202 | PERV_Q4VFZ2_3mutA_WS |
| EAAAKEAAAKEAAAK | 4127 | MLVMS_P03355_3mutA_WS |
| AEAAAKEAAAKEAAAKEAAAKALEAEAAAKEAAAKEAAAKEAAAKA | 4217 | SFV1_P23074_2mutA |
| GGGGGGGGSGGGGSGGGGSGGGGSGGGGS | 4112 | MLVMS_P03355_PLV919 |
| GSAGSAAGSGEF | 4221 | MLVMS_P03355_PLV919 |
| PAPGSSEAAAK | 4215 | MLVMS_P03355_3mutA_WS |
| GGSEAAAK | 4141 | MLVMS_P03355_3mutA_WS |
| GSSGSSGSSGSSGSS | 4123 | PERV_Q4VFZ2_3mutA_WS |
| GGSEAAAKPAP | 4187 | PERV_Q4VFZ2_3mutA_WS |
| GGSGGSGGS | 4103 | MLVCB_P08361_3mutA |
| EAAAKGGSGSS | 4179 | MLVCB_P08361_3mutA |
| GGGGSGGGGGGGGSGGGGSGGGGS | 4111 | FLV_P10273_3mutA |
| EAAAKEAAAKEAAAKEAAAK | 4128 | MLVBM_Q7SVK7_3mutA_WS |
| GGSGSSPAP | 4181 | BAEVM_P10272_3mutA |
| EAAAKEAAAKEAAAKEAAAKEAAAK | 4129 | XMRV6_A1Z651_3mutA |
| GGGGSGGGGSGGGGSGGGGSGGGGS | 4111 | MLVBM_Q7SVK7_3mutA_WS |
| GGSGSS | 4139 | WMSV_P03359_3mutA |
| PAPEAAAK | 4156 | MLVCB_P08361_3mutA |
| EAAAKPAP | 4155 | BAEVM_P10272_3mutA |
| GSSPAP | 4153 | PERV_Q4VFZ2_3mutA_WS |
| GGGPAP | 4149 | PERV_Q4VFZ2_3mutA_WS |
| EAAAKGGSGSS | 4179 | MLVMS_P03355_3mutA_WS |
| EAAAKGGGGSEAAAK | 4219 | AVIRE_P03360_3mutA |
| GGSGGG | 4137 | KORV_Q9TTC1-Pro_3mutA |
| GSSPAP | 4153 | MLVFF_P26809_3mutA |
| GGSGSSEAAAK | 4175 | BAEVM_P10272_3mutA |
| PAPGSSGGS | 4186 | BAEVM_P10272_3mutA |
| GGGGGG | 4116 | MLVFF_P26809_3mutA |
| PAPGGSEAAAK | 4191 | MLVMS_P03355_PLV919 |
| PAPGGS | 4144 | MLVMS_P03355_PLV919 |
| GGSGGSGGSGGS | 4104 | BAEVM_P10272_3mutA |
| GSSPAP | 4153 | MLVCB_P08361_3mutA |
| PAPAPAPAP | 4134 | MLVMS_P03355_3mutA_WS |
| GGGGGG | 4116 | MLVCB_P08361_3mutA |
| GSSGSSGSSGSSGSSGSS | 4124 | KORV_Q9TTC1-Pro_3mutA |
| GSSEAAAKGGS | 4178 | BAEVM_P10272_3mutA |
| GGSEAAAK | 4141 | FLV_P10273_3mutA |
| GGSGGSGGSGGSGGS | 4105 | KORV_Q9TTC1-Pro_3mutA |
| GSSPAPEAAAK | 4212 | PERV_Q4VFZ2_3mut |
| GSSGSSGSSGSSGSS | 4123 | XMRV6_A1Z651_3mutA |
| EAAAKPAPGGS | 4190 | MLVMS_P03355_3mut |
| SGGSSGGSSGSETPGTSESATPESSGGSSGGSS | 4006 | FLV_P10273_3mut |
| GGSPAPEAAAK | 4188 | XMRV6_A1Z651_3mut |
| EAAAKGGSGGG | 4167 | MLVFF_P26809_3mutA |
| EAAAKEAAAKEAAAKEAAAK | 4128 | MLVFF_P26809_3mutA |
| GSSPAP | 4153 | WMSV_P03359_3mutA |
| PAPAPAPAP | 4134 | MLVAV_P03356_3mutA |
| PAPGGSEAAAK | 4191 | KORV_Q9TTC1_3mut |
| GGSGSSEAAAK | 4175 | MLVBM_Q7SVK7_3mutA_WS |
| GSSGGG | 4146 | MLVCB_P08361_3mutA |
| GGGEAAAKGSS | 4194 | PERV_Q4VFZ2_3mut |
| PAPGGSGGG | 4173 | MLVFF_P26809_3mutA |
| AEAAAKEAAAKEAAAKEAAAKALEAEAAAKEAAAKEAAAKEAAAKA | 4217 | FFV_O93209 |
| PAPGGGGSS | 4203 | MLVMS_P03355_3mutA_WS |
| EAAAKGGS | 4142 | MLVAV_P03356_3mutA |
| EAAAKEAAAKEAAAKEAAAKEAAAKEAAAK | 4130 | MLVBM_Q7SVK7_3mutA_WS |
| GGSGGSGGS | 4103 | WMSV_P03359_3mutA |
| PAPAP | 4132 | MLVMS_P03355_3mutA_WS |
| GSSGGGEAAAK | 4195 | MLVAV_P03356_3mutA |
| GGGGSSEAAAK | 4193 | MLVFF_P26809_3mutA |
| EAAAKGSSGGS | 4180 | MLVMS_P03355_PLV919 |
| EAAAKGGGGSEAAAK | 4219 | MLVMS_P03355_3mutA_WS |
| GGGGGGGG | 4118 | MLVMS_P03355_PLV919 |
| GSSGSSGSS | 4121 | MLVMS_P03355_PLV919 |
| GGGEAAAKPAP | 4205 | PERV_Q4VFZ2_3mutA_WS |
| GGGGGSGSS | 4159 | MLVMS_P03355_3mutA_WS |
| GGGGGGG | 4117 | MLVMS_P03355_PLV919 |
| GGS | | MLVMS_P03355_PLV919 |
| GSSGGG | 4146 | MLVMS_P03355_3mutA_WS |
| EAAAKGGSGSS | 4179 | PERV_Q4VFZ2_3mutA_WS |
| PAPGSSEAAAK | 4215 | MLVMS_P03355_PLV919 |
| GSSEAAAKPAP | 4211 | MLVMS_P03355_PLV919 |
| GGSPAPGSS | 4182 | BAEVM_P10272_3mutA |
| GSAGSAAGSGEF | 4221 | MLVCB_P08361_3mut |
| GGSPAPGGG | 4170 | PERV_Q4VFZ2_3mut |
| GGGGSGGGGSGGGGSGGGGS | 4110 | MLVMS_P03355_3mut |
| GSSGSSGSS | 4121 | PERV_Q4VFZ2_3mutA_WS |
| EAAAKEAAAKEAAAKEAAAKEAAAKEAAAK | 4130 | PERV_Q4VFZ2_3mut |
| GGGGSEAAAKGGGGS | 4218 | MLVCB_P08361_3mutA |
| GGSEAAAKGSS | 4176 | MLVAV_P03356_3mutA |
| EAAAKGGGGSEAAAK | 4219 | MLVCB_P08361_3mut |
| EAAAKEAAAKEAAAKEAAAKEAAAKEAAAK | 4130 | XMRV6_A1Z651_3mutA |
| PAPGGGEAAAK | 4209 | MLVMS_P03355_3mutA_WS |
| GSSGGGEAAAK | 4195 | PERV_Q4VFZ2_3mutA_WS |
| GSSGSS | 4120 | MLVCB_P08361_3mut |
| PAPAPAPAPAPAP | 4136 | PERV_Q4VFZ2_3mut |
| GGSPAPGGG | 4170 | MLVFF_P26809_3mutA |
| GGSGGSGGSGGSGGS | 4105 | MLVCB_P08361_3mutA |
| EAAAKEAAAK | 4126 | MLVFF_P26809_3mutA |
| AEAAAKEAAAKEAAAKEAAAKALEAEAAAKEAAAKEAAAKEAAAKA | 4217 | GALV_P21414_3mut |
| PAPAPAPAPAPAP | 4136 | WMSV_P03359_3mutA |
| GGGEAAAKGGS | 4166 | KORV_Q9TTC1_3mutA |
| EAAAKGGGPAP | 4207 | KORV_Q9TTC1_3mut |
| PAPEAAAKGSS | 4216 | MLVBM_Q7SVK7_3mutA_WS |
| PAPEAAAKGSS | 4216 | FLV_P10273_3mutA |
| PAPGGSEAAAK | 4191 | MLVMS_P03355_3mut |
| GSSPAPGGG | 4202 | BAEVM_P10272_3mutA |
| GGGEAAAKPAP | 4205 | KORV_Q9TTC1-Pro_3mutA |
| GGGGSGGGGS | 4108 | MLVMS_P03355_PLV919 |
| GGGEAAAKGSS | 4194 | MLVFF_P26809_3mutA |
| PAPGGGGSS | 4203 | MLVBM_Q7SVK7_3mutA_WS |
| GSSEAAAK | 4151 | BAEVM_P10272_3mutA |
| GGGGGGGG | 4118 | MLVMS_P03355_PLV919 |
| PAPGSSGGS | 4186 | MLVAV_P03356_3mutA |
| GGGGSGGGGSGGGGSGGGGS | 4110 | BAEVM_P10272_3mutA |
| PAP | | MLVMS_P03355_3mut |
| EAAAKGSSPAP | 4213 | XMRV6_A1Z651_3mutA |
| PAPEAAAKGGS | 4192 | MLVFF_P26809_3mutA |
| GSSGGGEAAAK | 4195 | BAEVM_P10272_3mutA |
| PAPAPAP | 4133 | MLVMS_P03355_3mutA_WS |
| GGSEAAAKGGG | 4164 | MLVMS_P03355_PLV919 |
| GSSEAAAK | 4151 | PERV_Q4VFZ2_3mut |
| GGGG | 4114 | MLVMS_P03355_3mutA_WS |
| GGGGGS | 4138 | MLVMS_P03355_3mut |
| GGGGSSEAAAK | 4193 | PERV_Q4VFZ2_3mut |
| EAAAKEAAAKEAAAKEAAAKEAAAKEAAAK | 4130 | SFV3L_P27401-Pro_2mutA |
| GGSEAAAKGSS | 4176 | MLVMS_P03355_3mutA_WS |
| PAPGSSGGS | 4186 | XMRV6_A1Z651_3mutA |
| GGSPAP | 4143 | MLVMS_P03355_3mutA_WS |
| GGGGSSEAAAK | 4193 | BAEVM_P10272_3mut |
| GGSGGSGGSGGS | 4104 | AVIRE_P03360_3mutA |
| PAPGSSGGS | 4186 | MLVFF_P26809_3mutA |
| GSSPAPGGG | 4202 | MLVMS_P03355_3mutA_WS |
| GGGGGGG | 4117 | MLVMS_P03355_3mutA_WS |
| EAAAKGGGGGS | 4168 | MLVMS_P03355_3mutA_WS |
| EAAAKGGSGGG | 4167 | MLVMS_P03355_PLV919 |
| GGGGSSEAAAK | 4193 | XMRV6_A1Z651_3mutA |
| GGGGSEAAAKGGGGS | 4218 | MLVBM_Q7SVK7_3mutA_WS |
| GSSGSS | 4120 | MLVMS_P03355_PLV919 |
| GGSGGG | 4137 | MLVMS_P03355_PLV919 |
| PAPEAAAKGGG | 4210 | AVIRE_P03360_3mutA |
| AEAAAKEAAAKEAAAKEAAAKALEAEAAAKEAAAKEAAAKEAAAKA | 4217 | FOAMV_P14350-Pro_2mutA |
| GGGGGSGSS | 4159 | PERV_Q4VFZ2_3mut |
| GSSGSSGSSGSSGSS | 4123 | KORV_Q9TTC1-Pro_3mut |
| GGGGSEAAAKGGGGS | 4218 | MLVMS_P03355_3mutA_WS |
| GGGGGSPAP | 4171 | FLV_P10273_3mut |
| GGGEAAAK | 4147 | MLVMS_P03355_3mutA_WS |
| GGSGGSGGSGGS | 4104 | FLV_P10273_3mutA |
| GGG | | MLVMS_P03355_PLV919 |
| GGSPAPEAAAK | 4188 | BAEVM_P10272_3mutA |
| EAAAKEAAAK | 4126 | FLV_P10273_3mutA |
| GGGEAAAKPAP | 4205 | BAEVM_P10272_3mutA |
| GGGEAAAKGGS | 4166 | PERV_Q4VFZ2_3mut |
| GGSGGSGGS | 4103 | PERV_Q4VFZ2_3mut |
| EAAAKGGGPAP | 4207 | XMRV6_A1Z651_3mutA |
| EAAAK | 4028 | MLVBM_Q7SVK7_3mutA_WS |
| PAPEAAAKGGG | 4210 | PERV_Q4VFZ2_3mut |
| EAAAKGSS | 4152 | MLVCB_P08361_3mutA |
| GGSEAAAKGGG | 4164 | MLVBM_Q7SVK7_3mutA_WS |
| GGGGSGGGGSGGGGSGGGGS | 4110 | XMRV6_A1Z651_3mutA |
| GGGGSGGGGSGGGGSGGGGSGGGGS | 4111 | BAEVM_P10272_3mut |
| GGGGSSPAP | 4199 | PERV_Q4VFZ2_3mutA_WS |
| GGSGGSGGSGGSGGSGGS | 4106 | PERV_Q4VFZ2_3mut |
| GGGEAAAKPAP | 4205 | PERV_Q4VFZ2_3mut |
| EAAAKEAAAK | 4126 | BAEVM_P10272_3mutA |
| GGSGSSEAAAK | 4175 | XMRV6_A1Z651_3mutA |
| PAPEAAAKGSS | 4216 | WMSV_P03359_3mutA |
| PAPAPAPAPAP | 4135 | XMRV6_A1Z651_3mutA |
| GSSGGGEAAAK | 4195 | MLVMS_P03355_PLV919 |
| GSSPAPGGG | 4202 | MLVFF_P26809_3mutA |
| GGSPAPEAAAK | 4188 | MLVFF_P26809_3mut |
| PAPGGSEAAAK | 4191 | PERV_Q4VFZ2_3mut |
| GGGGSS | 4145 | MLVFF_P26809_3mutA |
| GGSGSSGGG | 4158 | BAEVM_P10272_3mutA |
| GSSGGGEAAAK | 4195 | MLVMS_P03355_3mutA_WS |
| EAAAKGGS | 4142 | MLVBM_Q7SVK7_3mutA_WS |
| GGGPAPGGS | 4172 | MLVMS_P03355_PLV919 |
| EAAAKEAAAK | 4126 | MLVMS_P03355_PLV919 |
| GSSGSSGSS | 4121 | MLVMS_P03355_PLV919 |
| GGGEAAAKPAP | 4205 | MLVAV_P03356_3mutA |
| SGSETPGTSESATPES | 4220 | FLV_P10273_3mutA |
| PAPAPAPAPAP | 4135 | KORV_Q9TTC1-Pro_3mut |
| AEAAAKEAAAKEAAAKEAAAKALEAEAAAKEAAAKEAAAKEAAAKA | 4217 | BAEVM_P10272_3mutA |
| PAPGSSGGG | 4204 | MLVMS_P03355_3mutA_WS |
| GSSGGGEAAAK | 4195 | XMRV6_A1Z651_3mutA |
| GGGGSGGGGSGGGGSGGGGSGGGGS | 4111 | XMRV6_A1Z651_3mutA |
| GGGGSSPAP | 4199 | MLVFF_P26809_3mutA |
| GGSGGGPAP | 4169 | PERV_Q4VFZ2_3mutA_WS |
| GSS | | PERV_Q4VFZ2_3mut |
| EAAAKGSSPAP | 4213 | MLVMS_P03355_3mut |
| EAAAKGGG | 4148 | XMRV6_A1Z651_3mutA |
| GSSGSSGSSGSS | 4122 | WMSV_P03359_3mutA |
| PAPEAAAKGSS | 4216 | MLVMS_P03355_PLV919 |
| GSSEAAAK | 4151 | AVIRE_P03360_3mutA |
| EAAAKGGSGSS | 4179 | AVIRE_P03360_3mutA |
| GSSEAAAK | 4151 | MLVMS_P03355_3mut |
| GGSGSSEAAAK | 4175 | MLVMS_P03355_PLV919 |
| GGSEAAAKGGG | 4164 | MLVFF_P26809_3mutA |
| GGGGSGGGGGGGGSGGGGS | 4110 | MLVAV_P03356_3mutA |
| PAPAPAPAPAPAP | 4136 | MLVFF_P26809_3mut |
| EAAAKPAPGSS | 4214 | KORV_Q9TTC1-Pro_3mut |
| PAPGSSEAAAK | 4215 | MLVAV_P03356_3mutA |
| GGGGSSPAP | 4199 | WMSV_P03359_3mutA |
| EAAAKGGGGGS | 4168 | MLVMS_P03355_3mutA_WS |
| GGGEAAAKGGS | 4166 | MLVMS_P03355_3mut |
| GGSGSSGGG | 4158 | MLVMS_P03355_3mut |
| GGGPAPGGS | 4172 | MLVAV_P03356_3mutA |
| PAPGGGGGS | 4174 | MLVMS_P03355_PLV919 |
| GGGPAPGSS | 4200 | PERV_Q4VFZ2_3mut |
| GGGGGGG | 4117 | MLVFF_P26809_3mutA |
| GGSGGGGSS | 4157 | MLVCB_P08361_3mutA |
| GGGGGG | 4116 | FLV_P10273_3mutA |
| GGSEAAAKGSS | 4176 | PERV_Q4VFZ2_3mut |
| GGSPAPGGG | 4170 | BAEVM_P10272_3mutA |
| GGSPAPGSS | 4182 | AVIRE_P03360_3mutA |
| GGSGGSGGSGGS | 4104 | KORV_Q9TTC1_3mut |
| EAAAKEAAAKEAAAKEAAAKEAAAK | 4129 | MLVBM_Q7SVK7_3mut |
| PAPGSSGGS | 4186 | XMRV6_A1Z651_3mut |
| EAAAKGGGGSS | 4197 | PERV_Q4VFZ2_3mutA_WS |
| GGSGGSGGSGGSGGS | 4105 | PERV_Q4VFZ2_3mutA_WS |
| PAPGGSGGG | 4173 | MLVMS_P03355_PLV919 |
| PAPGSSGGG | 4204 | PERV_Q4VFZ2_3mutA_WS |
| GSSGSS | 4120 | BAEVM_P10272_3mutA |
| EAAAKGSS | 4152 | MLVFF_P26809_3mutA |
| GGGPAP | 4149 | MLVMS_P03355_PLV919 |
| EAAAKGGGGGS | 4168 | MLVFF_P26809_3mutA |
| EAAAKGGSPAP | 4189 | MLVBM_Q7SVK7_3mutA_WS |
| EAAAKEAAAKEAAAKEAAAKEAAAKEAAAK | 4130 | WMSV_P03359_3mutA |
| GSSPAPGGG | 4202 | MLVBM_Q7SVK7_3mutA_WS |
| GGGEAAAKGSS | 4194 | AVIRE_P03360_3mutA |
| GGGGSSEAAAK | 4193 | AVIRE_P03360_3mutA |
| GGGGGGGG | 4118 | PERV_Q4VFZ2_3mutA_WS |
| PAPGSSEAAAK | 4215 | BAEVM_P10272_3mutA |
| EAAAKGSS | 4152 | MLVFF_P26809_3mut |
| GSSEAAAKGGG | 4196 | MLVCB_P08361_3mutA |
| GGSEAAAK | 4141 | MLVBM_Q7SVK7_3mutA_WS |
| GSSEAAAKGGG | 4196 | PERV_Q4VFZ2_3mutA_WS |
| PAPGGSGGG | 4173 | WMSV_P03359_3mutA |
| GSSGGSGGG | 4161 | MLVCB_P08361_3mutA |
| EAAAKGSSGGG | 4198 | FLV_P10273_3mutA |
| GSSEAAAK | 4151 | MLVCB_P08361_3mutA |
| GSSGGGEAAAK | 4195 | MLVMS_P03355_3mut |
| GGGGSGGGGS | 4108 | MLVCB_P08361_3mutA |
| EAAAKGGGGSEAAAK | 4219 | MLVBM_Q7SVK7_3mutA_WS |
| EAAAKGGG | 4148 | PERV_Q4VFZ2_3mutA_WS |
| EAAAKGGSPAP | 4189 | MLVMS_P03355_PLV919 |
| GGGPAPGGS | 4172 | AVIRE_P03360_3mutA |
| GSSEAAAK | 4151 | MLVBM_Q7SVK7_3mutA_WS |
| GSSGGGEAAAK | 4195 | PERV_Q4VFZ2_3mut |
| SGSETPGTSESATPES | 4220 | MLVMS_P03355_PLV919 |
| GGSGSSPAP | 4181 | MLVMS_P03355_3mut |
| GGGGGG | 4116 | MLVBM_Q7SVK7_3mutA_WS |
| GGSPAPGGG | 4170 | XMRV6_A1Z651_3mutA |
| GGSGSS | 4139 | PERV_Q4VFZ2_3mutA_WS |
| PAP | | MLVBM_Q7SVK7_3mutA_WS |
| EAAAKPAPGSS | 4214 | MLVMS_P03355_PLV919 |
| EAAAKGGG | 4148 | MLVMS_P03355_3mut |
| GSSEAAAKPAP | 4211 | PERV_Q4VFZ2_3mutA_WS |
| GGGGSS | 4145 | MLVMS_P03355_3mutA_WS |
| GGSGSSEAAAK | 4175 | PERV_Q4VFZ2_3mut |
| GGGGSS | 4145 | BAEVM_P10272_3mutA |
| PAPAP | 4132 | MLVFF_P26809_3mut |
| PAPEAAAKGGG | 4210 | BAEVM_P10272_3mutA |
| EAAAKGGS | 4142 | MLVMS_P03355_PLV919 |
| PAPAPAPAPAPAP | 4136 | PERV_Q4VFZ2_3mutA_WS |
| GGGGGSEAAAK | 4165 | MLVMS_P03355_3mut |
| PAPGGS | 4144 | PERV_Q4VFZ2_3mut |
| GGGGSS | 4145 | MLVCB_P08361_3mutA |
| GGGGS | 4027 | MLVAV_P03356_3mutA |
| GSSPAPEAAAK | 4212 | MLVMS_P03355_PLV919 |
| GGGGSSGGS | 4160 | MLVFF_P26809_3mutA |
| PAPEAAAKGSS | 4216 | MLVMS_P03355_PLV919 |
| GGSGSSEAAAK | 4175 | MLVMS_P03355_3mutA_WS |
| EAAAKGGG | 4148 | MLVAV_P03356_3mutA |
| PAPGSSEAAAK | 4215 | FLV_P10273_3mutA |
| EAAAKGSSGGG | 4198 | MLVCB_P08361_3mutA |
| PAPEAAAK | 4156 | KORV_Q9TTC1-Pro_3mutA |
| GGSPAPEAAAK | 4188 | KORV_Q9TTC1-Pro_3mut |
| GGSGGSGGSGGSGGSGGS | 4106 | MLVAV_P03356_3mutA |
| GSSEAAAKPAP | 4211 | MLVBM_Q7SVK7_3mutA_WS |
| AEAAAKEAAAKEAAAKEAAAKALEAEAAAKEAAAKEAAAKEAAAKA | 4217 | KORV_Q9TTC1-Pro_3mutA |
| GSSGGGEAAAK | 4195 | XMRV6_A1Z651_3mut |
| PAPGGSGGG | 4173 | AVIRE_P03360_3mutA |
| PAPGGSEAAAK | 4191 | PERV_Q4VFZ2_3mutA_WS |
| GGGGS | 4027 | MLVMS_P03355_3mutA_WS |
| GGGGSGGGGSGGGGS | 4109 | MLVBM_Q7SVK7_3mutA_WS |
| PAPAPAPAPAP | 4135 | PERV_Q4VFZ2_3mutA_WS |
| EAAAKEAAAKEAAAKEAAAKEAAAK | 4129 | MLVMS_P03355_3mut |
| GSSGGSEAAAK | 4177 | MLVMS_P03355_3mutA_WS |
| GGSGGSGGSGGS | 4104 | WMSV_P03359_3mutA |
| EAAAKGSSGGG | 4198 | WMSV_P03359_3mutA |
| EAAAKGGG | 4148 | PERV_Q4VFZ2_3mutA_WS |
| SGSETPGTSESATPES | 4220 | PERV_Q4VFZ2_3mut |
| PAPGSSGGS | 4186 | MLVMS_P03355_3mutA_WS |
| PAPEAAAKGSS | 4216 | PERV_Q4VFZ2_3mut |
| PAPEAAAK | 4156 | AVIRE_P03360_3mutA |
| GSSEAAAKGGG | 4196 | BAEVM_P10272_3mutA |
| GSSPAP | 4153 | MLVAV_P03356_3mutA |
| EAAAKEAAAKEAAAKEAAAK | 4128 | MLVFF_P26809_3mut |
| PAPGGSGSS | 4185 | MLVAV_P03356_3mutA |
| GGGGSGGGGSGGGGS | 4109 | PERV_Q4VFZ2_3mutA_WS |
| GSSGGSEAAAK | 4177 | MLVCB_P08361_3mutA |
| EAAAKGGS | 4142 | KORV_Q9TTC1-Pro_3mutA |
| EAAAKGGS | 4142 | MLVFF_P26809_3mutA |
| GGSPAP | 4143 | MLVMS_P03355_PLV919 |
| GGSGSS | 4139 | MLVMS_P03355_PLV919 |
| SGSETPGTSESATPES | 4220 | WMSV_P03359_3mut |
| GGGGGGG | 4117 | WMSV_P03359_3mut |
| GGSPAPGSS | 4182 | MLVCB_P08361_3mutA |
| GGGGSSGGS | 4160 | WMSV_P03359_3mut |
| PAPGGS | 4144 | MLVMS_P03355_PLV919 |
| PAPGSSGGS | 4186 | MLVCB_P08361_3mutA |
| EAAAKEAAAKEAAAKEAAAKEAAAK | 4129 | MLVFF_P26809_3mut |
| SGGSSGGSSGSETPGTSESATPESSGGSSGGSS | 4006 | PERV_Q4VFZ2_3mut |
| GGSGGSGGSGGSGGS | 4105 | BAEVM_P10272_3mutA |
| GSSEAAAK | 4151 | PERV_Q4VFZ2_3mut |
| EAAAKEAAAKEAAAKEAAAK | 4128 | KORV_Q9TTC1-Pro_3mutA |
| GGSGGSGGSGGSGGS | 4105 | MLVMS_P03355_3mut |
| PAPAPAPAPAPAP | 4136 | MLVMS_P03355_3mut |
| GGSPAPEAAAK | 4188 | MLVMS_P03355_PLV919 |
| EAAAK | 4028 | WMSV_P03359_3mutA |
| EAAAKGSSGGS | 4180 | MLVBM_Q7SVK7_3mutA_WS |
| GGSGGGGSS | 4157 | MLVMS_P03355_3mutA_WS |
| GGGEAAAKPAP | 4205 | MLVMS_P03355_3mut |
| EAAAKGGSGGG | 4167 | XMRV6_A1Z651_3mutA |
| GGGGGSEAAAK | 4165 | KORV_Q9TTC1-Pro_3mutA |
| GGGGGG | 4116 | BAEVM_P10272_3mutA |
| GGGGGG | 4116 | MLVMS_P03355_3mut |
| GGGGGGG | 4117 | MLVBM_Q7SVK7_3mutA_WS |
| AEAAAKEAAAKEAAAKEAAAKALEAEAAAKEAAAKEAAAKEAAAKA | 4217 | AVIRE_P03360 |
| PAPGSSGGS | 4186 | PERV_Q4VFZ2_3mut |
| GGGGGS | 4138 | XMRV6_A1Z651_3mut |
| EAAAKPAP | 4155 | XMRV6_A1Z651_3mutA |
| GGG | | MLVMS_P03355_3mutA_WS |
| AEAAAKEAAAKEAAAKEAAAKALEAEAAAKEAAAKEAAAKEAAAKA | 4217 | FLV_P10273_3mut |
| EAAAKGSSPAP | 4213 | MLVMS_P03355_3mut |
| SGSETPGTSESATPES | 4220 | BAEVM_P10272_3mutA |
| GGSPAPEAAAK | 4188 | MLVMS_P03355_3mut |
| GSSGSSGSSGSS | 4122 | MLVAV_P03356_3mutA |
| AEAAAKEAAAKEAAAKEAAAKALEAEAAAKEAAAKEAAAKEAAAKA | 4217 | MLVMS_P03355_3mut |
| GGSPAP | 4143 | MLVCB_P08361_3mutA |
| GGGGGSEAAAK | 4165 | MLVMS_P03355_3mutA_WS |
| GGGGG | 4115 | MLVFF_P26809_3mutA |
| GSSEAAAK | 4151 | MLVAV_P03356_3mutA |
| GGS | | BAEVM_P10272_3mut |
| EAAAKGGSPAP | 4189 | MLVCB_P08361_3mutA |
| PAPAPAPAP | 4134 | FLV_P10273_3mutA |
| PAPGGGEAAAK | 4209 | MLVCB_P08361_3mutA |
| GGGGSSEAAAK | 4193 | MLVMS_P03355_3mutA_WS |
| GGGGG | 4115 | PERV_Q4VFZ2_3mutA_WS |
| GGSGGSGGSGGSGGSGGS | 4106 | PERV_Q4VFZ2_3mut |
| GGGGG | 4115 | MLVMS_P03355_3mut |
| PAPEAAAKGGG | 4210 | MLVBM_Q7SVK7_3mutA_WS |
| GSSGGGPAP | 4201 | XMRV6_A1Z651_3mutA |
| GSSGSSGSSGSSGSSGSS | 4124 | PERV_Q4VFZ2_3mutA_WS |
| EAAAKGGSPAP | 4189 | PERV_Q4VFZ2_3mut |
| GSSGGSEAAAK | 4177 | MLVMS_P03355_PLV919 |
| GSS | | PERV_Q4VFZ2_3mut |
| EAAAKGGS | 4142 | WMSV_P03359_3mutA |
| GGGGGSPAP | 4171 | PERV_Q4VFZ2_3mutA_WS |
| EAAAKGSS | 4152 | MLVMS_P03355_PLV919 |
| EAAAKGGGGSS | 4197 | KORV_Q9TTC1-Pro_3mutA |
| PAPGSSGGG | 4204 | PERV_Q4VFZ2_3mut |
| GGGGSSEAAAK | 4193 | MLVFF_P26809_3mut |
| PAPAPAP | 4133 | MLVMS_P03355_3mut |
| GSSGGSEAAAK | 4177 | XMRV6_A1Z651_3mut |
| PAPEAAAKGSS | 4216 | MLVMS_P03355_3mutA_WS |
| GGSGGSGGSGGSGGS | 4105 | MLVMS_P03355_3mutA_WS |
| GGSGSSPAP | 4181 | XMRV6_A1Z651_3mutA |
| GGGGSSPAP | 4199 | MLVMS_P03355_PLV919 |
| GGGGS | 4027 | MLVCB_P08361_3mutA |
| EAAAKEAAAKEAAAKEAAAK | 4128 | PERV_Q4VFZ2_3mutA_WS |
| EAAAKEAAAK | 4126 | KORV_Q9TTC1_3mutA |
| PAPGGGEAAAK | 4209 | BAEVM_P10272_3mutA |
| GSSGGSEAAAK | 4177 | XMRV6_A1Z651_3mutA |
| EAAAKEAAAKEAAAKEAAAKEAAAKEAAAK | 4130 | FLV_P10273_3mut |
| GSSEAAAKPAP | 4211 | MLVMS_P03355_3mutA_WS |
| EAAAKPAPGSS | 4214 | PERV_Q4VFZ2_3mutA_WS |
| GSSGGSPAP | 4183 | XMRV6_A1Z651_3mutA |
| GSSEAAAKGGG | 4196 | PERV_Q4VFZ2_3mut |
| GGGEAAAKGGS | 4166 | WMSV_P03359_3mutA |
| GSSEAAAKGGG | 4196 | MLVFF_P26809_3mut |
| PAPAPAP | 4133 | KORV_Q9TTC1-Pro_3mutA |
| EAAAKGGSPAP | 4189 | MLVMS_P03355_3mutA_WS |
| PAPGGSEAAAK | 4191 | PERV_Q4VFZ2_3mut |
| GGGGS | 4027 | MLVBM_Q7SVK7_3mutA_WS |
| EAAAKGSSGGG | 4198 | KORV_Q9TTC1_3mut |
| EAAAKGGGPAP | 4207 | MLVCB_P08361_3mutA |
| EAAAKGSS | 4152 | BAEVM_P10272_3mutA |
| GGSPAPGGG | 4170 | MLVBM_Q7SVK7_3mutA_WS |
| GGGGSEAAAKGGGGS | 4218 | MLVMS_P03355_3mutA_WS |
| GGGEAAAKGGS | 4166 | PERV_Q4VFZ2_3mutA_WS |
| EAAAKGGGGSS | 4197 | MLVMS_P03355_3mutA_WS |
| EAAAKGGGPAP | 4207 | MLVFF_P26809_3mut |
| GSSPAP | 4153 | PERV_Q4VFZ2_3mutA_WS |
| EAAAKGGS | 4142 | MLVMS_P03355_3mut |
| GGGGSS | 4145 | KORV_Q9TTC1-Pro_3mutA |
| EAAAKGSSPAP | 4213 | MLVMS_P03355_3mutA_WS |
| GGGPAP | 4149 | PERV_Q4VFZ2_3mut |
| EAAAKGSSGGS | 4180 | XMRV6_A1Z651_3mutA |
| PAPGGG | 4150 | MLVAV_P03356_3mutA |
| GSSPAPEAAAK | 4212 | BAEVM_P10272_3mutA |
| GGGPAP | 4149 | MLVBM_Q7SVK7_3mutA_WS |
| GSSGGGGGS | 4162 | AVIRE_P03360_3mutA |
| SGSETPGTSESATPES | 4220 | MLVMS_P03355_PLV919 |
| GGGPAP | 4149 | MLVFF_P26809_3mut |
| EAAAKGGGGSS | 4197 | XMRV6_A1Z651_3mutA |
| GGGGSSPAP | 4199 | XMRV6_A1Z651_3mut |
| GGGGSEAAAKGGGGS | 4218 | MLVMS_P03355_3mut |
| GSSPAP | 4153 | MLVBM_Q7SVK7_3mutA_WS |
| GGSGSSEAAAK | 4175 | FLV_P10273_3mutA |
| SGSETPGTSESATPES | 4220 | MLVBM_Q7SVK7_3mutA_WS |
| PAPGGG | 4150 | AVIRE_P03360_3mutA |
| GGGEAAAKPAP | 4205 | MLVMS_P03355_3mutA_WS |
| EAAAKGGSGSS | 4179 | PERV_Q4VFZ2_3mut |
| GGSPAPGGG | 4170 | MLVAV_P03356_3mutA |
| PAPGGSGSS | 4185 | BAEVM_P10272_3mutA |
| GSSGGSPAP | 4183 | MLVFF_P26809_3mutA |
| EAAAKGSSGGG | 4198 | PERV_Q4VFZ2_3mut |
| GGGGSGGGGS | 4108 | PERV_Q4VFZ2_3mutA_WS |
| GSSGGGGGS | 4162 | BAEVM_P10272_3mutA |
| GGGGSSGGS | 4160 | MLVBM_Q7SVK7_3mutA_WS |
| EAAAKGGS | 4142 | PERV_Q4VFZ2_3mutA_WS |
| GSSGSSGSSGSS | 4122 | MLVMS_P03355_3mut |
| GGS | | MLVMS_P03355_3mutA_WS |
| GSSGGSEAAAK | 4177 | MLVBM_Q7SVK7_3mutA_WS |
| SGGSSGGSSGSETPGTSESATPESSGGSSGGSS | 4006 | XMRV6_A1Z651 |
| GGGGG | 4115 | FLV_P10273_3mutA |
| PAPEAAAKGSS | 4216 | PERV_Q4VFZ2_3mut |
| GGGGGG | 4116 | WMSV_P03359_3mut |
| EAAAKGGG | 4148 | BAEVM_P10272_3mutA |
| GGGGSS | 4145 | MLVMS_P03355_3mutA_WS |
| GSSGGGEAAAK | 4195 | KORV_Q9TTC1_3mut |
| GGSGSS | 4139 | AVIRE_P03360_3mutA |
| EAAAKPAP | 4155 | MLVMS_P03355_3mut |
| EAAAKEAAAKEAAAK | 4127 | FLV_P10273_3mutA |
| GGGG | 4114 | XMRV6_A1Z651_3mutA |
| GSSPAPGGS | 4184 | BAEVM_P10272_3mutA |
| GSSGGGGGS | 4162 | MLVFF_P26809_3mutA |
| GGGGSSGGS | 4160 | MLVAV_P03356_3mutA |
| GGS | | PERV_Q4VFZ2_3mut |
| GGGGG | 4115 | WMSV_P03359_3mutA |
| GSSGSSGSSGSSGSSGSS | 4124 | FLV_P10273_3mutA |
| PAPGGGGSS | 4203 | MLVAV_P03356_3mutA |
| GGGGGGGG | 4118 | BAEVM_P10272_3mutA |
| SGSETPGTSESATPES | 4220 | MLVCB_P08361_3mutA |
| PAPGGG | 4150 | BAEVM_P10272_3mutA |
| GSSGSSGSS | 4121 | MLVCB_P08361_3mutA |
| GGSGSS | 4139 | MLVMS_P03355_3mutA_WS |
| EAAAKGGGGSEAAAK | 4219 | WMSV_P03359_3mutA |
| GGGGGGGG | 4118 | FLV_P10273_3mutA |
| GSSGSS | 4120 | MLVMS_P03355_3mutA_WS |
| PAPEAAAKGGS | 4192 | XMRV6_A1Z651_3mutA |
| EAAAKEAAAK | 4126 | MLVMS_P03355_3mut |
| GGGGSGGGGSGGGGS | 4109 | BAEVM_P10272_3mutA |
| EAAAKGSSPAP | 4213 | MLVMS_P03355_PLV919 |
| GGGGSSEAAAK | 4193 | MLVMS_P03355_3mut |
| GGGGSSEAAAK | 4193 | BAEVM_P10272_3mutA |
| PAPGGSGSS | 4185 | PERV_Q4VFZ2_3mut |
| GGSGGGEAAAK | 4163 | MLVFF_P26809_3mut |
| PAPEAAAKGGS | 4192 | PERV_Q4VFZ2_3mut |
| GGGPAPGSS | 4200 | AVIRE_P03360_3mut |
| PAPGGSGGG | 4173 | PERV_Q4VFZ2_3mutA_WS |
| GGGGGGGG | 4118 | PERV_Q4VFZ2_3mutA_WS |
| GSSEAAAK | 4151 | MLVMS_P03355_3mutA_WS |
| GGGGSGGGGSGGGGS | 4109 | PERV_Q4VFZ2_3mutA_WS |
| EAAAKGGS | 4142 | MLVMS_P03355_3mut |
| GGGGGSGSS | 4159 | MLVCB_P08361_3mut |
| GGGPAP | 4149 | KORV_Q9TTC1-Pro_3mutA |
| EAAAKPAPGGG | 4208 | MLVCB_P08361_3mut |
| GSSGGSPAP | 4183 | MLVCB_P08361_3mutA |
| SGGSSGGSSGSETPGTSESATPESSGGSSGGSS | 4006 | MLVMS_P03355_3mut |
| PAPAPAPAP | 4134 | MLVMS_P03355_3mut |
| GSSGGS | 4140 | XMRV6_A1Z651_3mutA |
| GSSEAAAKGGG | 4196 | MLVMS_P03355_3mut |
| GGSGSSPAP | 4181 | MLVMS_P03355_3mutA_WS |
| GSSEAAAKGGS | 4178 | MLVMS_P03355_PLV919 |
| EAAAKEAAAKEAAAKEAAAKEAAAK | 4129 | BAEVM_P10272_3mut |
| PAPGGGGSS | 4203 | KORV_Q9TTC1_3mutA |
| EAAAKGSS | 4152 | MLVMS_P03355_3mutA_WS |
| AEAAAKEAAAKEAAAKEAAAKALEAEAAAKEAAAKEAAAKEAAAKA | 4217 | FFV_O93209_2mut |
| GGSGGSGGSGGSGGSGGS | 4106 | BAEVM_P10272_3mutA |
| GGGGGG | 4116 | MLVMS_P03355_PLV919 |
| PAPEAAAK | 4156 | BAEVM_P10272_3mutA |
| GGSGSSEAAAK | 4175 | MLVAV_P03356_3mutA |
| GGG | | MLVCB_P08361_3mutA |
| GGGGG | 4115 | MLVCB_P08361_3mutA |
| GGSGGSGGSGGS | 4104 | KORV_Q9TTC1-Pro_3mutA |
| GSSGSSGSSGSSGSSGSS | 4124 | XMRV6_A1Z651_3mutA |
| GSSEAAAKPAP | 4211 | FLV_P10273_3mutA |
| GGGEAAAKPAP | 4205 | MLVCB_P08361_3mutA |
| GSSGSSGSS | 4121 | MLVMS_P03355_3mutA_WS |
| PAPAPAPAP | 4134 | MLVMS_P03355_PLV919 |
| EAAAKGGG | 4148 | MLVMS_P03355_PLV919 |
| PAPAPAPAPAPAP | 4136 | FLV_P10273_3mutA |
| EAAAKGGSGSS | 4179 | MLVMS_P03355_3mut |
| GGGGGG | 4116 | PERV_Q4VFZ2_3mutA_WS |
| PAPGGG | 4150 | MLVCB_P08361_3mutA |
| GGGGGSGSS | 4159 | KORV_Q9TTC1_3mutA |
| GGGGSGGGGSGGGGSGGGGS | 4110 | XMRV6_A1Z651_3mut |
| GGSGGSGGS | 4103 | KORV_Q9TTC1-Pro_3mutA |
| EAAAKPAPGGG | 4208 | MLVMS_P03355_3mutA_WS |
| AEAAAKEAAAKEAAAKEAAAKALEAEAAAKEAAAKEAAAKEAAAKA | 4217 | XMRV6_A1Z651 |
| GGGGGGGGSGGGGSGGGGSGGGGSGGGGS | 4112 | FLV_P10273_3mutA |
| EAAAKGGGGSEAAAK | 4219 | PERV_Q4VFZ2_3mutA_WS |
| GGGPAPGSS | 4200 | AVIRE_P03360_3mutA |
| GGGGG | 4115 | MLVMS_P03355_3mutA_WS |
| GGGGSGGGGSGGGGSGGGGSGGGGSGGGGS | 4112 | MLVMS_P03355_3mut |
| GGGGSGGGGS | 4108 | MLVMS_P03355_3mutA_WS |
| EAAAKGGSPAP | 4189 | XMRV6_A1Z651_3mutA |
| EAAAKGSSPAP | 4213 | AVIRE_P03360_3mutA |
| PAPGGSGSS | 4185 | KORV_Q9TTC1-Pro_3mutA |
| GSS | | MLVBM_Q7SVK7_3mutA_WS |
| GSS | | WMSV_P03359_3mut |
| GGGPAPGSS | 4200 | MLVFF_P26809_3mutA |
| EAAAKPAP | 4155 | MLVMS_P03355_3mut |
| GSSPAPEAAAK | 4212 | FLV_P10273_3mutA |
| GGSPAPGSS | 4182 | MLVBM_Q7SVK7_3mutA_WS |
| GGGGGSEAAAK | 4165 | XMRV6_A1Z651_3mut |
| PAPEAAAKGGG | 4210 | WMSV_P03359_3mutA |
| PAPGGG | 4150 | PERV_Q4VFZ2_3mut |
| GGSPAPEAAAK | 4188 | WMSV_P03359_3mutA |
| GGSGGGGSS | 4157 | PERV_Q4VFZ2_3mut |
| EAAAKGGGGSS | 4197 | PERV_Q4VFZ2_3mut |
| EAAAKGGSPAP | 4189 | AVIRE_P03360_3mut |
| GGSGGGGSS | 4157 | WMSV_P03359_3mutA |
| PAPGSSEAAAK | 4215 | MLVFF_P26809_3mut |
| GSSEAAAK | 4151 | MLVMS_P03355_PLV919 |
| GSAGSAAGSGEF | 4221 | AVIRE_P03360_3mutA |
| EAAAKGGSGSS | 4179 | MLVMS_P03355_3mut |
| GGSEAAAKPAP | 4187 | MLVMS_P03355_PLV919 |
| GGGGSGGGGSGGGGSGGGGSGGGGS | 4111 | MLVFF_P26809_3mutA |
| PAPGSSEAAAK | 4215 | PERV_Q4VFZ2_3mutA_WS |
| GGGGSSPAP | 4199 | MLVMS_P03355_3mutA_WS |
| PAPAPAP | 4133 | MLVCB_P08361_3mutA |
| EAAAKPAPGGG | 4208 | MLVBM_Q7SVK7_3mutA_WS |
| GGGPAPGSS | 4200 | BAEVM_P10272_3mutA |
| PAP | | MLVMS_P03355_3mutA_WS |
| PAPGGSGGG | 4173 | MLVMS_P03355_3mutA_WS |
| GGSGGSGGSGGSGGS | 4105 | MLVBM_Q7SVK7_3mutA_WS |
| PAPAPAPAP | 4134 | XMRV6_A1Z651_3mut |
| GSSPAPGGG | 4202 | MLVMS_P03355_3mutA_WS |
| GSSPAPGGG | 4202 | MLVMS_P03355_3mut |
| PAPGGG | 4150 | MLVMS_P03355_PLV919 |
| GGGEAAAKGSS | 4194 | WMSV_P03359_3mut |
| EAAAKGSS | 4152 | KORV_Q9TTC1-Pro_3mutA |
| EAAAKGGS | 4142 | PERV_Q4VFZ2_3mut |
| EAAAKEAAAKEAAAKEAAAKEAAAK | 4129 | PERV_Q4VFZ2_3mut |
| PAPEAAAKGGG | 4210 | MLVMS_P03355_PLV919 |
| EAAAKGSSGGG | 4198 | MLVFF_P26809_3mut |
| AEAAAKEAAAKEAAAKEAAAKALEAEAAAKEAAAKEAAAKEAAAKA | 4217 | PERV_Q4VFZ2 |
| EAAAKEAAAKEAAAKEAAAKEAAAKEAAAK | 4130 | MLVAV_P03356_3mutA |
| GSSGGSGGG | 4161 | MLVFF_P26809_3mut |
| GSSGSSGSSGSS | 4122 | PERV_Q4VFZ2_3mutA_WS |
| GGSPAPGGG | 4170 | MLVMS_P03355_PLV919 |
| GSS | | BAEVM_P10272_3mut |
| GGGPAPGSS | 4200 | MLVMS_P03355_3mutA_WS |
| GGGGSS | 4145 | KORV_Q9TTC1_3mutA |
| GSSGGSGGG | 4161 | BAEVM_P10272_3mutA |
| EAAAKEAAAKEAAAK | 4127 | MLVCB_P08361_3mutA |
| SGGSSGGSSGSETPGTSESATPESSGGSSGGSS | 4006 | FLV_P10273_3mutA |
| PAPGGGGGS | 4174 | PERV_Q4VFZ2_3mut |
| PAPAPAPAPAP | 4135 | KORV_Q9TTC1-Pro_3mutA |
| EAAAK | 4028 | MLVMS_P03355_3mutA_WS |
| GGG | | MLVCB_P08361_3mut |
| GGSEAAAKGGG | 4164 | BAEVM_P10272_3mutA |
| GGGGGSGSS | 4159 | MLVAV_P03356_3mutA |
| EAAAKGSSPAP | 4213 | MLVBM_Q7SVK7_3mutA_WS |
| GGSGGSGGS | 4103 | XMRV6_A1Z651_3mut |
| EAAAKPAPGGG | 4208 | KORV_Q9TTC1-Pro_3mutA |
| GGGPAPEAAAK | 4206 | FLV_P10273_3mutA |
| GGSPAPEAAAK | 4188 | MLVMS_P03355_3mutA_WS |
| GGSGGSGGSGGSGGS | 4105 | MLVFF_P26809_3mut |
| EAAAKGGSGSS | 4179 | MLVMS_P03355_PLV919 |
| GGGEAAAKGGS | 4166 | MLVBM_Q7SVK7_3mutA_WS |
| PAPAPAPAP | 4134 | BAEVM_P10272_3mutA |
| EAAAKEAAAKEAAAKEAAAK | 4128 | MLVMS_P03355_3mut |
| EAAAKPAP | 4155 | XMRV6_A1Z651_3mut |
| EAAAKEAAAK | 4126 | MLVBM_Q7SVK7_3mutA_WS |
| EAAAKGGG | 4148 | BAEVM_P10272_3mut |
| EAAAKGSS | 4152 | MLVAV_P03356_3mutA |
| EAAAKEAAAKEAAAKEAAAKEAAAKEAAAK | 4130 | MLVFF_P26809_3mut |
| GGGPAPGSS | 4200 | PERV_Q4VFZ2_3mutA_WS |
| GGGG | 4114 | PERV_Q4VFZ2_3mut |
| EAAAKGGSGSS | 4179 | MLVMS_P03355_PLV919 |
| GGGGSGGGGSGGGGS | 4109 | MLVMS_P03355_3mutA_WS |
| EAAAK | 4028 | MLVMS_P03355_3mutA_WS |
| GGGGSS | 4145 | PERV_Q4VFZ2 |
| PAPEAAAKGGS | 4192 | MLVCB_P08361_3mut |
| GSS | | MLVMS_P03355_3mut |
| GSAGSAAGSGEF | 4221 | MLVFF_P26809_3mutA |
| EAAAKEAAAKEAAAKEAAAKEAAAKEAAAK | 4130 | KORV_Q9TTC1-Pro_3mut |
| GGGGSGGGGS | 4108 | AVIRE_P03360_3mutA |
| EAAAK | 4028 | MLVMS_P03355_3mut |
| GGGPAPGGS | 4172 | PERV_Q4VFZ2_3mut |
| GGGGSGGGGSGGGGS | 4109 | MLVMS_P03355_PLV919 |
| PAPGGG | 4150 | MLVMS_P03355_3mutA_WS |
| GGGEAAAKPAP | 4205 | PERV_Q4VFZ2_3mutA_WS |
| EAAAKPAPGSS | 4214 | KORV_Q9TTC1-Pro_3mutA |
| PAPGSS | 4154 | KORV_Q9TTC1_3mutA |
| GSAGSAAGSGEF | 4221 | PERV_Q4VFZ2_3mut |
| PAPGGGGSS | 4203 | KORV_Q9TTC1-Pro_3mutA |
| GSSGGGEAAAK | 4195 | MLVCB_P08361_3mutA |
| GSS | | AVIRE_P03360_3mutA |
| GSSGSSGSSGSS | 4122 | XMRV6_A1Z651_3mutA |
| PAPEAAAKGGG | 4210 | MLVMS_P03355_PLV919 |
| GGGPAPEAAAK | 4206 | MLVCB_P08361_3mutA |
| PAPGGGGGS | 4174 | MLVCB_P08361_3mutA |
| EAAAKEAAAKEAAAKEAAAK | 4128 | PERV_Q4VFZ2_3mutA_WS |
| GGGGGSPAP | 4171 | MLVFF_P26809_3mutA |
| GSSGSSGSSGSSGSS | 4123 | PERV_Q4VFZ2 |
| GSSPAPEAAAK | 4212 | MLVMS_P03355_PLV919 |
| GSSGSSGSSGSSGSSGSS | 4124 | MLVBM_Q7SVK7_3mutA_WS |
| GSSGSSGSSGSSGSSGSS | 4124 | MLVMS_P03355_3mutA_WS |
| GGSPAPEAAAK | 4188 | MLVAV_P03356_3mutA |
| GSSGGG | 4146 | BAEVM_P10272_3mut |
| EAAAKGSSGGS | 4180 | KORV_Q9TTC1-Pro_3mutA |
| GGSGSSEAAAK | 4175 | MLVMS_P03355_3mutA_WS |
| GGGPAPEAAAK | 4206 | MLVFF_P26809_3mutA |
| GGGPAPGGS | 4172 | MLVMS_P03355_3mutA_WS |
| GGGGG | 4115 | MLVMS_P03355_PLV919 |
| GGGEAAAKPAP | 4205 | MLVBM_Q7SVK7_3mutA_WS |
| GGGGSGGGGS | 4108 | WMSV_P03359_3mut |
| GGGPAPEAAAK | 4206 | PERV_Q4VFZ2_3mut |
| GGSGSSEAAAK | 4175 | MLVMS_P03355_PLV919 |
| EAAAKGGGPAP | 4207 | MLVMS_P03355_3mutA_WS |
| GSSGSSGSSGSSGSS | 4123 | KORV_Q9TTC1-Pro_3mutA |
| PAPAP | 4132 | WMSV_P03359_3mutA |
| GGSPAPGSS | 4182 | MLVAV_P03356_3mutA |
| GGSGGGPAP | 4169 | MLVMS_P03355_3mut |
| GGSPAP | 4143 | MLVMS_P03355_PLV919 |
| EAAAKGGSPAP | 4189 | PERV_Q4VFZ2_3mut |
| GSSPAPGGG | 4202 | KORV_Q9TTC1-Pro_3mutA |
| GSAGSAAGSGEF | 4221 | MLVMS_P03355_3mut |
| GGSPAP | 4143 | PERV_Q4VFZ2_3mut |
| GSSGSS | 4120 | KORV_Q9TTC1-Pro_3mut |
| GGGPAPGSS | 4200 | MLVMS_P03355_3mutA_WS |
| AEAAAKEAAAKEAAAKEAAAKALEAEAAAKEAAAKEAAAKEAAAKA | 4217 | FOAMV_P14350 |
| PAPGSSGGG | 4204 | MLVMS_P03355_PLV919 |
| GGSEAAAKPAP | 4187 | BAEVM_P10272_3mutA |
| GGGGGS | 4138 | MLVCB_P08361_3mutA |
| PAPEAAAKGGS | 4192 | MLVMS_P03355_3mutA_WS |
| EAAAKEAAAKEAAAKEAAAKEAAAKEAAAK | 4130 | BAEVM_P10272_3mutA |
| GGSEAAAK | 4141 | BAEVM_P10272_3mutA |
| GSSPAPEAAAK | 4212 | MLVMS_P03355_3mutA_WS |
| PAPGGG | 4150 | WMSV_P03359_3mut |
| EAAAKPAP | 4155 | PERV_Q4VFZ2_3mut |
| GSSGSSGSSGSSGSS | 4123 | WMSV_P03359_3mut |
| PAPGGG | 4150 | MLVBM_Q7SVK7_3mutA_WS |
| GGSGGGEAAAK | 4163 | BAEVM_P10272_3mutA |
| PAPGGS | 4144 | MLVMS_P03355_3mut |
| GGSGGSGGSGGS | 4104 | MLVBM_Q7SVK7_3mutA_WS |
| EAAAKEAAAKEAAAKEAAAK | 4128 | PERV_Q4VFZ2_3mut |
| GGSEAAAKGGG | 4164 | WMSV_P03359_3mutA |
| GGGPAP | 4149 | BAEVM_P10272_3mutA |
| GGGGSGGGGSGGGGSGGGGSGGGGSGGGGS | 4112 | XMRV6_A1Z651_3mut |
| GGSPAPGSS | 4182 | KORV_Q9TTC1_3mut |
| GGGPAPGSS | 4200 | MLVMS_P03355_3mut |
| GGGGSSGGS | 4160 | BAEVM_P10272_3mutA |
| GGGEAAAKGSS | 4194 | KORV_Q9TTC1-Pro_3mutA |
| PAPAP | 4132 | MLVBM_Q7SVK7_3mutA_WS |
| GGSPAPGGG | 4170 | PERV_Q4VFZ2_3mut |
| PAPGSS | 4154 | PERV_Q4VFZ2_3mutA_WS |
| GSSGGSPAP | 4183 | MLVBM_Q7SVK7_3mutA_WS |
| EAAAKGGGGSEAAAK | 4219 | PERV_Q4VFZ2_3mut |
| GSSEAAAKGGS | 4178 | KORV_Q9TTC1-Pro_3mut |
| PAPAPAPAP | 4134 | KORV_Q9TTC1-Pro_3mutA |
| GGSEAAAKPAP | 4187 | WMSV_P03359_3mutA |
| PAPGGS | 4144 | FLV_P10273_3mutA |
| EAAAKGGGPAP | 4207 | PERV_Q4VFZ2_3mut |
| GGSGSSGGG | 4158 | AVIRE_P03360_3mutA |
| EAAAKGGSGSS | 4179 | BAEVM_P10272_3mutA |
| SGGSSGGSSGSETPGTSESATPESSGGSSGGSS | 4006 | MLVCB_P08361_3mutA |
| GSSEAAAKGGS | 4178 | XMRV6_A1Z651_3mutA |
| GGGGG | 4115 | BAEVM_P10272_3mutA |
| GGGGSGGGGSGGGGSGGGGSGGGGSGGGGS | 4112 | SFV3L_P27401_2mutA |
| GGGEAAAKGSS | 4194 | MLVMS_P03355_PLV919 |
| EAAAKGGGGSEAAAK | 4219 | KORV_Q9TTC1_3mutA |
| EAAAKGGG | 4148 | AVIRE_P03360_3mut |
| GGSGGG | 4137 | MLVMS_P03355_3mutA_WS |
| GGSGSSGGG | 4158 | MLVMS_P03355_PLV919 |
| GGGGSGGGGSGGGGSGGGGSGGGGSGGGGS | 4112 | KORV_Q9TTC1_3mut |
| GGGGSEAAAKGGGGS | 4218 | KORV_Q9TTC1_3mutA |
| PAPAPAPAPAP | 4135 | FLV_P10273_3mutA |
| GGS | | MLVBM_Q7SVK7_3mutA_WS |
| GGGGGSEAAAK | 4165 | MLVBM_Q7SVK7_3mutA_WS |
| GSSGSSGSSGSSGSS | 4123 | MLVMS_P03355_3mutA_WS |
| EAAAKEAAAKEAAAKEAAAKEAAAK | 4129 | MLVMS_P03355_3mut |
| GGSGSSGGG | 4158 | PERV_Q4VFZ2_3mut |
| PAP | | MLVFF_P26809_3mut |
| GSSPAPEAAAK | 4212 | MLVAV_P03356_3mutA |
| EAAAKGGGGSS | 4197 | MLVMS_P03355_3mut |
| GGGEAAAKGGS | 4166 | XMRV6_A1Z651_3mut |
| GGSGGGPAP | 4169 | MLVBM_Q7SVK7_3mutA_WS |
| GSAGSAAGSGEF | 4221 | BAEVM_P10272_3mutA |
| GSSEAAAK | 4151 | MLVCB_P08361_3mut |
| PAPGSS | 4154 | MLVMS_P03355_3mut |
| EAAAKEAAAKEAAAK | 4127 | MLVAV_P03356_3mutA |
| GSAGSAAGSGEF | 4221 | XMRV6_A1Z651_3mutA |
| GSSGSSGSSGSS | 4122 | BAEVM_P10272_3mutA |
| AEAAAKEAAAKEAAAKEAAAKALEAEAAAKEAAAKEAAAKEAAAKA | 4217 | KORV_Q9TTC1-Pro_3mut |
| GGGGSSEAAAK | 4193 | WMSV_P03359_3mut |
| GSSGGGEAAAK | 4195 | MLVBM_Q7SVK7_3mutA_WS |
| EAAAKPAP | 4155 | MLVFF_P26809_3mutA |
| GGSPAPGGG | 4170 | KORV_Q9TTC1_3mutA |
| PAPEAAAK | 4156 | FLV_P10273_3mutA |
| GSSGSSGSS | 4121 | MLVBM_Q7SVK7_3mutA_WS |
| GSSGGGEAAAK | 4195 | FLV_P10273_3mutA |
| GGSPAP | 4143 | MLVBM_Q7SVK7_3mutA_WS |
| GSAGSAAGSGEF | 4221 | KORV_Q9TTC1-Pro_3mutA |
| PAPGGSEAAAK | 4191 | MLVMS_P03355_PLV919 |
| GGSPAPEAAAK | 4188 | MLVBM_Q7SVK7_3mutA_WS |
| GGGGGSPAP | 4171 | MLVBM_Q7SVK7_3mutA_WS |
| EAAAKGSSPAP | 4213 | WMSV_P03359_3mut |
| EAAAKGGGPAP | 4207 | MLVBM_Q7SVK7_3mutA_WS |
| PAPGSS | 4154 | KORV_Q9TTC1-Pro_3mutA |
| GGSGSSGGG | 4158 | BAEVM_P10272_3mut |
| SGGSSGGSSGSETPGTSESATPESSGGSSGGSS | 4006 | FFV_O93209-Pro_2mut |
| GGSGGSGGSGGSGGSGGS | 4106 | WMSV_P03359_3mutA |
| GGSGGSGGS | 4103 | PERV_Q4VFZ2_3mutA_WS |
| GGGGG | 4115 | PERV_Q4VFZ2_3mutA_WS |
| GGGPAP | 4149 | FLV_P10273_3mutA |
| PAPGGSGGG | 4173 | XMRV6_A1Z651_3mutA |
| GGGGSEAAAKGGGGS | 4218 | XMRV6_A1Z651_3mut |
| EAAAKGSSGGG | 4198 | KORV_Q9TTC1-Pro_3mutA |
| GSSGGSEAAAK | 4177 | WMSV_P03359_3mut |
| EAAAKGGSGSS | 4179 | PERV_Q4VFZ2_3mut |
| PAPAPAPAPAP | 4135 | PERV_Q4VFZ2_3mut |
| GGGGSGGGGSGGGGSGGGGSGGGGSGGGGS | 4112 | MLVMS_P03355_3mutA_WS |
| GGGGGGG | 4117 | KORV_Q9TTC1_3mutA |
| EAAAK | 4028 | KORV_Q9TTC1-Pro_3mutA |
| GGGEAAAKGGS | 4166 | KORV_Q9TTC1-Pro_3mutA |
| GGGEAAAKGGS | 4166 | PERV_Q4VFZ2_3mutA_WS |
| GGGGGSPAP | 4171 | XMRV6_A1Z651_3mut |
| GGGGSGGGGSGGGGSGGGGS | 4110 | MLVFF_P26809_3mut |
| GGGGGGG | 4117 | MLVFF_P26809_3mut |
| PAPAPAPAPAPAP | 4136 | AVIRE_P03360_3mutA |
| GSSPAPGGG | 4202 | FLV_P10273_3mutA |
| GGGGGSPAP | 4171 | MLVMS_P03355_3mutA_WS |
| GGGGSGGGGSGGGGS | 4109 | MLVMS_P03355_3mut |
| GGGGSGGGGSGGGGS | 4109 | KORV_Q9TTC1_3mut |
| GSSEAAAKGGS | 4178 | MLVAV_P03356_3mutA |
| GSSGSSGSSGSSGSS | 4123 | MLVMS_P03355_3mut |
| EAAAKGGGGGS | 4168 | PERV_Q4VFZ2_3mutA_WS |
| GSSGGGGGS | 4162 | PERV_Q4VFZ2_3mut |
| GGGEAAAKPAP | 4205 | MLVMS_P03355_3mut |
| GSSGGSPAP | 4183 | PERV_Q4VFZ2_3mutA_WS |
| GSSGGGPAP | 4201 | BAEVM_P10272_3mutA |
| GGGGGSGSS | 4159 | MLVMS_P03355_PLV919 |
| AEAAAKEAAAKEAAAKEAAAKALEAEAAAKEAAAKEAAAKEAAAKA | 4217 | BAEVM_P10272_3mut |
| PAPEAAAK | 4156 | MLVMS_P03355_3mut |
| GGGGSGGGGSGGGGS | 4109 | FLV_P10273_3mutA |
| GGSGSSGGG | 4158 | WMSV_P03359_3mutA |
| EAAAKGGS | 4142 | PERV_Q4VFZ2_3mut |
| EAAAKGSSPAP | 4213 | MLVCB_P08361_3mut |
| EAAAKGGSGSS | 4179 | WMSV_P03359_3mutA |
| GSSGSS | 4120 | PERV_Q4VFZ2_3mutA_WS |
| PAPAPAPAP | 4134 | MLVMS_P03355_PLV919 |
| GGSGGG | 4137 | PERV_Q4VFZ2_3mutA_WS |
| GSS | | MLVBM_Q7SVK7_3mutA_WS |
| PAP | | KORV_Q9TTC1-Pro_3mutA |
| GGSGSSEAAAK | 4175 | MLVFF_P26809_3mut |
| PAPEAAAKGSS | 4216 | KORV_Q9TTC1-Pro_3mutA |
| GGSGGS | 4102 | MLVCB_P08361_3mutA |
| GGGGGGG | 4117 | PERV_Q4VFZ2_3mutA_WS |
| GGSPAPEAAAK | 4188 | MLVBM_Q7SVK7_3mut |
| EAAAKEAAAKEAAAKEAAAKEAAAKEAAAK | 4130 | KORV_Q9TTC1_3mutA |
| GGSPAP | 4143 | MLVMS_P03355_3mut |
| GGSEAAAKGGG | 4164 | PERV_Q4VFZ2_3mut |
| GGGGSGGGGS | 4108 | FLV_P10273_3mutA |
| GGGEAAAK | 4147 | BAEVM_P10272_3mutA |
| GGGGGGGGSGGGGSGGGGSGGGGSGGGGS | 4112 | SFV3L_P27401_2mut |
| GGSEAAAKPAP | 4187 | KORV_Q9TTC1-Pro_3mutA |
| GSSGGGEAAAK | 4195 | MLVMS_P03355_PLV919 |
| GGGGGSEAAAK | 4165 | MLVMS_P03355_PLV919 |
| EAAAKGGSGGG | 4167 | MLVMS_P03355_3mutA_WS |
| GGGGSSPAP | 4199 | MLVAV_P03356_3mutA |
| EAAAKEAAAK | 4126 | MLVMS_P03355_3mutA_WS |
| AEAAAKEAAAKEAAAKEAAAKALEAEAAAKEAAAKEAAAKEAAAKA | 4217 | SFV3L_P27401_2mut |
| GSSGSSGSSGSSGSS | 4123 | MLVMS_P03355_PLV919 |
| GSSGGG | 4146 | KORV_Q9TTC1-Pro_3mutA |
| GSSGGS | 4140 | MLVFF_P26809_3mutA |
| GGGGSGGGGS | 4108 | XMRV6_A1Z651_3mutA |
| PAPGSS | 4154 | MLVBM_Q7SVK7_3mutA_WS |
| GGGPAPEAAAK | 4206 | XMRV6_A1Z651_3mutA |
| EAAAKGGS | 4142 | MLVFF_P26809_3mut |
| GSS | | KORV_Q9TTC1_3mutA |
| GGGG | 4114 | PERV_Q4VFZ2_3mut |
| GGGGGSEAAAK | 4165 | AVIRE_P03360_3mutA |
| GSSGSSGSSGSSGSS | 4123 | MLVMS_P03355_PLV919 |
| PAPGGSGGG | 4173 | PERV_Q4VFZ2_3mut |
| GGGPAP | 4149 | PERV_Q4VFZ2_3mut |
| GGGPAPEAAAK | 4206 | AVIRE_P03360_3mutA |
| GGGEAAAK | 4147 | MLVCB_P08361_3mut |
| GGG | | MLVFF_P26809_3mutA |
| EAAAKPAPGSS | 4214 | XMRV6_A1Z651_3mutA |
| GGSGSSEAAAK | 4175 | PERV_Q4VFZ2_3mutA_WS |
| EAAAKGSS | 4152 | MLVMS_P03355_3mut |
| GGSGSSEAAAK | 4175 | BAEVM_P10272_3mut |
| GGSGGG | 4137 | MLVBM_Q7SVK7_3mutA_WS |
| GGGPAP | 4149 | MLVMS_P03355_PLV919 |
| GGSPAPGGG | 4170 | PERV_Q4VFZ2_3mutA_WS |
| GGGGGSEAAAK | 4165 | MLVFF_P26809_3mutA |
| EAAAKGSSGGS | 4180 | MLVBM_Q7SVK7_3mut |
| PAPAP | 4132 | XMRV6_A1Z651_3mut |
| GSSPAPGGS | 4184 | MLVBM_Q7SVK7_3mutA_WS |
| GSSEAAAKGGG | 4196 | WMSV_P03359_3mutA |
| EAAAKGGGGGS | 4168 | PERV_Q4VFZ2_3mut |
| GSSGSSGSSGSSGSS | 4123 | MLVCB_P08361_3mutA |
| EAAAKGGGGSS | 4197 | PERV_Q4VFZ2_3mut |
| EAAAKGSS | 4152 | PERV_Q4VFZ2_3mut |
| EAAAKEAAAKEAAAKEAAAKEAAAKEAAAK | 4130 | AVIRE_P03360_3mutA |
| EAAAKGGS | 4142 | MLVCB_P08361_3mut |
| GSSGGSEAAAK | 4177 | MLVAV_P03356_3mutA |
| EAAAKPAPGGS | 4190 | PERV_Q4VFZ2_3mut |
| GGSGGS | 4102 | MLVAV_P03356_3mutA |
| EAAAKGSSGGG | 4198 | AVIRE_P03360_3mutA |
| GGSGGSGGSGGS | 4104 | PERV_Q4VFZ2_3mut |
| GGGGGGGG | 4118 | KORV_Q9TTC1_3mutA |
| GGSGSSEAAAK | 4175 | MLVCB_P08361_3mutA |
| EAAAKGGG | 4148 | MLVBM_Q7SVK7_3mutA_WS |
| GGGGSGGGGSGGGGS | 4109 | MLVCB_P08361_3mut |
| GGSGGSGGSGGS | 4104 | PERV_Q4VFZ2_3mutA_WS |
| PAPAPAPAPAP | 4135 | WMSV_P03359_3mut |
| EAAAKEAAAKEAAAKEAAAK | 4128 | PERV_Q4VFZ2_3mut |
| GGSGGSGGS | 4103 | XMRV6_A1Z651_3mutA |
| PAPGGGGSS | 4203 | BAEVM_P10272_3mutA |
| GSSEAAAKGGS | 4178 | MLVCB_P08361_3mut |
| GSSGGGPAP | 4201 | MLVCB_P08361_3mutA |
| GGSGSS | 4139 | MLVBM_Q7SVK7_3mutA_WS |
| GGGGGSEAAAK | 4165 | MLVAV_P03356_3mutA |
| GSSEAAAK | 4151 | PERV_Q4VFZ2_3mutA_WS |
| GGGGGSGSS | 4159 | MLVBM_Q7SVK7_3mutA_WS |
| EAAAKGGSGSS | 4179 | MLVFF_P26809_3mut |
| PAP | | FLV_P10273_3mutA |
| GGGGG | 4115 | MLVMS_P03355_3mutA_WS |
| EAAAK | 4028 | PERV_Q4VFZ2_3mut |
| GSS | | FLV_P10273_3mutA |
| PAPAPAPAPAPAP | 4136 | KORV_Q9TTC1-Pro_3mutA |
| EAAAKEAAAKEAAAKEAAAK | 4128 | MLVCB_P08361_3mut |
| EAAAKGGGGSEAAAK | 4219 | XMRV6_A1Z651_3mut |
| PAPGGSGGG | 4173 | MLVBM_Q7SVK7_3mutA_WS |
| GGSGGGPAP | 4169 | WMSV_P03359_3mutA |
| GGGGSSEAAAK | 4193 | MLVBM_Q7SVK7_3mutA_WS |
| PAPGGGGSS | 4203 | MLVCB_P08361_3mut |
| GGSGGSGGSGGS | 4104 | PERV_Q4VFZ2_3mutA_WS |
| PAPGGSGGG | 4173 | MLVMS_P03355_3mutA_WS |
| GSSPAPGGS | 4184 | MLVCB_P08361_3mutA |
| GSSGSSGSS | 4121 | MLVFF_P26809_3mut |
| PAPGGGGGS | 4174 | MLVBM_Q7SVK7_3mutA_WS |
| GSSPAP | 4153 | PERV_Q4VFZ2_3mut |
| GGSGGG | 4137 | KORV_Q9TTC1-Pro_3mut |
| EAAAKGGGGSEAAAK | 4219 | PERV_Q4VFZ2_3mutA_WS |
| GGSPAPEAAAK | 4188 | PERV_Q4VFZ2_3mutA_WS |
| EAAAKPAP | 4155 | BAEVM_P10272_3mut |
| GGGGSGGGGSGGGGSGGGGSGGGGSGGGGS | 4112 | MLVMS_P03355_3mut |
| EAAAKGGGGSS | 4197 | MLVFF_P26809_3mut |
| EAAAKEAAAK | 4126 | MLVCB_P08361_3mut |
| GSSEAAAKGGS | 4178 | PERV_Q4VFZ2_3mut |
| GGSPAP | 4143 | KORV_Q9TTC1-Pro_3mutA |
| EAAAKEAAAKEAAAKEAAAK | 4128 | MLVMS_P03355_3mutA_WS |
| GSSGSSGSSGSSGSS | 4123 | BAEVM_P10272_3mut |
| PAPEAAAK | 4156 | MLVMS_P03355_3mut |
| GSSGGSPAP | 4183 | PERV_Q4VFZ2 |
| GGGPAPGGS | 4172 | BAEVM_P10272_3mutA |
| EAAAKPAPGGS | 4190 | MLVMS_P03355_PLV919 |
| GGGGSGGGGS | 4108 | PERV_Q4VFZ2 |
| GGGEAAAK | 4147 | KORV_Q9TTC1-Pro_3mut |
| EAAAKGGGGGS | 4168 | FLV_P10273_3mutA |
| GGSPAPGSS | 4182 | MLVMS_P03355_3mut |
| GSSPAPEAAAK | 4212 | MLVMS_P03355_3mutA_WS |
| GSAGSAAGSGEF | 4221 | MLVBM_Q7SVK7_3mutA_WS |
| EAAAK | 4028 | BAEVM_P10272_3mutA |
| EAAAKGGGGSS | 4197 | BAEVM_P10272_3mutA |
| GGG | | WMSV_P03359_3mut |
| GGSGSSPAP | 4181 | BAEVM_P10272_3mut |
| GGSEAAAKPAP | 4187 | MLVBM_Q7SVK7_3mutA_WS |
| EAAAKGGSGSS | 4179 | MLVCB_P08361_3mut |
| PAPGSS | 4154 | MLVAV_P03356_3mutA |
| PAPEAAAKGGG | 4210 | MLVCB_P08361_3mutA |
| AEAAAKEAAAKEAAAKEAAAKALEAEAAAKEAAAKEAAAKEAAAKA | 4217 | FOAMV_P14350-Pro_2mut |
| GSSGSSGSS | 4121 | PERV_Q4VFZ2_3mut |
| PAPGGG | 4150 | MLVMS_P03355_3mut |
| PAPGGS | 4144 | PERV_Q4VFZ2_3mut |
| GSSGGG | 4146 | MLVMS_P03355_PLV919 |
| GSSGSSGSSGSSGSSGSS | 4124 | WMSV_P03359_3mut |
| PAP | | AVIRE_P03360_3mutA |
| EAAAKGSSPAP | 4213 | MLVBM_Q7SVK7_3mutA_WS |
| GSSGSSGSSGSS | 4122 | MLVMS_P03355_PLV919 |
| GGGGSGGGGSGGGGSGGGGSGGGGS | 4111 | AVIRE_P03360 |
| GGGGS | 4027 | PERV_Q4VFZ2_3mut |
| EAAAKGSSGGG | 4198 | MLVBM_Q7SVK7_3mutA_WS |
| GGGGGG | 4116 | KORV_Q9TTC1-Pro_3mut |
| GGSGSSEAAAK | 4175 | PERV_Q4VFZ2_3mut |
| GSSPAPEAAAK | 4212 | MLVBM_Q7SVK7_3mutA_WS |
| GGGGSGGGGS | 4108 | MLVBM_Q7SVK7_3mutA_WS |
| GSSGGGGGS | 4162 | MLVAV_P03356_3mutA |
| GSAGSAAGSGEF | 4221 | WMSV_P03359_3mutA |
| GGGEAAAKGSS | 4194 | BAEVM_P10272_3mutA |
| AEAAAKEAAAKEAAAKEAAAKALEAEAAAKEAAAKEAAAKEAAAKA | 4217 | FFV_O93209-Pro_2mut |
| PAPGGSGGG | 4173 | MLVCB_P08361_3mutA |
| EAAAKEAAAKEAAAKEAAAKEAAAK | 4129 | SFV3L_P27401_2mut |
| GGSGSSPAP | 4181 | MLVMS_P03355_PLV919 |
| GGGGGG | 4116 | PERV_Q4VFZ2_3mut |
| EAAAKEAAAKEAAAKEAAAKEAAAK | 4129 | PERV_Q4VFZ2_3mut |
| EAAAKGSSPAP | 4213 | MLVFF_P26809_3mut |
| GGGPAPGGS | 4172 | MLVBM_Q7SVK7_3mutA_WS |
| AEAAAKEAAAKEAAAKEAAAKALEAEAAAKEAAAKEAAAKEAAAKA | 4217 | SFV3L_P27401 |
| PAP | | PERV_Q4VFZ2_3mut |
| EAAAKGGS | 4142 | MLVMS_P03355_PLV919 |
| GSSGGSEAAAK | 4177 | WMSV_P03359_3mutA |
| GGSGSSEAAAK | 4175 | KORV_Q9TTC1-Pro_3mutA |
| EAAAKEAAAKEAAAK | 4127 | PERV_Q4VFZ2 |
| GGSGGGEAAAK | 4163 | MLVMS_P03355_3mutA_WS |
| GGGGSGGGGSGGGGSGGGGS | 4110 | BAEVM_P10272_3mut |
| EAAAKGSS | 4152 | XMRV6_A1Z651_3mutA |
| GSSGGGGGS | 4162 | WMSV_P03359_3mutA |
| GSSGSSGSSGSSGSSGSS | 4124 | MLVFF_P26809_3mutA |
| GGSGSS | 4139 | MLVAV_P03356_3mutA |
| EAAAKGGGGSEAAAK | 4219 | MLVMS_P03355_PLV919 |
| EAAAKGGGPAP | 4207 | PERV_Q4VFZ2 |
| GGSEAAAKGGG | 4164 | MLVAV_P03356_3mutA |
| EAAAKEAAAKEAAAKEAAAKEAAAKEAAAK | 4130 | MLVBM_Q7SVK7_3mut |
| EAAAKEAAAKEAAAKEAAAKEAAAKEAAAK | 4130 | KORV_Q9TTC1-Pro_3mutA |
| GSSPAPEAAAK | 4212 | MLVFF_P26809_3mutA |
| GGGGSEAAAKGGGGS | 4218 | PERV_Q4VFZ2_3mut |
| GSSGSSGSSGSS | 4122 | PERV_Q4VFZ2_3mut |
| GGSEAAAK | 4141 | MLVFF_P26809_3mutA |
| GGGGGGGG | 4118 | MLVMS_P03355_3mut |
| GSSGGG | 4146 | XMRV6_A1Z651_3mutA |
| EAAAKGGS | 4142 | BAEVM_P10272_3mutA |
| GGGGS | 4027 | BAEVM_P10272_3mutA |
| GGSEAAAKGGG | 4164 | KORV_Q9TTC1-Pro_3mutA |
| GGSGSSGGG | 4158 | KORV_Q9TTC1_3mutA |
| GGSGSSEAAAK | 4175 | WMSV_P03359_3mut |
| EAAAKGGSGSS | 4179 | MLVBM_Q7SVK7_3mutA_WS |
| GGS | | BAEVM_P10272_3mutA |
| GGGPAPGSS | 4200 | WMSV_P03359_3mutA |
| GSSGSSGSSGSSGSS | 4123 | AVIRE_P03360_3mut |
| GGGEAAAKPAP | 4205 | XMRV6_A1Z651_3mut |
| GSSGGG | 4146 | MLVFF_P26809_3mutA |
| GGSPAPGSS | 4182 | PERV_Q4VFZ2_3mut |
| PAPGGS | 4144 | MLVCB_P08361_3mut |
| PAPAPAPAPAP | 4135 | KORV_Q9TTC1_3mutA |
| GSSGGS | 4140 | MLVCB_P08361_3mutA |
| GSSGGSEAAAK | 4177 | PERV_Q4VFZ2_3mut |
| EAAAKGSSGGS | 4180 | MLVMS_P03355_PLV919 |
| EAAAKGGG | 4148 | WMSV_P03359_3mut |
| PAPGGGGGS | 4174 | BAEVM_P10272_3mutA |
| GGGGSEAAAKGGGGS | 4218 | WMSV_P03359_3mutA |
| EAAAKEAAAKEAAAKEAAAKEAAAKEAAAK | 4130 | MLVMS_P03355_3mutA_WS |
| GGS | | KORV_Q9TTC1-Pro_3mutA |
| GSSGGSPAP | 4183 | BAEVM_P10272_3mutA |
| GGG | | MLVMS_P03355_PLV919 |
| PAPGSS | 4154 | KORV_Q9TTC1-Pro_3mut |
| GGSEAAAKGGG | 4164 | FLV_P10273_3mutA |
| GGSEAAAKPAP | 4187 | PERV_Q4VFZ2_3mutA_WS |
| GGGGSSPAP | 4199 | XMRV6_A1Z651_3mutA |
| EAAAKEAAAKEAAAKEAAAKEAAAK | 4129 | PERV_Q4VFZ2_3mutA_WS |
| GGGG | 4114 | PERV_Q4VFZ2_3mutA_WS |
| GGSEAAAKPAP | 4187 | MLVMS_P03355_3mut |
| PAPGSSGGG | 4204 | MLVMS_P03355_3mutA_WS |
| PAPEAAAKGGS | 4192 | AVIRE_P03360_3mut |
| GGGGSSPAP | 4199 | MLVMS_P03355_3mutA_WS |
| GGGGSGGGGSGGGGSGGGGS | 4110 | PERV_Q4VFZ2_3mut |
| GGGEAAAK | 4147 | MLVMS_P03355_3mut |
| GGGGSS | 4145 | MLVFF_P26809_3mut |
| GGSPAPGSS | 4182 | XMRV6_A1Z651_3mut |
| GGGGS | 4027 | KORV_Q9TTC1-Pro_3mutA |
| EAAAKGSSGGS | 4180 | FLV_P10273_3mutA |
| GSS | | MLVMS_P03355_PLV919 |
| GGGG | 4114 | MLVMS_P03355_PLV919 |
| GSSGGS | 4140 | MLVMS_P03355_PLV919 |
| GGSGGSGGSGGS | 4104 | MLVMS_P03355_3mut |
| PAPEAAAKGGS | 4192 | MLVMS_P03355_3mut |
| EAAAKGSSGGG | 4198 | BAEVM_P10272_3mutA |
| GSSEAAAK | 4151 | KORV_Q9TTC1-Pro_3mutA |
| GSAGSAAGSGEF | 4221 | KORV_Q9TTC1_3mutA |
| GGGGGSEAAAK | 4165 | MLVCB_P08361_3mut |
| GGGG | 4114 | WMSV_P03359_3mut |
| GGGGSSEAAAK | 4193 | MLVMS_P03355_PLV919 |
| PAPGGG | 4150 | WMSV_P03359_3mutA |
| EAAAKGGSGGG | 4167 | MLVAV_P03356_3mutA |
| GGGPAPGGS | 4172 | MLVMS_P03355_3mut |
| EAAAKPAP | 4155 | PERV_Q4VFZ2_3mutA_WS |
| GSSGSSGSS | 4121 | KORV_Q9TTC1-Pro_3mutA |
| GSSPAPGGS | 4184 | XMRV6_A1Z651_3mut |
| GGGGGSPAP | 4171 | BAEVM_P10272_3mutA |
| GGSGSSGGG | 4158 | PERV_Q4VFZ2_3mutA_WS |
| GGGEAAAKGSS | 4194 | AVIRE_P03360_3mut |
| GSSEAAAK | 4151 | FLV_P10273_3mutA |
| EAAAK | 4028 | MLVMS_P03355_3mut |
| EAAAKGGSGSS | 4179 | WMSV_P03359_3mut |
| GSSEAAAKGGG | 4196 | PERV_Q4VFZ2_3mut |
| PAPGSSGGG | 4204 | BAEVM_P10272_3mutA |
| EAAAKGGGGGS | 4168 | MLVMS_P03355_3mut |
| GGSEAAAKPAP | 4187 | AVIRE_P03360_3mut |
| GGGPAPGGS | 4172 | XMRV6_A1Z651_3mut |
| GGGGS | 4027 | KORV_Q9TTC1_3mutA |
| GGSGGSGGSGGSGGS | 4105 | XMRV6_A1Z651_3mut |
| GGGPAP | 4149 | KORV_Q9TTC1-Pro_3mut |
| EAAAKPAP | 4155 | MLVBM_Q7SVK7_3mutA_WS |
| GGSEAAAK | 4141 | MLVMS_P03355_PLV919 |
| GSSEAAAKPAP | 4211 | KORV_Q9TTC1-Pro_3mutA |
| GGSGSS | 4139 | MLVMS_P03355_3mut |
| EAAAKPAPGGG | 4208 | PERV_Q4VFZ2_3mut |
| GGSPAPEAAAK | 4188 | KORV_Q9TTC1_3mutA |
| GGSEAAAKGGG | 4164 | AVIRE_P03360_3mutA |
| GGGGSEAAAKGGGGS | 4218 | MLVMS_P03355_PLV919 |
| GSSGGGEAAAK | 4195 | KORV_Q9TTC1-Pro_3mutA |
| EAAAKGGGPAP | 4207 | WMSV_P03359_3mut |
| GSSPAP | 4153 | XMRV6_A1Z651_3mutA |
| AEAAAKEAAAKEAAAKEAAAKALEAEAAAKEAAAKEAAAKEAAAKA | 4217 | SFV3L_P27401-Pro |
| GGSEAAAKGSS | 4176 | MLVMS_P03355_PLV919 |
| GSSGGSEAAAK | 4177 | KORV_Q9TTC1-Pro_3mutA |
| GGSEAAAKGSS | 4176 | KORV_Q9TTC1-Pro_3mutA |
| EAAAKGGG | 4148 | AVIRE_P03360_3mutA |
| GSSGGSEAAAK | 4177 | BAEVM_P10272_3mutA |
| GGGGSEAAAKGGGGS | 4218 | KORV_Q9TTC1-Pro_3mut |
| PAPGSSEAAAK | 4215 | MLVMS_P03355_3mut |
| PAPEAAAK | 4156 | WMSV_P03359_3mut |
| PAPGGSGSS | 4185 | PERV_Q4VFZ2_3mutA_WS |
| PAPGSS | 4154 | BAEVM_P10272_3mut |
| PAPGGGGGS | 4174 | MLVMS_P03355_3mut |
| EAAAKPAPGSS | 4214 | MLVBM_Q7SVK7_3mutA_WS |
| GSSPAPGGS | 4184 | MLVMS_P03355_PLV919 |
| GGSGSSEAAAK | 4175 | MLVMS_P03355_3mut |
| GGGGGG | 4116 | KORV_Q9TTC1-Pro_3mutA |
| EAAAKEAAAKEAAAKEAAAK | 4128 | MLVBM_Q7SVK7_3mut |
| GGSPAPGSS | 4182 | MLVMS_P03355_PLV919 |
| PAPAPAPAPAP | 4135 | MLVCB_P08361_3mut |
| GGSGSSPAP | 4181 | WMSV_P03359_3mutA |
| EAAAKGGSGGG | 4167 | PERV_Q4VFZ2_3mutA_WS |
| GSSGSSGSSGSSGSS | 4123 | PERV_Q4VFZ2_3mut |
| AEAAAKEAAAKEAAAKEAAAKALEAEAAAKEAAAKEAAAKEAAAKA | 4217 | KORV_Q9TTC1_3mutA |
| GSSGGGEAAAK | 4195 | WMSV_P03359_3mutA |
| GSSGGSEAAAK | 4177 | FLV_P10273_3mutA |
| GGGGGGGG | 4118 | PERV_Q4VFZ2_3mut |
| PAPGGSEAAAK | 4191 | FLV_P10273_3mutA |
| GGGGSSPAP | 4199 | BAEVM_P10272_3mutA |
| PAPAPAPAP | 4134 | WMSV_P03359_3mut |
| GGSEAAAKPAP | 4187 | PERV_Q4VFZ2_3mut |
| PAPGGSGGG | 4173 | BAEVM_P10272_3mutA |
| EAAAKEAAAKEAAAKEAAAKEAAAKEAAAK | 4130 | MLVMS_P03355_3mut |
| GGGGSGGGGSGGGGS | 4109 | PERV_Q4VFZ2_3mut |
| GGSGGGPAP | 4169 | PERV_Q4VFZ2_3mut |
| GGGPAPEAAAK | 4206 | MLVFF_P26809_3mut |
| GGGGGSGSS | 4159 | MLVMS_P03355_3mutA_WS |
| GSS | | MLVCB_P08361_3mut |
| GGGGGSPAP | 4171 | MLVMS_P03355_PLV919 |
| GGSPAP | 4143 | MLVAV_P03356_3mutA |
| GGGPAPGGS | 4172 | KORV_Q9TTC1-Pro_3mutA |
| PAPGSSGGG | 4204 | FLV_P10273_3mutA |
| PAPGSSGGG | 4204 | WMSV_P03359_3mutA |
| PAPGGS | 4144 | MLVBM_Q7SVK7_3mutA_WS |
| GGGEAAAKGSS | 4194 | PERV_Q4VFZ2_3mutA_WS |
| GGSEAAAKGSS | 4176 | MLVBM_Q7SVK7_3mutA_WS |
| PAPGGSEAAAK | 4191 | MLVCB_P08361_3mut |
| GGSEAAAKGGG | 4164 | XMRV6_A1Z651_3mutA |
| GGSGGGGSS | 4157 | WMSV_P03359_3mut |
| GGGEAAAKPAP | 4205 | KORV_Q9TTC1_3mutA |
| EAAAKGSS | 4152 | KORV_Q9TTC1-Pro_3mut |
| PAPEAAAKGSS | 4216 | MLVFF_P26809_3mut |
| GSAGSAAGSGEF | 4221 | PERV_Q4VFZ2_3mut |
| EAAAKGGGGGS | 4168 | WMSV_P03359_3mut |
| EAAAKGSSPAP | 4213 | WMSV_P03359_3mutA |
| GGGGSEAAAKGGGGS | 4218 | XMRV6_A1Z651_3mutA |
| GSSEAAAKPAP | 4211 | SFV3L_P27401-Pro_2mutA |
| GGGGGG | 4116 | PERV_Q4VFZ2_3mutA_WS |
| PAPGGS | 4144 | BAEVM_P10272_3mut |
| PAP | | AVIRE_P03360_3mut |
| PAPAPAP | 4133 | MLVBM_Q7SVK7_3mutA_WS |
| GGGG | 4114 | PERV_Q4VFZ2_3mutA_WS |
| GSSGGSEAAAK | 4177 | MLVBM_Q7SVK7_3mut |
| GGSGGGGSS | 4157 | MLVFF_P26809_3mut |
| GGGGSSGGS | 4160 | AVIRE_P03360_3mutA |
| GSSPAPGGG | 4202 | PERV_Q4VFZ2_3mutA_WS |
| GGSEAAAKPAP | 4187 | MLVMS_P03355_PLV919 |
| PAP | | KORV_Q9TTC1-Pro_3mut |
| GSSGGS | 4140 | PERV_Q4VFZ2_3mut |
| GGGGG | 4115 | PERV_Q4VFZ2_3mut |
| GSSGGGPAP | 4201 | FLV_P10273_3mutA |
| GSSEAAAKGGG | 4196 | KORV_Q9TTC1-Pro_3mut |
| EAAAKEAAAKEAAAKEAAAKEAAAKEAAAK | 4130 | MLVCB_P08361_3mut |
| GGSEAAAKPAP | 4187 | MLVCB_P08361_3mut |
| PAPAPAPAPAPAP | 4136 | BAEVM_P10272_3mutA |
| GGGGSEAAAKGGGGS | 4218 | MLVMS_P03355_3mut |
| EAAAKPAPGSS | 4214 | MLVMS_P03355_3mut |
| GSSGSSGSSGSSGSS | 4123 | MLVBM_Q7SVK7_3mutA_WS |
| PAPEAAAKGSS | 4216 | MLVAV_P03356_3mut |
| AEAAAKEAAAKEAAAKEAAAKALEAEAAAKEAAAKEAAAKEAAAKA | 4217 | AVIRE_P03360_3mut |
| AEAAAKEAAAKEAAAKEAAAKALEAEAAAKEAAAKEAAAKEAAAKA | 4217 | PERV_Q4VFZ2_3mut |
| GGSEAAAKGGG | 4164 | PERV_Q4VFZ2_3mutA_WS |
| GGSGGGGSS | 4157 | MLVFF_P26809_3mutA |
| PAPEAAAKGSS | 4216 | MLVCB_P08361_3mut |
| GGG | | PERV_Q4VFZ2_3mutA_WS |
| GGSGGGEAAAK | 4163 | MLVMS_P03355_3mut |
| EAAAKGGGGSS | 4197 | WMSV_P03359_3mut |
| GSSPAPGGG | 4202 | WMSV_P03359_3mutA |
| EAAAKGSSGGG | 4198 | PERV_Q4VFZ2_3mut |
| GGSGGGEAAAK | 4163 | PERV_Q4VFZ2_3mutA_WS |
| GGSGGSGGSGGSGGS | 4105 | PERV_Q4VFZ2_3mutA_WS |
| EAAAKPAPGGS | 4190 | PERV_Q4VFZ2_3mutA_WS |
| GGGGGSEAAAK | 4165 | PERV_Q4VFZ2_3mutA_WS |
| GSSPAP | 4153 | MLVFF_P26809_3mut |
| GGGEAAAKPAP | 4205 | AVIRE_P03360_3mut |
| GSSGGSEAAAK | 4177 | MLVMS_P03355_PLV919 |
| EAAAKPAPGGS | 4190 | WMSV_P03359_3mutA |
| PAPGGG | 4150 | KORV_Q9TTC1_3mutA |
| EAAAKGSSPAP | 4213 | KORV_Q9TTC1-Pro_3mut |
| GSSPAPEAAAK | 4212 | MLVFF_P26809_3mut |
| GGSGGGEAAAK | 4163 | MLVFF_P26809_3mutA |
| GSSGSSGSS | 4121 | WMSV_P03359_3mutA |
| EAAAKGGS | 4142 | BAEVM_P10272_3mut |
| EAAAKPAPGGS | 4190 | KORV_Q9TTC1_3mutA |
| EAAAKPAPGGS | 4190 | BAEVM_P10272_3mutA |
| GSSGGGGGS | 4162 | PERV_Q4VFZ2_3mut |
| PAPGGGGSS | 4203 | PERV_Q4VFZ2_3mut |
| GSSGSSGSS | 4121 | WMSV_P03359_3mut |
| EAAAKEAAAKEAAAKEAAAK | 4128 | WMSV_P03359_3mut |
| GGS | | AVIRE_P03360_3mut |
| EAAAKPAPGSS | 4214 | MLVFF_P26809_3mut |
| EAAAKGGG | 4148 | KORV_Q9TTC1_3mut |
| PAPGSSEAAAK | 4215 | MLVMS_P03355_3mut |
| PAPGSSGGS | 4186 | MLVMS_P03355_PLV919 |
| GSSPAPEAAAK | 4212 | MLVMS_P03355_3mut |
| GSSGSSGSSGSSGSSGSS | 4124 | WMSV_P03359_3mutA |
| GGGGS | 4027 | BAEVM_P10272_3mut |
| GSSPAP | 4153 | MLVMS_P03355_3mut |
| EAAAKGGGGSEAAAK | 4219 | KORV_Q9TTC1-Pro_3mutA |
| EAAAKEAAAK | 4126 | WMSV_P03359_3mutA |
| GGGGSSGGS | 4160 | MLVCB_P08361_3mutA |
| PAPGGSEAAAK | 4191 | BAEVM_P10272_3mut |
| EAAAKGGSPAP | 4189 | MLVFF_P26809_3mut |
| GSSGGSGGG | 4161 | MLVBM_Q7SVK7_3mutA_WS |
| GSSGGS | 4140 | PERV_Q4VFZ2_3mut |
| PAPGGSGSS | 4185 | PERV_Q4VFZ2_3mutA_WS |
| EAAAKGGSGSS | 4179 | KORV_Q9TTC1-Pro_3mutA |
| PAPAP | 4132 | MLVCB_P08361_3mut |
| EAAAKGSSPAP | 4213 | PERV_Q4VFZ2_3mutA_WS |
| EAAAKPAPGGG | 4208 | MLVMS_P03355_PLV919 |
| GGGGSGGGGSGGGGSGGGGSGGGGSGGGGS | 4112 | MLVBM_Q7SVK7_3mut |
| EAAAKGGGGSS | 4197 | MLVMS_P03355_PLV919 |
| PAPEAAAK | 4156 | PERV_Q4VFZ2_3mut |
| EAAAKPAPGSS | 4214 | BAEVM_P10272_3mutA |
| GGSPAP | 4143 | PERV_Q4VFZ2_3mutA_WS |
| GGSGGS | 4102 | BAEVM_P10272_3mutA |
| PAPEAAAKGSS | 4216 | KORV_Q9TTC1_3mut |
| PAPGSS | 4154 | MLVMS_P03355_PLV919 |
| PAPAPAPAPAP | 4135 | MLVAV_P03356_3mutA |
| GGG | | XMRV6_A1Z651_3mutA |
| GGGPAP | 4149 | PERV_Q4VFZ2_3mutA_WS |
| GSSPAPEAAAK | 4212 | KORV_Q9TTC1_3mutA |
| PAP | | BAEVM_P10272_3mutA |
| GGSPAP | 4143 | BAEVM_P10272_3mutA |
| PAPEAAAKGGS | 4192 | MLVMS_P03355_PLV919 |
| PAPGSSGGS | 4186 | PERV_Q4VFZ2_3mutA_WS |
| PAPAPAPAPAPAP | 4136 | PERV_Q4VFZ2_3mut |
| EAAAKEAAAKEAAAK | 4127 | MLVCB_P08361_3mut |
| GGSGGSGGSGGSGGS | 4105 | MLVMS_P03355_PLV919 |
| EAAAKPAPGGS | 4190 | MLVMS_P03355_3mut |
| GGSGGS | 4102 | MLVMS_P03355_PLV919 |
| EAAAKPAP | 4155 | MLVMS_P03355_3mutA_WS |
| GGSEAAAK | 4141 | XMRV6_A1Z651_3mutA |
| GGSGGG | 4137 | KORV_Q9TTC1_3mut |
| GGSGGGEAAAK | 4163 | PERV_Q4VFZ2_3mut |
| PAPEAAAKGGG | 4210 | AVIRE_P03360 |
| PAPAP | 4132 | PERV_Q4VFZ2_3mut |
| GSS | | KORV_Q9TTC1-Pro_3mutA |
| EAAAKGSSGGG | 4198 | MLVAV_P03356_3mutA |
| GGSPAPGSS | 4182 | MLVBM_Q7SVK7_3mutA_WS |
| PAPEAAAK | 4156 | MLVAV_P03356_3mut |
| EAAAKGGSPAP | 4189 | BAEVM_P10272_3mutA |
| PAPAPAPAP | 4134 | WMSV_P03359_3mutA |
| PAPGGSEAAAK | 4191 | MLVMS_P03355_3mut |
| GGSGGSGGSGGS | 4104 | WMSV_P03359_3mut |
| GGGGGSGSS | 4159 | XMRV6_A1Z651_3mut |
| PAPGGSGGG | 4173 | KORV_Q9TTC1_3mutA |
| GGS | | MLVMS_P03355_3mut |
| EAAAK | 4028 | WMSV_P03359_3mut |
| GGGEAAAKGSS | 4194 | MLVBM_Q7SVK7_3mutA_WS |
| GGSPAPGSS | 4182 | MLVCB_P08361_3mut |
| GGSEAAAKPAP | 4187 | PERV_Q4VFZ2_3mut |
| GGGGSGGGGSGGGGSGGGGSGGGGS | 4111 | MLVCB_P08361_3mutA |
| GGSGSS | 4139 | BAEVM_P10272_3mutA |
| GGGEAAAKGSS | 4194 | WMSV_P03359_3mutA |
| EAAAKGGSPAP | 4189 | WMSV_P03359_3mut |
| GSSPAPEAAAK | 4212 | MLVMS_P03355_3mut |
| GGSGGSGGSGGS | 4104 | MLVMS_P03355_PLV919 |
| GSSPAPEAAAK | 4212 | WMSV_P03359_3mut |
| GSSGSSGSSGSS | 4122 | PERV_Q4VFZ2 |
| GGSGSSEAAAK | 4175 | WMSV_P03359_3mutA |
| GGSGGG | 4137 | MLVFF_P26809_3mut |
| GGSPAPGGG | 4170 | MLVFF_P26809_3mut |
| GGSGGSGGS | 4103 | BAEVM_P10272_3mutA |
| GGGGSSEAAAK | 4193 | MLVBM_Q7SVK7_3mut |
| GGSPAPGSS | 4182 | MLVMS_P03355_3mut |
| EAAAKPAPGSS | 4214 | AVIRE_P03360_3mut |
| GGGGSSGGS | 4160 | FLV_P10273_3mutA |
| GGSPAPEAAAK | 4188 | PERV_Q4VFZ2_3mut |
| GGSEAAAK | 4141 | MLVMS_P03355_3mutA_WS |
| GSSGSSGSSGSS | 4122 | MLVCB_P08361_3mutA |
| EAAAKEAAAKEAAAKEAAAKEAAAK | 4129 | MLVMS_P03355_PLV919 |
| GGGGG | 4115 | PERV_Q4VFZ2_3mut |
| GGSEAAAKGSS | 4176 | MLVCB_P08361_3mutA |
| GSSGGG | 4146 | MLVBM_Q7SVK7_3mutA_WS |
| PAPGSSGGG | 4204 | KORV_Q9TTC1-Pro_3mutA |
| GGSGGS | 4102 | BAEVM_P10272_3mut |
| EAAAKGGGGGS | 4168 | MLVBM_Q7SVK7_3mutA_WS |
| GGSGSSPAP | 4181 | MLVCB_P08361_3mut |
| PAPGSSGGG | 4204 | KORV_Q9TTC1 |
| PAPGGSGGG | 4173 | MLVMS_P03355_3mut |
| GGGG | 4114 | WMSV_P03359_3mutA |
| EAAAKGGSPAP | 4189 | MLVCB_P08361_3mut |
| GSSGSS | 4120 | FLV_P10273_3mutA |
| GGSEAAAKPAP | 4187 | SFV3L_P27401_2mut |
| EAAAKGSSGGS | 4180 | MLVAV_P03356_3mutA |
| AEAAAKEAAAKEAAAKEAAAKALEAEAAAKEAAAKEAAAKEAAAKA | 4217 | MLVAV_P03356_3mutA |
| EAAAKGGSGSS | 4179 | PERV_Q4VFZ2_3mutA_WS |
| GGGGG | 4115 | MLVCB_P08361_3mut |
| GGGEAAAK | 4147 | BAEVM_P10272_3mut |
| GGSGGSGGSGGS | 4104 | MLVCB_P08361_3mut |
| EAAAKEAAAKEAAAKEAAAKEAAAKEAAAK | 4130 | PERV_Q4VFZ2 |
| PAPAPAPAPAP | 4135 | MLVMS_P03355_3mutA_WS |
| EAAAKEAAAK | 4126 | XMRV6_A1Z651_3mut |
| GSSGGSEAAAK | 4177 | PERV_Q4VFZ2_3mutA_WS |
| PAPGGSEAAAK | 4191 | KORV_Q9TTC1-Pro_3mutA |
| EAAAKGGGPAP | 4207 | MLVBM_Q7SVK7_3mutA_WS |
| PAPGGSGSS | 4185 | PERV_Q4VFZ2 |
| SGSETPGTSESATPES | 4220 | MLVMS_P03355_3mut |
| GGSGGS | 4102 | MLVMS_P03355_PLV919 |
| EAAAKGGS | 4142 | FLV_P10273_3mut |
| GGSPAPGSS | 4182 | MLVMS_P03355_3mutA_WS |
| EAAAKEAAAKEAAAKEAAAK | 4128 | FFV_O93209_2mut |
| GSSGGSGGG | 4161 | MLVMS_P03355_3mutA_WS |
| PAPGSSEAAAK | 4215 | WMSV_P03359_3mut |
| PAPAPAPAPAPAP | 4136 | KORV_Q9TTC1_3mutA |
| GGGGSS | 4145 | BAEVM_P10272_3mut |
| GGGGSEAAAKGGGGS | 4218 | AVIRE_P03360_3mut |
| GSSPAPEAAAK | 4212 | KORV_Q9TTC1-Pro_3mutA |
| PAPEAAAKGGG | 4210 | MLVBM_Q7SVK7_3mut |
| EAAAKEAAAK | 4126 | WMSV_P03359_3mut |
| EAAAK | 4028 | SFV3L_P27401-Pro_2mutA |
| GSSGGSGGG | 4161 | XMRV6_A1Z651_3mutA |
| GGGEAAAKPAP | 4205 | WMSV_P03359_3mutA |
| GGSGGS | 4102 | MLVFF_P26809_3mutA |
| EAAAKEAAAKEAAAKEAAAKEAAAKEAAAK | 4130 | FOAMV_P14350_2mutA |
| GGGGG | 4115 | MLVAV_P03356_3mutA |
| GSSGGSEAAAK | 4177 | BAEVM_P10272_3mut |
| SGGSSGGSSGSETPGTSESATPESSGGSSGGSS | 4006 | SFV1_P23074 |
| GGSGGGPAP | 4169 | MLVCB_P08361_3mut |
| GGSGSS | 4139 | PERV_Q4VFZ2_3mut |
| SGSETPGTSESATPES | 4220 | MLVFF_P26809_3mut |
| EAAAKGGSPAP | 4189 | MLVMS_P03355_3mut |
| PAPAP | 4132 | PERV_Q4VFZ2_3mut |
| AEAAAKEAAAKEAAAKEAAAKALEAEAAAKEAAAKEAAAKEAAAKA | 4217 | MLVBM_Q7SVK7_3mut |
| GGGGGS | 4138 | BAEVM_P10272_3mutA |
| EAAAKEAAAK | 4126 | AVIRE_P03360_3mut |
| GSSGGSEAAAK | 4177 | PERV_Q4VFZ2_3mut |
| GGGEAAAK | 4147 | WMSV_P03359_3mut |
| GSSGGGEAAAK | 4195 | AVIRE_P03360_3mutA |
| GGG | | XMRV6_A1Z651_3mut |
| GGGGSEAAAKGGGGS | 4218 | BAEVM_P10272_3mut |
| GGGG | 4114 | MLVMS_P03355_3mut |
| GGSGGS | 4102 | MLVMS_P03355_3mutA_WS |
| GGSGGGGSS | 4157 | MLVBM_Q7SVK7_3mutA_WS |
| GSSPAPGGS | 4184 | PERV_Q4VFZ2_3mut |
| GSSPAPEAAAK | 4212 | PERV_Q4VFZ2_3mutA_WS |
| EAAAKGGS | 4142 | WMSV_P03359_3mut |
| GGSGGSGGSGGS | 4104 | PERV_Q4VFZ2_3mut |
| GGGGSSEAAAK | 4193 | KORV_Q9TTC1-Pro_3mut |
| PAPAPAPAPAPAP | 4136 | MLVAV_P03356_3mut |
| EAAAKGSSGGG | 4198 | MLVMS_P03355_PLV919 |
| GGGGG | 4115 | MLVBM_Q7SVK7_3mutA_WS |
| AEAAAKEAAAKEAAAKEAAAKALEAEAAAKEAAAKEAAAKEAAAKA | 4217 | FFV_O93209_2mutA |
| SGGSSGGSSGSETPGTSESATPESSGGSSGGSS | 4006 | KORV_Q9TTC1-Pro_3mut |
| GGSPAPGGG | 4170 | MLVMS_P03355_3mutA_WS |
| GGGEAAAKGGS | 4166 | MLVMS_P03355_3mut |
| GGGEAAAK | 4147 | PERV_Q4VFZ2_3mut |
| PAPEAAAKGGG | 4210 | MLVMS_P03355_3mut |
| GSSGSSGSSGSSGSSGSS | 4124 | BAEVM_P10272_3mutA |
| AEAAAKEAAAKEAAAKEAAAKALEAEAAAKEAAAKEAAAKEAAAKA | 4217 | GALV_P21414_3mutA |
| EAAAKGGSPAP | 4189 | FFV_O93209-Pro |
| EAAAKEAAAK | 4126 | MLVFF_P26809_3mut |
| GGGGSGGGGSGGGGSGGGGSGGGGSGGGGS | 4112 | PERV_Q4VFZ2_3mutA_WS |
| GGSGGSGGSGGS | 4104 | MLVAV_P03356_3mutA |
| EAAAKEAAAKEAAAKEAAAKEAAAK | 4129 | SFV3L_P27401_2mutA |
| GSSGSSGSSGSSGSSGSS | 4124 | BAEVM_P10272_3mut |
| GGGGS | 4027 | MLVMS_P03355_PLV919 |
| AEAAAKEAAAKEAAAKEAAAKALEAEAAAKEAAAKEAAAKEAAAKA | 4217 | SFV1_P23074 |
| GGGGSGGGGS | 4108 | KORV_Q9TTC1-Pro_3mutA |
| GGGGSGGGGS | 4108 | MLVMS_P03355_3mut |
| GGSGSS | 4139 | KORV_Q9TTC1_3mutA |
| GSSPAPGGG | 4202 | PERV_Q4VFZ2_3mut |
| GSSGGSPAP | 4183 | PERV_Q4VFZ2_3mutA_WS |
| PAPGGS | 4144 | PERV_Q4VFZ2_3mutA_WS |
| GGSPAPEAAAK | 4188 | FOAMV_P14350_2mutA |
| GGGPAPGGS | 4172 | SFV3L_P27401_2mut |
| PAPGSSGGG | 4204 | MLVCB_P08361_3mut |
| GSSGGGEAAAK | 4195 | AVIRE_P03360_3mut |
| GSSGGG | 4146 | XMRV6_A1Z651_3mut |
| GSSGSS | 4120 | PERV_Q4VFZ2_3mut |
| GSSGGG | 4146 | MLVAV_P03356_3mutA |
| PAPGGGGGS | 4174 | PERV_Q4VFZ2_3mut |
| GSSEAAAK | 4151 | MLVMS_P03355_3mut |
| PAPGGG | 4150 | FLV_P10273_3mutA |
| GGGGSGGGGS | 4108 | PERV_Q4VFZ2_3mut |
| GSSGGS | 4140 | MLVMS_P03355_PLV919 |
| GGGGSGGGGS | 4108 | SFV3L_P27401_2mut |
| EAAAKGGSGSS | 4179 | FLV_P10273_3mutA |
| GSSEAAAKGGS | 4178 | MLVMS_P03355_3mutA_WS |
| PAPGSSEAAAK | 4215 | SFV3L_P27401_2mutA |
| GGGGSGGGGS | 4108 | SFV3L_P27401-Pro_2mutA |
| PAPGSSEAAAK | 4215 | PERV_Q4VFZ2_3mut |
| PAPGSSEAAAK | 4215 | PERV_Q4VFZ2 |
| GGSPAPGGG | 4170 | AVIRE_P03360_3mut |
| GGGGGS | 4138 | PERV_Q4VFZ2_3mutA_WS |
| GGGGSSGGS | 4160 | PERV_Q4VFZ2_3mut |
| PAPAPAPAP | 4134 | AVIRE_P03360_3mutA |
| GGSGGS | 4102 | WMSV_P03359_3mutA |
| GGGPAPGGS | 4172 | PERV_Q4VFZ2_3mut |
| GGSGGSGGSGGSGGS | 4105 | MLVMS_P03355_PLV919 |
| GGSGGG | 4137 | PERV_Q4VFZ2_3mut |
| EAAAKEAAAK | 4126 | SFV3L_P27401_2mut |
| PAPGSS | 4154 | XMRV6_A1Z651_3mut |
| GSSEAAAK | 4151 | MLVFF_P26809_3mut |
| GGSPAPGGG | 4170 | MLVMS_P03355_3mut |
| EAAAKGGG | 4148 | WMSV_P03359_3mutA |
| GSSEAAAKGGS | 4178 | PERV_Q4VFZ2_3mutA_WS |
| GSSGGSPAP | 4183 | FFV_O93209 |
| GGGGGS | 4138 | KORV_Q9TTC1-Pro_3mut |
| GSSGGG | 4146 | MLVCB_P08361_3mut |
| GSSGSS | 4120 | MLVCB_P08361_3mutA |
| GGSEAAAKPAP | 4187 | BAEVM_P10272_3mut |
| EAAAKGGGGSS | 4197 | MLVCB_P08361_3mut |
| EAAAKPAPGGS | 4190 | KORV_Q9TTC1-Pro_3mutA |
| GSSGSSGSSGSSGSS | 4123 | MLVAV_P03356_3mutA |
| GGGGSEAAAKGGGGS | 4218 | PERV_Q4VFZ2_3mutA_WS |
| GGSGSS | 4139 | KORV_Q9TTC1-Pro_3mut |
| GSS | | SFV3L_P27401-Pro_2mutA |
| PAPAP | 4132 | BAEVM_P10272_3mut |
| EAAAKPAP | 4155 | BAEVM_P10272 |
| EAAAKEAAAKEAAAKEAAAKEAAAK | 4129 | KORV_Q9TTC1-Pro_3mut |
| GGGGGGG | 4117 | PERV_Q4VFZ2_3mutA_WS |
| GGGGS | 4027 | MLVMS_P03355_3mut |
| GSSGGG | 4146 | FLV_P10273_3mutA |
| PAPAPAPAPAP | 4135 | FLV_P10273_3mut |
| EAAAKEAAAKEAAAK | 4127 | WMSV_P03359_3mutA |
| GSSGGS | 4140 | MLVBM_Q7SVK7_3mutA_WS |
| EAAAKPAPGGG | 4208 | MLVMS_P03355_3mut |
| GSSPAPGGS | 4184 | WMSV_P03359_3mut |
| PAPGSSGGG | 4204 | PERV_Q4VFZ2_3mutA_WS |
| GSSGGG | 4146 | AVIRE_P03360_3mutA |
| PAPGGSGSS | 4185 | MLVFF_P26809_3mut |
| PAPGSS | 4154 | PERV_Q4VFZ2_3mut |
| GGGGGSGSS | 4159 | WMSV_P03359_3mutA |
| EAAAKGGGGSS | 4197 | MLVBM_Q7SVK7_3mutA_WS |
| GGGGGGG | 4117 | BAEVM_P10272_3mut |
| PAPEAAAKGSS | 4216 | MLVMS_P03355_3mut |
| GGSGGGEAAAK | 4163 | MLVMS_P03355_PLV919 |
| EAAAKGGGGGS | 4168 | MLVCB_P08361_3mut |
| PAPGGS | 4144 | KORV_Q9TTC1-Pro_3mut |
| GGGG | 4114 | FLV_P10273_3mutA |
| EAAAKGGSGSS | 4179 | MLVBM_Q7SVK7_3mutA_WS |
| GGGGSSGGS | 4160 | MLVMS_P03355_3mutA_WS |
| GGGGGGGG | 4118 | WMSV_P03359_3mut |
| GGSGSSGGG | 4158 | MLVMS_P03355_PLV919 |
| GSSEAAAKGGS | 4178 | KORV_Q9TTC1-Pro_3mutA |
| EAAAKPAPGSS | 4214 | MLVCB_P08361_3mut |
| GGSPAPGSS | 4182 | KORV_Q9TTC1_3mutA |
| PAPGSSGGG | 4204 | BAEVM_P10272_3mut |
| EAAAKPAPGSS | 4214 | WMSV_P03359_3mut |
| GGSPAPEAAAK | 4188 | XMRV6_A1Z651_3mutA |
| GSSPAP | 4153 | FLV_P10273_3mutA |
| GSS | | BAEVM_P10272_3mutA |
| EAAAKPAPGGS | 4190 | FLV_P10273_3mutA |
| GGSGSSPAP | 4181 | FLV_P10273_3mutA |
| PAPGSSGGS | 4186 | MLVMS_P03355_3mut |
| GSAGSAAGSGEF | 4221 | PERV_Q4VFZ2_3mutA_WS |
| GSSGGSEAAAK | 4177 | KORV_Q9TTC1_3mutA |
| GSSGGS | 4140 | MLVMS_P03355_3mutA_WS |
| EAAAKGGGGSEAAAK | 4219 | SFV3L_P27401_2mut |
| GSSGGS | 4140 | PERV_Q4VFZ2_3mutA_WS |
| GGSPAPEAAAK | 4188 | FLV_P10273_3mut |
| GGSEAAAKGSS | 4176 | PERV_Q4VFZ2_3mutA_WS |
| GSSPAPEAAAK | 4212 | PERV_Q4VFZ2_3mutA_WS |
| GGSGSSGGG | 4158 | PERV_Q4VFZ2_3mut |
| GGGG | 4114 | AVIRE_P03360_3mutA |
| GGSEAAAKPAP | 4187 | WMSV_P03359_3mut |
| GSSGGSPAP | 4183 | MLVAV_P03356_3mutA |
| GSSGGSEAAAK | 4177 | MLVMS_P03355_3mut |
| PAPEAAAKGGS | 4192 | KORV_Q9TTC1-Pro_3mut |
| GGSPAP | 4143 | PERV_Q4VFZ2_3mutA_WS |
| GGSEAAAK | 4141 | MLVAV_P03356_3mutA |
| EAAAKGGGGSEAAAK | 4219 | KORV_Q9TTC1-Pro_3mut |
| SGGSSGGSSGSETPGTSESATPESSGGSSGGSS | 4006 | MLVMS_P03355_PLV919 |
| GSSEAAAK | 4151 | KORV_Q9TTC1_3mutA |
| GGG | | AVIRE_P03360 |
| GGSEAAAKGSS | 4176 | MLVBM_Q7SVK7_3mut |
| GGSEAAAKGSS | 4176 | MLVMS_P03355_3mut |
| GGSPAPEAAAK | 4188 | MLVCB_P08361_3mut |
| GGSGGGEAAAK | 4163 | MLVCB_P08361_3mut |
| GGSEAAAKPAP | 4187 | MLVMS_P03355_3mutA_WS |
| EAAAKGGSGSS | 4179 | KORV_Q9TTC1-Pro_3mut |
| GGGEAAAKGGS | 4166 | MLVCB_P08361_3mut |
| EAAAKGGGGSEAAAK | 4219 | FLV_P10273_3mutA |
| GGSPAP | 4143 | MLVFF_P26809_3mut |
| GGGGSSGGS | 4160 | XMRV6_A1Z651_3mutA |
| PAP | | MLVCB_P08361_3mut |
| GGS | | SFV3L_P27401-Pro_2mutA |
| GGGGSGGGGS | 4108 | MLVMS_P03355_3mut |
| GGGEAAAKGGS | 4166 | MLVAV_P03356_3mutA |
| GSSGSSGSSGSSGSSGSS | 4124 | MLVMS_P03355_PLV919 |
| PAPGSS | 4154 | MLVCB_P08361_3mut |
| GGSGGSGGS | 4103 | MLVMS_P03355_PLV919 |
| PAPGGSGGG | 4173 | FLV_P10273_3mutA |
| GGGGSGGGGSGGGGS | 4109 | FLV_P10273_3mut |
| GGSGSSGGG | 4158 | KORV_Q9TTC1-Pro_3mutA |
| GGSGGSGGS | 4103 | GALV_P21414_3mutA |
| GGGEAAAKGGS | 4166 | WMSV_P03359_3mut |
| SGSETPGTSESATPES | 4220 | KORV_Q9TTC1_3mutA |
| EAAAKGGGGGS | 4168 | KORV_Q9TTC1-Pro_3mut |
| EAAAKGSSPAP | 4213 | BAEVM_P10272_3mut |
| GGGG | 4114 | MLVCB_P08361_3mut |
| GGGGSGGGGSGGGGSGGGGSGGGGS | 4111 | MLVBM_Q7SVK7_3mut |
| GSSGGSGGG | 4161 | MLVMS_P03355_PLV919 |
| GGSGSS | 4139 | MLVFF_P26809_3mut |
| EAAAKGGS | 4142 | AVIRE_P03360_3mutA |
| GSSEAAAKGGS | 4178 | MLVBM_Q7SVK7_3mutA_WS |
| EAAAKPAPGGG | 4208 | WMSV_P03359_3mut |
| PAPGSSGGG | 4204 | MLVCB_P08361_3mutA |
| GGGGSSEAAAK | 4193 | KORV_Q9TTC1-Pro_3mutA |
| GSSEAAAKPAP | 4211 | BAEVM_P10272_3mutA |
| PAPGGGEAAAK | 4209 | MLVBM_Q7SVK7_3mutA_WS |
| GGSGGGEAAAK | 4163 | MLVCB_P08361_3mutA |
| GGGGSGGGGSGGGGSGGGGSGGGGSGGGGS | 4112 | FFV_O93209 |
| EAAAKGGGGGS | 4168 | GALV_P21414_3mutA |
| GGSPAPGGG | 4170 | MLVMS_P03355_3mut |
| GSSGSSGSS | 4121 | FLV_P10273_3mutA |
| EAAAK | 4028 | MLVBM_Q7SVK7_3mut |
| GGGGSSGGS | 4160 | MLVMS_P03355_3mut |
| GGSGSSPAP | 4181 | PERV_Q4VFZ2_3mut |
| EAAAKEAAAKEAAAKEAAAK | 4128 | BAEVM_P10272_3mut |
| GGGPAPGSS | 4200 | MLVMS_P03355_3mut |
| GSSPAPGGS | 4184 | PERV_Q4VFZ2_3mutA_WS |
| PAPAP | 4132 | FLV_P10273_3mutA |
| PAPAPAPAP | 4134 | PERV_Q4VFZ2_3mut |
| GGGGGSEAAAK | 4165 | GALV_P21414_3mutA |
| GGGGGSGSS | 4159 | BAEVM_P10272_3mutA |
| GGGEAAAKGSS | 4194 | KORV_Q9TTC1_3mutA |
| GGGGGSPAP | 4171 | AVIRE_P03360_3mut |
| GGGGGSEAAAK | 4165 | SFV3L_P27401_2mutA |
| GGS | | KORV_Q9TTC1_3mutA |
| GGGGGGG | 4117 | PERV_Q4VFZ2_3mut |
| SGSETPGTSESATPES | 4220 | SFV3L_P27401_2mutA |
| EAAAKGGSGGG | 4167 | MLVMS_P03355_3mut |
| GGGGS | 4027 | MLVFF_P26809_3mut |
| EAAAKGSSGGG | 4198 | BAEVM_P10272_3mut |
| EAAAKPAPGGS | 4190 | MLVF5_P26810_3mutA |
| SGGSSGGSSGSETPGTSESATPESSGGSSGGSS | 4006 | SFV3L_P27401_2mutA |
| GGSPAPGGG | 4170 | WMSV_P03359_3mutA |
| GSAGSAAGSGEF | 4221 | MLVFF_P26809_3mut |
| GGGGSSGGS | 4160 | MLVMS_P03355_3mutA_WS |
| GGGGGGG | 4117 | MLVCB_P08361_3mut |
| GSSEAAAK | 4151 | WMSV_P03359_3mut |
| PAPGSS | 4154 | FLV_P10273_3mutA |
| GSSGGG | 4146 | PERV_Q4VFZ2_3mutA_WS |
| PAPGGG | 4150 | MLVFF_P26809_3mut |
| GGGGGSPAP | 4171 | MLVMS_P03355_3mut |
| GGSEAAAK | 4141 | XMRV6_A1Z651_3mut |
| GSSGGG | 4146 | PERV_Q4VFZ2_3mut |
| GGSGGSGGSGGS | 4104 | MLVMS_P03355_3mut |
| PAPAP | 4132 | AVIRE_P03360_3mut |
| GGSEAAAK | 4141 | PERV_Q4VFZ2_3mut |
| GGGGS | 4027 | MLVMS_P03355_PLV919 |
| GGGG | 4114 | BAEVM_P10272_3mutA |
| EAAAKGGGGSS | 4197 | MLVCB_P08361_3mutA |
| EAAAKEAAAKEAAAK | 4127 | GALV_P21414_3mutA |
| PAPGGGEAAAK | 4209 | KORV_Q9TTC1 |
| EAAAKGGSPAP | 4189 | MLVMS_P03355_3mut |
| GGSGSSEAAAK | 4175 | MLVMS_P03355_3mut |
| GGSPAPEAAAK | 4188 | FLV_P10273_3mutA |
| GGGGGGG | 4117 | PERV_Q4VFZ2_3mut |
| EAAAKEAAAKEAAAKEAAAKEAAAKEAAAK | 4130 | SFV1_P23074_2mutA |
| EAAAKGSSGGS | 4180 | MLVMS_P03355_3mut |
| GSSEAAAKPAP | 4211 | MLVFF_P26809_3mut |
| GGGGSS | 4145 | FLV_P10273_3mutA |
| EAAAKGGSGGG | 4167 | AVIRE_P03360_3mutA |
| GGSGGS | 4102 | PERV_Q4VFZ2_3mutA_WS |
| GGGGGSPAP | 4171 | AVIRE_P03360_3mutA |
| EAAAKEAAAKEAAAK | 4127 | XMRV6_A1Z651_3mut |
| PAPEAAAKGGS | 4192 | FLV_P10273_3mutA |
| GSSGGSEAAAK | 4177 | MLVCB_P08361_3mut |
| EAAAKGGSGGG | 4167 | MLVMS_P03355 |
| GGSGGGPAP | 4169 | MLVMS_P03355_3mut |
| GGS | | XMRV6_A1Z651_3mut |
| GGSEAAAKPAP | 4187 | MLVFF_P26809_3mut |
| EAAAKGGG | 4148 | MLVMS_P03355_PLV919 |
| GSSGSSGSSGSS | 4122 | WMSV_P03359_3mut |
| GGSGSSPAP | 4181 | PERV_Q4VFZ2_3mut |
| GGGEAAAK | 4147 | MLVMS_P03355_3mutA_WS |
| GSSPAPGGS | 4184 | KORV_Q9TTC1-Pro_3mutA |
| GSSEAAAKGGG | 4196 | SFV3L_P27401_2mut |
| EAAAKPAPGGS | 4190 | MLVCB_P08361_3mut |
| GGSGGGEAAAK | 4163 | PERV_Q4VFZ2 |
| GGSGSS | 4139 | MLVCB_P08361_3mut |
| GGSGGGEAAAK | 4163 | MLVBM_Q7SVK7_3mutA_WS |
| GGSGGSGGSGGSGGSGGS | 4106 | FLV_P10273_3mut |
| PAPEAAAKGSS | 4216 | MLVMS_P03355_3mut |
| EAAAKGSSGGS | 4180 | WMSV_P03359_3mutA |
| GGSGSSEAAAK | 4175 | MLVCB_P08361_3mut |
| GGSGSSEAAAK | 4175 | KORV_Q9TTC1_3mutA |
| GSSGGSGGG | 4161 | MLVMS_P03355_PLV919 |
| EAAAKGGSGGG | 4167 | SFV3L_P27401-Pro_2mutA |
| GGSGGS | 4102 | AVIRE_P03360_3mutA |
| GSAGSAAGSGEF | 4221 | MLVMS_P03355_PLV919 |
| GGSGSS | 4139 | GALV_P21414_3mutA |
| GGGG | 4114 | MLVFF_P26809_3mutA |
| GGGGSGGGGSGGGGSGGGGS | 4110 | WMSV_P03359_3mut |
| SGSETPGTSESATPES | 4220 | BAEVM_P10272_3mut |
| EAAAKEAAAKEAAAKEAAAK | 4128 | FOAMV_P14350_2mutA |
| GGGEAAAKGGS | 4166 | FLV_P10273_3mutA |
| GSSGGSEAAAK | 4177 | MLVFF_P26809_3mut |
| EAAAKGGGGSS | 4197 | MLVAV_P03356_3mut |
| PAPGGSEAAAK | 4191 | KORV_Q9TTC1-Pro_3mut |
| EAAAK | 4028 | XMRV6_A1Z651_3mut |
| GSSGSSGSSGSSGSSGSS | 4124 | PERV_Q4VFZ2_3mut |
| GGGG | 4114 | MLVCB_P08361_3mutA |
| GSSGSS | 4120 | WMSV_P03359_3mutA |
| GSSGGSPAP | 4183 | AVIRE_P03360_3mut |
| GGSGGSGGS | 4103 | MLVCB_P08361_3mut |
| EAAAKGGGPAP | 4207 | FLV_P10273_3mutA |
| GGGGSGGGGS | 4108 | MLVCB_P08361_3mut |
| GGSEAAAKGSS | 4176 | PERV_Q4VFZ2_3mutA_WS |
| EAAAKEAAAKEAAAKEAAAKEAAAKEAAAK | 4130 | SFV3L_P27401_2mutA |
| GGSGSSEAAAK | 4175 | PERV_Q4VFZ2_3mutA_WS |
| EAAAKEAAAKEAAAKEAAAK | 4128 | SFV3L_P27401-Pro_2mutA |
| GSSEAAAKGGS | 4178 | FLV_P10273_3mutA |
| GGSGSS | 4139 | PERV_Q4VFZ2 |
| GGSGSSEAAAK | 4175 | SFV3L_P27401-Pro_2mutA |
| GSSGSSGSS | 4121 | XMRV6_A1Z651_3mutA |
| EAAAKGSSPAP | 4213 | KORV_Q9TTC1_3mutA |
| EAAAKPAP | 4155 | FLV_P10273_3mutA |
| GGSGSSEAAAK | 4175 | KORV_Q9TTC1-Pro_3mut |
| GGGGSGGGGSGGGGSGGGGSGGGGSGGGGS | 4112 | KORV_Q9TTC1_3mutA |
| GGGGSGGGGSGGGGS | 4109 | KORV_Q9TTC1-Pro_3mutA |
| GGGGGGG | 4117 | FLV_P10273_3mut |
| EAAAKGSS | 4152 | WMSV_P03359_3mut |
| EAAAKGGGPAP | 4207 | MLVCB_P08361_3mut |
| GSSGSS | 4120 | MLVBM_Q7SVK7_3mutA_WS |
| EAAAKGGGGGS | 4168 | MLVFF_P26809_3mut |
| GGSGGGEAAAK | 4163 | FLV_P10273_3mutA |
| PAPGSS | 4154 | MLVFF_P26809_3mutA |
| PAPGSS | 4154 | BAEVM_P10272_3mutA |
| GGSPAPGSS | 4182 | AVIRE_P03360_3mut |
| GGGGSSEAAAK | 4193 | MLVMS_P03355_3mut |
| GSSGGGGGS | 4162 | FFV_O93209-Pro |
| EAAAKGSSPAP | 4213 | PERV_Q4VFZ2_3mut |
| GSSPAPGGS | 4184 | PERV_Q4VFZ2_3mut |
| GGGGGG | 4116 | BAEVM_P10272_3mut |
| EAAAKGGGGSS | 4197 | PERV_Q4VFZ2_3mutA_WS |
| PAPGGSEAAAK | 4191 | KORV_Q9TTC1_3mutA |
| SGGSSGGSSGSETPGTSESATPESSGGSSGGSS | 4006 | MLVMS_P03355_3mutA_WS |
| GSSGSSGSSGSS | 4122 | MLVMS_P03355_3mut |
| EAAAKGSSGGG | 4198 | MLVMS_P03355_PLV919 |
| GGSEAAAKPAP | 4187 | AVIRE_P03360_3mutA |
| GSSGSSGSSGSSGSS | 4123 | WMSV_P03359_3mutA |
| GGGEAAAKPAP | 4205 | FLV_P10273_3mutA |
| PAPGSSGGG | 4204 | KORV_Q9TTC1_3mutA |
| GSSGSS | 4120 | MLVMS_P03355_3mutA_WS |
| PAPEAAAK | 4156 | BAEVM_P10272_3mut |
| GGGPAPGSS | 4200 | PERV_Q4VFZ2 |
| GSSGGSPAP | 4183 | MLVFF_P26809_3mut |
| GGGGSS | 4145 | SFV3L_P27401_2mut |
| PAPEAAAKGSS | 4216 | SFV3L_P27401_2mut |
| GGSGGGPAP | 4169 | XMRV6_A1Z651_3mutA |
| PAPGGS | 4144 | BAEVM_P10272_3mutA |
| EAAAKGGGGGS | 4168 | AVIRE_P03360_3mut |
| GSSGGSPAP | 4183 | KORV_Q9TTC1-Pro_3mutA |
| GSSGGGGGS | 4162 | WMSV_P03359_3mut |
| GGGEAAAKGGS | 4166 | AVIRE_P03360_3mut |
| GGGEAAAKGSS | 4194 | BAEVM_P10272_3mut |
| PAPEAAAKGSS | 4216 | MLVAV_P03356_3mutA |
| GSSGSSGSSGSSGSS | 4123 | MLVCB_P08361_3mut |
| GGSPAPGSS | 4182 | FLV_P10273_3mutA |
| EAAAKGSSPAP | 4213 | BAEVM_P10272_3mutA |
| GGSGGSGGSGGSGGSGGS | 4106 | PERV_Q4VFZ2 |
| GGGGSSEAAAK | 4193 | FLV_P10273_3mutA |
| GGGGSSPAP | 4199 | FFV_O93209 |
| GSSGGSPAP | 4183 | MLVMS_P03355_3mut |
| GGGPAPGSS | 4200 | MLVMS_P03355_PLV919 |
| PAPGSSGGS | 4186 | PERV_Q4VFZ2_3mut |
| GGGGGSPAP | 4171 | MLVFF_P26809_3mut |
| SGSETPGTSESATPES | 4220 | MLVMS_P03355_3mutA_WS |
| GSSGSSGSSGSSGSS | 4123 | KORV_Q9TTC1_3mutA |
| GSSPAPGGG | 4202 | WMSV_P03359_3mut |
| PAPAPAPAPAPAP | 4136 | SFV3L_P27401_2mutA |
| GGGPAPGGS | 4172 | MLVMS_P03355_3mut |
| PAPGGSEAAAK | 4191 | WMSV_P03359_3mut |
| GGGGSSEAAAK | 4193 | FFV_O93209-Pro |
| GGSPAPGGG | 4170 | FLV_P10273_3mutA |
| GSSPAPEAAAK | 4212 | AVIRE_P03360_3mut |
| GGGEAAAK | 4147 | FLV_P10273_3mutA |
| PAPEAAAKGGG | 4210 | MLVCB_P08361_3mut |
| GGSPAPGGG | 4170 | MLVCB_P08361_3mut |
| GGSGGGGSS | 4157 | BAEVM_P10272_3mutA |
| GSSPAPEAAAK | 4212 | MLVCB_P08361_3mut |
| GGSPAPGGG | 4170 | KORV_Q9TTC1-Pro_3mutA |
| PAPGGSGSS | 4185 | KORV_Q9TTC1_3mutA |
| GSSPAP | 4153 | KORV_Q9TTC1-Pro_3mutA |
| SGSETPGTSESATPES | 4220 | MLVMS_P03355 |
| GSSGSSGSS | 4121 | MLVAV_P03356_3mutA |
| PAPGSSGGS | 4186 | PERV_Q4VFZ2_3mutA_WS |
| PAPGGS | 4144 | KORV_Q9TTC1-Pro_3mutA |
| PAPEAAAKGGG | 4210 | SFV3L_P27401-Pro_2mutA |
| GGSGGSGGS | 4103 | BAEVM_P10272_3mut |
| PAPGGS | 4144 | MLVFF_P26809_3mut |
| GSSGGSPAP | 4183 | MLVMS_P03355_PLV919 |
| GSSGGGGGS | 4162 | FLV_P10273_3mutA |
| GGGGGSPAP | 4171 | KORV_Q9TTC1-Pro_3mut |
| EAAAKPAPGSS | 4214 | SFV3L_P27401-Pro_2mutA |
| EAAAKGGSPAP | 4189 | KORV_Q9TTC1-Pro |
| GGGPAPEAAAK | 4206 | MLVMS_P03355_PLV919 |
| GGSEAAAKGSS | 4176 | MLVMS_P03355 |
| PAPEAAAKGSS | 4216 | KORV_Q9TTC1_3mutA |
| PAPEAAAKGGS | 4192 | WMSV_P03359_3mutA |
| GSSGGG | 4146 | PERV_Q4VFZ2_3mutA_WS |
| EAAAKGGGGSS | 4197 | MLVMS_P03355_PLV919 |
| EAAAKGGSPAP | 4189 | AVIRE_P03360_3mutA |
| GGGGSSGGS | 4160 | MLVMS_P03355_PLV919 |
| PAPEAAAKGSS | 4216 | PERV_Q4VFZ2_3mutA_WS |
| EAAAKGGGGGS | 4168 | BAEVM_P10272_3mut |
| GSSGGGGGS | 4162 | MLVMS_P03355_3mut |
| PAPAPAPAP | 4134 | KORV_Q9TTC1_3mutA |
| GGSGGSGGSGGS | 4104 | MLVAV_P03356_3mut |
| PAPAPAPAP | 4134 | SFV3L_P27401_2mut |
| GSSEAAAKPAP | 4211 | MLVMS_P03355_3mut |
| GGSGGGEAAAK | 4163 | SFV3L_P27401_2mutA |
| GSSGGSGGG | 4161 | MLVMS_P03355_3mutA_WS |
| GGGGGSPAP | 4171 | MLVCB_P08361_3mutA |
| GGGEAAAKGSS | 4194 | XMRV6_A1Z651_3mutA |
| GGGGSSPAP | 4199 | BAEVM_P10272_3mut |
| GGSGGG | 4137 | PERV_Q4VFZ2_3mut |
| GGGGSS | 4145 | MLVBM_Q7SVK7_3mutA_WS |
| EAAAKGSSGGS | 4180 | PERV_Q4VFZ2_3mutA_WS |
| GSSGGGGGS | 4162 | PERV_Q4VFZ2 |
| EAAAKGSSGGS | 4180 | PERV_Q4VFZ2_3mut |
| EAAAKEAAAK | 4126 | MLVAV_P03356_3mut |
| GSSGGGEAAAK | 4195 | MLVAV_P03356_3mut |
| GSSPAPGGG | 4202 | XMRV6_A1Z651_3mut |
| GGGGSGGGGSGGGGS | 4109 | PERV_Q4VFZ2_3mut |
| EAAAKEAAAKEAAAKEAAAK | 4128 | KORV_Q9TTC1_3mutA |
| EAAAKGGSGSS | 4179 | MLVBM_Q7SVK7_3mut |
| PAPEAAAK | 4156 | BLVJ_P03361 |
| GSSGGG | 4146 | FFV_O93209-Pro |
| GGSGGGEAAAK | 4163 | KORV_Q9TTC1-Pro_3mutA |
| EAAAK | 4028 | FLV_P10273_3mutA |
| GGGGSSPAP | 4199 | MLVMS_P03355_3mut |
| GSS | | SFV3L_P27401-Pro_2mut |
| PAPEAAAKGSS | 4216 | BAEVM_P10272_3mut |
| GGGGGSPAP | 4171 | PERV_Q4VFZ2_3mut |
| GSSGSSGSS | 4121 | BAEVM_P10272_3mutA |
| GGGGSGGGGSGGGGSGGGGS | 4110 | SFV1_P23074_2mut |
| GGGGSSEAAAK | 4193 | SFV3L_P27401_2mutA |
| GGGGSGGGGSGGGGSGGGGS | 4110 | FOAMV_P14350-Pro_2mut |
| PAPGSSEAAAK | 4215 | MLVBM_Q7SVK7_3mutA_WS |
| GGGGGSGSS | 4159 | MLVFF_P26809_3mutA |
| GGSEAAAKGGG | 4164 | MLVBM_Q7SVK7_3mut |
| PAPGSSGGG | 4204 | PERV_Q4VFZ2 |
| GGS | | PERV_Q4VFZ2_3mutA_WS |
| EAAAKGGSGSS | 4179 | FLV_P10273_3mut |
| GGGEAAAK | 4147 | WMSV_P03359_3mutA |
| GGSEAAAKPAP | 4187 | MLVBM_Q7SVK7_3mut |
| SGSETPGTSESATPES | 4220 | FOAMV_P14350-Pro_2mutA |
| EAAAKPAPGGS | 4190 | AVIRE_P03360_3mut |
| EAAAKGGGGGS | 4168 | KORV_Q9TTC1-Pro_3mutA |
| GGGGS | 4027 | PERV_Q4VFZ2_3mut |
| GGSEAAAKGSS | 4176 | MLVFF_P26809_3mutA |
| GGSEAAAKGGG | 4164 | AVIRE_P03360 |
| GGSGGSGGSGGSGGSGGS | 4106 | SFV3L_P27401_2mut |
| GGSEAAAKGSS | 4176 | SFV3L_P27401-Pro_2mutA |
| GGGEAAAKPAP | 4205 | MLVCB_P08361_3mut |
| GGSEAAAK | 4141 | MLVMS_P03355_PLV919 |
| GGSPAPGSS | 4182 | KORV_Q9TTC1-Pro_3mutA |
| GSSPAPEAAAK | 4212 | WMSV_P03359_3mutA |
| GGSGSS | 4139 | KORV_Q9TTC1-Pro_3mutA |
| PAPGGGGGS | 4174 | AVIRE_P03360_3mut |
| PAPEAAAKGSS | 4216 | FFV_O93209-Pro |
| GGSGGGEAAAK | 4163 | WMSV_P03359_3mut |
| PAPGGG | 4150 | MLVMS_P03355_3mut |
| EAAAKGGG | 4148 | FLV_P10273_3mutA |
| GSSGSSGSSGSS | 4122 | MLVCB_P08361_3mut |
| EAAAKGGSGGG | 4167 | FFV_O93209 |
| GSSPAPGGS | 4184 | PERV_Q4VFZ2_3mutA_WS |
| GSSPAPGGS | 4184 | MLVCB_P08361_3mut |
| GGGPAP | 4149 | WMSV_P03359_3mutA |
| GGGPAP | 4149 | KORV_Q9TTC1_3mutA |
| GGSPAPGSS | 4182 | KORV_Q9TTC1-Pro_3mut |
| PAPAP | 4132 | MLVMS_P03355_3mut |
| GGGGGGG | 4117 | MLVMS_P03355_3mut |
| GGGGG | 4115 | KORV_Q9TTC1-Pro_3mut |
| GSAGSAAGSGEF | 4221 | FOAMV_P14350_2mutA |
| PAPAP | 4132 | KORV_Q9TTC1-Pro_3mutA |
| GGSEAAAKGGG | 4164 | SFV3L_P27401-Pro_2mutA |
| PAPAP | 4132 | WMSV_P03359_3mut |
| GGGGSGGGGSGGGGS | 4109 | SFV3L_P27401_2mut |
| PAPGGS | 4144 | KORV_Q9TTC1_3mutA |
| GGGEAAAKPAP | 4205 | FLV_P10273_3mut |
| GGGGGS | 4138 | MLVAV_P03356_3mutA |
| GSSEAAAKGGG | 4196 | WMSV_P03359_3mut |
| EAAAKGGGGSS | 4197 | GALV_P21414_3mutA |
| GSSGGS | 4140 | MLVAV_P03356_3mutA |
| GSSGGG | 4146 | MLVBM_Q7SVK7_3mut |
| PAPAPAP | 4133 | SFV3L_P27401-Pro_2mutA |
| GGGG | 4114 | KORV_Q9TTC1_3mutA |
| EAAAKPAPGGS | 4190 | MLVFF_P26809_3mut |
| GGGGSGGGGS | 4108 | XMRV6_A1Z651_3mut |
| EAAAKGGG | 4148 | MLVCB_P08361_3mut |
| GGGGSSPAP | 4199 | KORV_Q9TTC1_3mutA |
| GSSEAAAKGGG | 4196 | KORV_Q9TTC1-Pro_3mutA |
| GGGGG | 4115 | BLVJ_P03361_2mutB |
| GGGEAAAKGSS | 4194 | FFV_O93209-Pro |
| GSSGSSGSS | 4121 | BAEVM_P10272_3mut |
| GSSGGSPAP | 4183 | PERV_Q4VFZ2_3mut |
| EAAAKGGS | 4142 | KORV_Q9TTC1_3mut |
| GGSPAPEAAAK | 4188 | AVIRE_P03360_3mut |
| GGSEAAAK | 4141 | WMSV_P03359_3mut |
| GSSGGS | 4140 | KORV_Q9TTC1-Pro_3mutA |
| GGGPAPEAAAK | 4206 | KORV_Q9TTC1_3mutA |
| PAPGSS | 4154 | WMSV_P03359_3mutA |
| GGSEAAAKGSS | 4176 | FLV_P10273_3mutA |
| EAAAKEAAAKEAAAKEAAAKEAAAK | 4129 | SFV3L_P27401 |
| GSSEAAAKGGG | 4196 | SFV3L_P27401-Pro_2mutA |
| GGGGSEAAAKGGGGS | 4218 | KORV_Q9TTC1-Pro_3mutA |
| GGSGGSGGS | 4103 | WMSV_P03359_3mut |
| GGGGGSGSS | 4159 | KORV_Q9TTC1-Pro |
| GGGGSGGGGSGGGGSGGGGS | 4110 | MLVMS_P03355_3mut |
| EAAAKGGG | 4148 | PERV_Q4VFZ2 |
| GGSEAAAKGGG | 4164 | KORV_Q9TTC1-Pro_3mut |
| GSSGGSGGG | 4161 | PERV_Q4VFZ2_3mutA_WS |
| GGGGGS | 4138 | PERV_Q4VFZ2_3mut |
| GSAGSAAGSGEF | 4221 | PERV_Q4VFZ2 |
| PAPEAAAKGSS | 4216 | BAEVM_P10272_3mutA |
| GSSPAPGGG | 4202 | MLVCB_P08361_3mut |
| GGGGSSPAP | 4199 | KORV_Q9TTC1-Pro_3mutA |
| PAPGGSGGG | 4173 | MLVFF_P26809_3mut |
| GSSPAP | 4153 | KORV_Q9TTC1_3mutA |
| PAPGSS | 4154 | SFV3L_P27401-Pro_2mut |
| GGSGGGGSS | 4157 | MLVMS_P03355_PLV919 |
| GSSGGS | 4140 | WMSV_P03359_3mutA |
| EAAAKGGGGGS | 4168 | PERV_Q4VFZ2 |
| GGGGG | 4115 | KORV_Q9TTC1_3mutA |
| EAAAKGSS | 4152 | MLVMS_P03355_PLV919 |
| EAAAKEAAAKEAAAKEAAAKEAAAK | 4129 | FLV_P10273_3mut |
| EAAAKEAAAKEAAAKEAAAK | 4128 | SFV3L_P27401-Pro_2mut |
| GSAGSAAGSGEF | 4221 | SFV3L_P27401_2mutA |
| GGGPAPGGS | 4172 | FLV_P10273_3mutA |
| GGSEAAAKGGG | 4164 | MLVCB_P08361_3mut |
| PAPGGGEAAAK | 4209 | BAEVM_P10272_3mut |
| EAAAKPAPGSS | 4214 | FOAMV_P14350_2mut |
| GGSEAAAK | 4141 | KORV_Q9TTC1_3mutA |
| GGSGSS | 4139 | AVIRE_P03360 |
| GGSPAPEAAAK | 4188 | MLVMS_P03355_PLV919 |
| GGGGS | 4027 | XMRV6_A1Z651_3mut |
| GGSPAPGGG | 4170 | XMRV6_A1Z651_3mut |
| EAAAKPAPGGS | 4190 | PERV_Q4VFZ2 |
| GSSPAP | 4153 | BAEVM_P10272_3mut |
| GGSGSSGGG | 4158 | FLV_P10273_3mutA |
| PAPGGG | 4150 | PERV_Q4VFZ2_3mutA_WS |
| GSSGGSEAAAK | 4177 | MLVBM_Q7SVK7_3mut |
| GGSEAAAK | 4141 | MLVMS_P03355_3mut |
| GGGPAPGGS | 4172 | MLVFF_P26809_3mut |
| GSAGSAAGSGEF | 4221 | MLVBM_Q7SVK7_3mutA_WS |
| EAAAKPAPGGS | 4190 | SFVCP_Q87040 |
| PAPGGG | 4150 | PERV_Q4VFZ2_3mutA_WS |
| GSSPAPEAAAK | 4212 | MLVBM_Q7SVK7 |
| PAPEAAAK | 4156 | MLVBM_Q7SVK7_3mut |
| PAPGGGGGS | 4174 | AVIRE_P03360_3mutA |
| GGSEAAAKPAP | 4187 | MLVBM_Q7SVK7_3mut |
| EAAAKGSS | 4152 | WMSV_P03359_3mutA |
| GGGEAAAK | 4147 | MLVFF_P26809_3mutA |
| EAAAKEAAAKEAAAK | 4127 | MLVMS_P03355_3mut |
| PAPEAAAKGGG | 4210 | BAEVM_P10272_3mut |
| PAPAPAP | 4133 | MLVCB_P08361_3mut |
| EAAAKPAPGGS | 4190 | BAEVM_P10272_3mut |
| GGGGSGGGGS | 4108 | FLV_P10273_3mut |
| GGGGSEAAAKGGGGS | 4218 | KORV_Q9TTC1_3mut |
| EAAAK | 4028 | FLV_P10273_3mut |
| PAPAPAP | 4133 | WMSV_P03359_3mut |
| GGGGSEAAAKGGGGS | 4218 | FFV_O93209-Pro |
| GGSPAPEAAAK | 4188 | MLVMS_P03355_3mut |
| GGSGSSGGG | 4158 | XMRV6_A1Z651_3mut |
| GGSPAPGSS | 4182 | PERV_Q4VFZ2_3mut |
| SGGSSGGSSGSETPGTSESATPESSGGSSGGSS | 4006 | SFV3L_P27401-Pro_2mutA |
| EAAAKGGGPAP | 4207 | BAEVM_P10272_3mutA |
| GSSGGSEAAAK | 4177 | MLVMS_P03355_3mutA_WS |
| SGSETPGTSESATPES | 4220 | PERV_Q4VFZ2_3mutA_WS |
| EAAAKEAAAKEAAAKEAAAKEAAAK | 4129 | KORV_Q9TTC1-Pro_3mutA |
| GSSGSSGSS | 4121 | KORV_Q9TTC1_3mutA |
| GSSPAPGGG | 4202 | SFV3L_P27401-Pro_2mutA |
| GSSGGGEAAAK | 4195 | KORV_Q9TTC1_3mutA |
| GGSGGGGSS | 4157 | PERV_Q4VFZ2_3mutA_WS |
| GSSGGGEAAAK | 4195 | MLVCB_P08361_3mut |
| GSSEAAAKGGG | 4196 | MLVCB_P08361_3mut |
| GGSGGGGSS | 4157 | KORV_Q9TTC1_3mutA |
| GGSGSSPAP | 4181 | PERV_Q4VFZ2_3mutA_WS |
| GSSPAP | 4153 | MLVMS_P03355_3mut |
| GGGGSSEAAAK | 4193 | AVIRE_P03360 |
| GGS | | WMSV_P03359_3mut |
| EAAAKEAAAK | 4126 | PERV_Q4VFZ2_3mut |
| PAPAPAPAP | 4134 | MLVAV_P03356_3mut |
| GGSEAAAKGGG | 4164 | KORV_Q9TTC1_3mutA |
| PAPGGG | 4150 | MLVAV_P03356_3mut |
| EAAAKGSS | 4152 | BAEVM_P10272_3mut |
| GGGGSGGGGS | 4108 | WMSV_P03359_3mutA |
| GGSGGSGGS | 4103 | SFV3L_P27401_2mut |
| EAAAK | 4028 | MLVCB_P08361_3mut |
| GGGGSSGGS | 4160 | WMSV_P03359_3mutA |
| GGGPAPEAAAK | 4206 | MLVAV_P03356_3mutA |
| EAAAKEAAAKEAAAK | 4127 | FFV_O93209 |
| GSSEAAAKGGG | 4196 | MLVBM_Q7SVK7_3mut |
| GGGPAPGGS | 4172 | FLV_P10273_3mut |
| GGSEAAAKGGG | 4164 | WMSV_P03359_3mut |
| EAAAKGGGGGS | 4168 | XMRV6_A1Z651_3mutA |
| EAAAKGGSGGG | 4167 | FLV_P10273_3mutA |
| GGSEAAAKGGG | 4164 | SFV3L_P27401_2mutA |
| GGGGS | 4027 | PERV_Q4VFZ2_3mutA_WS |
| GSSGGS | 4140 | MLVMS_P03355_3mut |
| GSSGSS | 4120 | MLVAV_P03356_3mutA |
| GGSPAPGGG | 4170 | MLVBM_Q7SVK7_3mutA_WS |
| GSSGGGGGS | 4162 | MLVF5_P26810_3mut |
| PAPAPAPAP | 4134 | MLVCB_P08361_3mut |
| PAPAP | 4132 | PERV_Q4VFZ2_3mutA_WS |
| PAPGSSGGS | 4186 | KORV_Q9TTC1_3mut |
| PAPGSSGGG | 4204 | PERV_Q4VFZ2_3mut |
| GGGEAAAK | 4147 | MLVMS_P03355_PLV919 |
| GGSGGSGGSGGSGGS | 4105 | SFV3L_P27401-Pro_2mutA |
| GGSGGG | 4137 | FLV_P10273_3mut |
| PAPEAAAKGGG | 4210 | MLVFF_P26809_3mut |
| PAP | | PERV_Q4VFZ2_3mutA_WS |
| PAPGGSGSS | 4185 | FFV_O93209_2mut |
| EAAAKEAAAKEAAAKEAAAKEAAAKEAAAK | 4130 | FFV_O93209-Pro_2mut |
| GSSGSSGSSGSS | 4122 | FFV_O93209-Pro |
| GSSGSSGSSGSSGSS | 4123 | FLV_P10273_3mutA |
| GGGEAAAKPAP | 4205 | PERV_Q4VFZ2 |
| PAPGSSGGG | 4204 | SFV3L_P27401_2mut |
| PAPGGSGSS | 4185 | KORV_Q9TTC1-Pro_3mut |
| PAPAPAPAPAP | 4135 | GALV_P21414_3mutA |
| GGSGGGEAAAK | 4163 | PERV_Q4VFZ2_3mut |
| GSSPAP | 4153 | MLVCB_P08361_3mut |
| EAAAKPAP | 4155 | MLVF5_P26810_3mut |
| GGGGSGGGGSGGGGSGGGGS | 4110 | MLVBM_Q7SVK7_3mut |
| GGSGGG | 4137 | WMSV_P03359_3mut |
| GGSGGSGGS | 4103 | KORV_Q9TTC1_3mut |
| GGGGGGGG | 4118 | MLVFF_P26809_3mut |
| GGGGSS | 4145 | MLVAV_P03356_3mut |
| GSSGGGGGS | 4162 | SFV3L_P27401_2mut |
| EAAAKEAAAKEAAAKEAAAKEAAAKEAAAK | 4130 | GALV_P21414_3mutA |
| GSSGSSGSS | 4121 | PERV_Q4VFZ2_3mut |
| GSSPAPGGS | 4184 | MLVFF_P26809_3mut |
| PAPAPAP | 4133 | AVIRE_P03360_3mutA |
| EAAAKEAAAKEAAAKEAAAK | 4128 | WMSV_P03359_3mutA |
| PAPAPAPAP | 4134 | SFV3L_P27401_2mutA |
| GGGGSS | 4145 | MLVAV_P03356_3mutA |
| GSSGSSGSSGSSGSS | 4123 | SFV3L_P27401_2mutA |
| PAPGGS | 4144 | WMSV_P03359_3mutA |
| GSSEAAAKGGG | 4196 | PERV_Q4VFZ2 |
| GSSGGSPAP | 4183 | MLVMS_P03355_PLV919 |
| GSSGSSGSSGSSGSSGSS | 4124 | SFV3L_P27401_2mutA |
| GGSGSSGGG | 4158 | MLVCB_P08361_3mut |
| GGGPAPGSS | 4200 | SFV3L_P27401-Pro_2mutA |
| GSSEAAAKGGS | 4178 | WMSV_P03359_3mut |
| GSSEAAAKGGG | 4196 | MLVAV_P03356_3mut |
| GGSGGGPAP | 4169 | FFV_O93209-Pro |
| GSSGSS | 4120 | PERV_Q4VFZ2_3mut |
| PAPGGGGGS | 4174 | GALV_P21414_3mutA |
| EAAAKPAPGGS | 4190 | MLVAV_P03356_3mut |
| GSSGSS | 4120 | MLVMS_P03355_3mut |
| EAAAKPAPGGS | 4190 | FFV_O93209-Pro |
| GGGPAPEAAAK | 4206 | MLVMS_P03355_3mutA_WS |
| GSSEAAAKGGG | 4196 | MLVBM_Q7SVK7_3mut |
| GGGEAAAKGGS | 4166 | BAEVM_P10272_3mut |
| GSSGSS | 4120 | KORV_Q9TTC1-Pro_3mutA |
| EAAAKEAAAKEAAAK | 4127 | SFV1_P23074 |
| PAPGSSGGS | 4186 | KORV_Q9TTC1-Pro_3mut |
| PAPAPAPAPAP | 4135 | MLVMS_P03355 |
| GSSEAAAK | 4151 | SFV3L_P27401_2mut |
| PAP | | PERV_Q4VFZ2_3mut |
| GGSEAAAKGGG | 4164 | MLVBM_Q7SVK7_3mut |
| GGSGGGPAP | 4169 | MLVBM_Q7SVK7_3mutA_WS |
| GSSGSS | 4120 | MLVMS_P03355_3mut |
| GGSEAAAK | 4141 | MLVMS_P03355 |
| GSSEAAAKGGS | 4178 | MLVMS_P03355_PLV919 |
| PAPGGGGGS | 4174 | MLVFF_P26809_3mut |
| GSSGGG | 4146 | PERV_Q4VFZ2_3mut |
| GSSGGS | 4140 | PERV_Q4VFZ2_3mutA_WS |
| PAPGGG | 4150 | BAEVM_P10272_3mut |
| PAPGSSGGG | 4204 | MLVBM_Q7SVK7_3mut |
| GGSEAAAK | 4141 | SFV3L_P27401_2mut |
| GSSPAPEAAAK | 4212 | SFV3L_P27401-Pro_2mut |
| GSSGGSPAP | 4183 | BAEVM_P10272_3mut |
| GGSPAPGSS | 4182 | PERV_Q4VFZ2_3mutA_WS |
| GGSGGSGGS | 4103 | PERV_Q4VFZ2 |
| GGSGGGPAP | 4169 | FLV_P10273_3mut |
| GGGPAPEAAAK | 4206 | SFV3L_P27401_2mutA |
| GGGGS | 4027 | FLV_P10273_3mutA |
| GSSGGSGGG | 4161 | XMRV6_A1Z651_3mut |
| EAAAKGGGGSS | 4197 | PERV_Q4VFZ2 |
| GGSGSSGGG | 4158 | SFV3L_P27401-Pro_2mutA |
| GGSGGSGGS | 4103 | MLVFF_P26809_3mut |
| GGGPAPEAAAK | 4206 | FLV_P10273_3mut |
| GSSGGGEAAAK | 4195 | MLVMS_P03355_3mut |
| GGG | | SFV3L_P27401_2mut |
| GSAGSAAGSGEF | 4221 | WMSV_P03359_3mut |
| GSSGGGPAP | 4201 | MLVMS_P03355_PLV919 |
| GGGGSS | 4145 | KORV_Q9TTC1-Pro_3mut |
| GGGGSSEAAAK | 4193 | KORV_Q9TTC1 |
| PAPGGSGGG | 4173 | SFV3L_P27401_2mut |
| GSSGSSGSSGSSGSS | 4123 | FFV_O93209 |
| GSSGGSPAP | 4183 | MLVMS_P03355_3mut |
| GGSEAAAK | 4141 | KORV_Q9TTC1-Pro_3mutA |
| GGGGSGGGGS | 4108 | BAEVM_P10272_3mut |
| GSSEAAAKGGG | 4196 | AVIRE_P03360_3mut |
| EAAAKPAPGGG | 4208 | FLV_P10273_3mut |
| EAAAKGGSPAP | 4189 | SFV3L_P27401-Pro_2mutA |
| GSSEAAAKPAP | 4211 | MLVBM_Q7SVK7_3mut |
| GGGPAPGGS | 4172 | MLVCB_P08361_3mut |
| GGG | | SFV3L_P27401_2mutA |
| EAAAKGGGGSEAAAK | 4219 | SFV3L_P27401_2mutA |
| GGSGSSGGG | 4158 | MLVBM_Q7SVK7_3mut |
| GSAGSAAGSGEF | 4221 | BAEVM_P10272_3mut |
| GGGEAAAK | 4147 | FOAMV_P14350_2mutA |
| PAPEAAAKGGS | 4192 | WMSV_P03359_3mut |
| PAPAPAPAPAPAP | 4136 | MLVF5_P26810_3mutA |
| GGSGGGGSS | 4157 | FLV_P10273_3mutA |
| PAPGSSGGS | 4186 | BAEVM_P10272_3mut |
| PAPEAAAK | 4156 | WMSV_P03359_3mutA |
| GSSGSSGSSGSSGSSGSS | 4124 | FFV_O93209-Pro_2mut |
| GGGGGSGSS | 4159 | FFV_O93209-Pro |
| GGGGGGGG | 4118 | SFV3L_P27401-Pro_2mutA |
| GGGGGG | 4116 | FLV_P10273_3mut |
| GSSGGSGGG | 4161 | MLVAV_P03356_3mutA |
| GGGGSS | 4145 | SFV3L_P27401-Pro_2mutA |
| GGSGGGPAP | 4169 | FOAMV_P14350_2mut |
| GSSGSS | 4120 | AVIRE_P03360_3mutA |
| EAAAKEAAAKEAAAKEAAAKEAAAK | 4129 | SFV3L_P27401-Pro_2mutA |
| EAAAKEAAAK | 4126 | BAEVM_P10272_3mut |
| GSSPAPEAAAK | 4212 | GALV_P21414_3mutA |
| GGSEAAAKPAP | 4187 | SFV3L_P27401_2mutA |
| GGSGGGEAAAK | 4163 | SFV3L_P27401-Pro_2mutA |
| EAAAKGSSPAP | 4213 | FOAMV_P14350_2mut |
| GGSGSSEAAAK | 4175 | SFV3L_P27401_2mut |
| GGG | | PERV_Q4VFZ2 |
| GGGGGSGSS | 4159 | FOAMV_P14350_2mut |
| GGSGGGEAAAK | 4163 | KORV_Q9TTC1-Pro_3mut |
| GSSGGSGGG | 4161 | AVIRE_P03360_3mutA |
| EAAAKPAPGGG | 4208 | SFV3L_P27401_2mutA |
| PAPGGSGGG | 4173 | KORV_Q9TTC1-Pro_3mut |
| PAPAPAP | 4133 | WMSV_P03359_3mutA |
| GSSEAAAKPAP | 4211 | SFV1_P23074 |
| SGGSSGGSSGSETPGTSESATPESSGGSSGGSS | 4006 | SRV2_P51517 |
| GSSGGSGGG | 4161 | PERV_Q4VFZ2_3mutA_WS |
| GSSGSSGSSGSSGSSGSS | 4124 | FFV_O93209 |
| GSSGGGPAP | 4201 | WMSV_P03359_3mut |
| PAPAPAPAPAPAP | 4136 | MLVBM_Q7SVK7_3mut |
| GGGGGSPAP | 4171 | KORV_Q9TTC1-Pro_3mutA |
| PAPGSS | 4154 | MLVBM_Q7SVK7_3mutA_WS |
| PAPEAAAKGGS | 4192 | SFV3L_P27401-Pro_2mut |
| GGGGSSPAP | 4199 | MLVMS_P03355_3mut |
| GGSEAAAK | 4141 | FFV_O93209-Pro |
| EAAAKPAPGGS | 4190 | AVIRE_P03360_3mutA |
| PAPGSS | 4154 | WMSV_P03359_3mut |
| PAPGSSGGG | 4204 | SFV3L_P27401-Pro_2mutA |
| EAAAKEAAAKEAAAK | 4127 | SFV3L_P27401_2mut |
| GGS | | MLVRD_P11227_3mut |
| GGGGS | 4027 | KORV_Q9TTC1-Pro_3mut |
| GGSGGGGSS | 4157 | KORV_Q9TTC1 |
| GGSGGG | 4137 | MLVMS_P03355_3mutA_WS |
| GGGEAAAKPAP | 4205 | BAEVM_P10272_3mut |
| EAAAKEAAAKEAAAKEAAAKEAAAK | 4129 | FLV_P10273 |
| PAPGGSGGG | 4173 | KORV_Q9TTC1-Pro_3mutA |
| GSSGSSGSSGSSGSSGSS | 4124 | HTL1L_P0C211 |
| GGGEAAAKPAP | 4205 | WMSV_P03359 |
| GSSGGSPAP | 4183 | FFV_O93209-Pro |
| PAPAPAPAPAP | 4135 | SFV3L_P27401-Pro_2mutA |
| GSSGGSEAAAK | 4177 | SFV3L_P27401_2mutA |
| GGSPAPGSS | 4182 | SFV3L_P27401_2mut |
| GGSGGSGGS | 4103 | KORV_Q9TTC1-Pro_3mut |
| PAPEAAAKGSS | 4216 | KORV_Q9TTC1-Pro_3mut |
| EAAAKGGS | 4142 | KORV_Q9TTC1_3mutA |
| EAAAKGGGGSEAAAK | 4219 | SFV3L_P27401-Pro_2mut |
| GGGGSSPAP | 4199 | FFV_O93209-Pro |
| EAAAK | 4028 | SFV3L_P27401_2mut |
| EAAAKGGGGSS | 4197 | BAEVM_P10272_3mut |
| GGGGGSEAAAK | 4165 | MLVBM_Q7SVK7_3mut |
| GGGG | 4114 | PERV_Q4VFZ2 |
| GGGGGSEAAAK | 4165 | FLV_P10273_3mut |
| EAAAKGGGPAP | 4207 | KORV_Q9TTC1-Pro |
| GGGGSGGGGSGGGGSGGGGS | 4110 | FFV_O93209_2mutA |
| GSSGGSGGG | 4161 | PERV_Q4VFZ2_3mut |
| GGGGSGGGGSGGGGS | 4109 | GALV_P21414_3mutA |
| GGSGGGEAAAK | 4163 | AVIRE_P03360_3mutA |
| PAPEAAAKGGG | 4210 | SFV3L_P27401_2mut |
| GGGGSGGGGS | 4108 | AVIRE_P03360 |
| GSSGGGEAAAK | 4195 | SFV3L_P27401_2mutA |
| GGGGG | 4115 | AVIRE_P03360_3mutA |
| GGSGSS | 4139 | KORV_Q9TTC1_3mut |
| PAPAPAPAPAPAP | 4136 | FOAMV_P14350_2mut |
| GGSEAAAKPAP | 4187 | KORV_Q9TTC1-Pro_3mut |
| GGGGGG | 4116 | PERV_Q4VFZ2_3mut |
| GSSGGGEAAAK | 4195 | MLVBM_Q7SVK7 |
| SGGSSGGSSGSETPGTSESATPESSGGSSGGSS | 4006 | MLVAV_P03356 |
| GGSPAPGSS | 4182 | BAEVM_P10272_3mut |
| GGGGSSPAP | 4199 | BAEVM_P10272 |
| GGGGSEAAAKGGGGS | 4218 | SFV3L_P27401_2mut |
| GGGGGGGG | 4118 | GALV_P21414_3mutA |
| PAPAP | 4132 | MLVAV_P03356_3mut |
| GGGEAAAK | 4147 | PERV_Q4VFZ2_3mutA_WS |
| GSSPAPGGG | 4202 | FFV_O93209_2mut |
| GGSGGSGGSGGSGGS | 4105 | BAEVM_P10272 |
| GGGGGS | 4138 | MLVF5_P26810_3mutA |
| PAPGGGGSS | 4203 | FLV_P10273_3mutA |
| GGGEAAAK | 4147 | MLVBM_Q7SVK7_3mut |
| PAPEAAAKGGG | 4210 | WMSV_P03359_3mut |
| GSSEAAAK | 4151 | MLVBM_Q7SVK7_3mut |
| EAAAKEAAAK | 4126 | AVIRE_P03360 |
| EAAAKGGGGGS | 4168 | MLVBM_Q7SVK7_3mut |
| GGGEAAAKGGS | 4166 | SFV3L_P27401-Pro_2mutA |
| PAPAPAPAPAP | 4135 | MLVF5_P26810_3mut |
| PAPGSSEAAAK | 4215 | SFV3L_P27401-Pro_2mutA |
| EAAAKEAAAKEAAAK | 4127 | BAEVM_P10272_3mutA |
| GGSPAPGSS | 4182 | MLVMS_P03355 |
| PAPGSSGGS | 4186 | FLV_P10273_3mutA |
| EAAAKEAAAKEAAAKEAAAK | 4128 | FOAMV_P14350-Pro_2mut |
| EAAAKGGG | 4148 | KORV_Q9TTC1_3mutA |
| EAAAKGGSGGG | 4167 | MLVBM_Q7SVK7_3mut |
| GGGGGS | 4138 | KORV_Q9TTC1-Pro_3mutA |
| PAPGGSGGG | 4173 | WMSV_P03359_3mut |
| GGGPAPGGS | 4172 | KORV_Q9TTC1_3mutA |
| GSS | | FFV_O93209 |
| GGSGGSGGS | 4103 | PERV_Q4VFZ2_3mut |
| GGGGS | 4027 | GALV_P21414_3mutA |
| GGGG | 4114 | MLVF5_P26810_3mut |
| GGSEAAAKPAP | 4187 | FFV_O93209-Pro_2mut |
| PAPAPAPAP | 4134 | FFV_O93209-Pro |
| PAP | | MLVF5_P26810_3mut |
| EAAAKEAAAKEAAAK | 4127 | FFV_O93209_2mut |
| EAAAKGSS | 4152 | MLVCB_P08361_3mut |
| EAAAKGGG | 4148 | MLVBM_Q7SVK7_3mut |
| PAPEAAAKGGG | 4210 | FFV_O93209_2mut |
| GSSGGGEAAAK | 4195 | SFV1_P23074-Pro_2mut |
| PAPGGGEAAAK | 4209 | GALV_P21414_3mutA |
| GGGGSGGGGSGGGGSGGGGS | 4110 | FOAMV_P14350-Pro_2mutA |
| GSSGGG | 4146 | FOAMV_P14350_2mut |
| GGGGSGGGGSGGGGSGGGGS | 4110 | SFV3L_P27401_2mutA |
| GGSGSS | 4139 | AVIRE_P03360_3mut |
| GGSGSSEAAAK | 4175 | MMTVB_P03365_WS |
| PAPAPAP | 4133 | MLVAV_P03356_3mutA |
| GSSGGSPAP | 4183 | SFV3L_P27401-Pro_2mut |
| GGSPAP | 4143 | AVIRE_P03360 |
| GGSGGGPAP | 4169 | FFV_O93209 |
| GSSEAAAK | 4151 | PERV_Q4VFZ2 |
| GSSGGGPAP | 4201 | PERV_Q4VFZ2_3mutA_WS |
| GGGGSSEAAAK | 4193 | KORV_Q9TTC1_3mutA |
| GGSEAAAKPAP | 4187 | SFVCP_Q87040 |
| GGSGGGPAP | 4169 | FOAMV_P14350_2mutA |
| GGGGSGGGGSGGGGSGGGGS | 4110 | BLVJ_P03361_2mutB |
| GGGGSSPAP | 4199 | SFV3L_P27401_2mutA |
| EAAAKGGS | 4142 | MLVF5_P26810_3mut |
| GGSEAAAKGSS | 4176 | MLVCB_P08361_3mut |
| GGGGSSEAAAK | 4193 | SFV3L_P27401_2mut |
| EAAAKGGSGGG | 4167 | FOAMV_P14350_2mut |
| GGSGGS | 4102 | FLV_P10273_3mut |
| EAAAKGGG | 4148 | FFV_O93209-Pro |
| GSSGSSGSSGSSGSS | 4123 | SFV3L_P27401 |
| GSSGGGPAP | 4201 | PERV_Q4VFZ2_3mutA_WS |
| PAPGGSEAAAK | 4191 | SFV3L_P27401-Pro_2mutA |
| GGSPAP | 4143 | KORV_Q9TTC1 |
| EAAAKPAPGSS | 4214 | KORV_Q9TTC1_3mutA |
| SGSETPGTSESATPES | 4220 | SFV1_P23074 |
| GSSPAP | 4153 | SFV3L_P27401-Pro_2mutA |
| GSSPAPGGG | 4202 | SFV3L_P27401_2mut |
| GGGEAAAKGSS | 4194 | SFV1_P23074_2mut |
| GGGPAPGGS | 4172 | BAEVM_P10272_3mut |
| EAAAKGGG | 4148 | KORV_Q9TTC1-Pro_3mutA |
| GSSGGG | 4146 | SFV3L_P27401-Pro_2mut |
| GGSPAPEAAAK | 4188 | BAEVM_P10272_3mut |
| EAAAKGSSPAP | 4213 | FFV_O93209 |
| EAAAKGGGGSEAAAK | 4219 | SFV3L_P27401-Pro_2mutA |
| GSSGSSGSSGSSGSS | 4123 | SFV1_P23074_2mut |
| EAAAKGGSPAP | 4189 | FOAMV_P14350_2mut |
| GGSGGS | 4102 | KORV_Q9TTC1-Pro_3mutA |
| EAAAKGSSGGS | 4180 | GALV_P21414 |
| GSSGGGPAP | 4201 | MLVAV_P03356 |
| PAPEAAAKGGS | 4192 | FOAMV_P14350_2mut |
| EAAAKPAPGGG | 4208 | AVIRE_P03360_3mut |
| GGSPAP | 4143 | SFV3L_P27401_2mutA |
| GGGGSGGGGS | 4108 | SFV3L_P27401_2mutA |
| GGGGSS | 4145 | AVIRE_P03360_3mutA |
| GGSPAPGGG | 4170 | SFV3L_P27401-Pro_2mutA |
| EAAAKPAPGSS | 4214 | SFV3L_P27401 |
| EAAAKPAP | 4155 | FOAMV_P14350-Pro_2mut |
| PAPEAAAKGSS | 4216 | PERV_Q4VFZ2_3mutA_WS |
| EAAAKGGSGSS | 4179 | SFV3L_P27401_2mutA |
| GGGEAAAKGSS | 4194 | GALV_P21414_3mutA |
| GGGGSEAAAKGGGGS | 4218 | PERV_Q4VFZ2_3mut |
| PAPGGSGSS | 4185 | FFV_O93209-Pro_2mutA |
| GGSEAAAKPAP | 4187 | GALV_P21414_3mutA |
| GGSGGSGGSGGSGGS | 4105 | FFV_O93209-Pro |
| GSSGGSEAAAK | 4177 | SFV3L_P27401-Pro_2mut |
| GGS | | GALV_P21414_3mutA |
| PAPGGSEAAAK | 4191 | MLVMS_P03355 |
| PAPEAAAKGGS | 4192 | BAEVM_P10272_3mutA |
| GGSGSSPAP | 4181 | SFV3L_P27401-Pro_2mutA |
| GSSPAP | 4153 | WMSV_P03359_3mut |
| GGGEAAAK | 4147 | MMTVB_P03365 |
| GGGGSS | 4145 | PERV_Q4VFZ2_3mut |
| GGSPAPGSS | 4182 | SFV3L_P27401-Pro_2mut |
| PAPGGS | 4144 | MLVBM_Q7SVK7_3mut |
| EAAAKGSSPAP | 4213 | MLVBM_Q7SVK7_3mut |
| GGGGSSGGS | 4160 | PERV_Q4VFZ2_3mut |
| PAPAPAPAPAPAP | 4136 | SFV1_P23074 |
| GGSEAAAKGGG | 4164 | SFV3L_P27401-Pro_2mut |
| GGSGGS | 4102 | SFV1_P23074_2mut |
| GSSGGGGGS | 4162 | MLVF5_P26810_3mutA |
| EAAAKGGGPAP | 4207 | SFV3L_P27401 |
| EAAAKEAAAKEAAAKEAAAK | 4128 | FOAMV_P14350-Pro_2mutA |
| GGGPAPGSS | 4200 | SFV3L_P27401_2mutA |
| GGGGSGGGGSGGGGSGGGGS | 4110 | SFV3L_P27401_2mut |
| EAAAKEAAAKEAAAKEAAAK | 4128 | MMTVB_P03365_WS |
| PAPGSSGGS | 4186 | KORV_Q9TTC1-Pro_3mutA |
| PAPGSSEAAAK | 4215 | FOAMV_P14350-Pro_2mut |
| GSSPAPEAAAK | 4212 | BAEVM_P10272_3mut |
| EAAAKGGGGSEAAAK | 4219 | FFV_O93209-Pro |
| GGSPAP | 4143 | PERV_Q4VFZ2 |
| GGSGSSEAAAK | 4175 | XMRV6_A1Z651_3mut |
| GGSEAAAKGGG | 4164 | GALV_P21414_3mutA |
| PAPGGGGSS | 4203 | AVIRE_P03360_3mutA |
| GGSGGSGGSGGS | 4104 | PERV_Q4VFZ2 |
| GGGGSSGGS | 4160 | PERV_Q4VFZ2_3mutA_WS |
| SGGSSGGSSGSETPGTSESATPESSGGSSGGSS | 4006 | BAEVM_P10272_3mutA |
| GGGPAP | 4149 | MLVAV_P03356_3mut |
| GGGGSGGGGSGGGGSGGGGS | 4110 | FFV_O93209_2mut |
| GSSEAAAK | 4151 | FFV_O93209 |
| GGSPAPEAAAK | 4188 | FOAMV_P14350_2mut |
| GGGGGSEAAAK | 4165 | FOAMV_P14350_2mut |
| GSSPAPGGS | 4184 | MLVBM_Q7SVK7_3mut |
| GSS | | SFVCP_Q87040_2mut |
| EAAAKPAP | 4155 | FOAMV_P14350-Pro |
| EAAAKGGG | 4148 | SFV3L_P27401_2mut |
| GGGEAAAK | 4147 | AVIRE_P03360_3mutA |
| PAPGSSGGG | 4204 | WMSV_P03359_3mut |
| EAAAKGGSPAP | 4189 | SFV3L_P27401 |
| GSSGGSGGG | 4161 | SFV3L_P27401-Pro_2mutA |
| GSSGGGEAAAK | 4195 | GALV_P21414_3mutA |
| GGGPAPGSS | 4200 | MLVBM_Q7SVK7_3mutA_WS |
| PAPGGGEAAAK | 4209 | FFV_O93209-Pro_2mut |
| GSSGSSGSSGSS | 4122 | SFV1_P23074_2mut |
| GGSEAAAK | 4141 | PERV_Q4VFZ2_3mutA_WS |
| GGGEAAAKPAP | 4205 | SFV3L_P27401_2mut |
| EAAAKGGGPAP | 4207 | SFV3L_P27401_2mut |
| GGGGSSPAP | 4199 | FLV_P10273_3mut |
| EAAAKPAPGSS | 4214 | FFV_O93209_2mut |
| GGGGSSPAP | 4199 | SFV3L_P27401_2mut |
| GSSGSS | 4120 | KORV_Q9TTC1_3mutA |
| GGGGSGGGGSGGGGSGGGGSGGGGS | 4111 | BLVJ_P03361_2mut |
| GGGGSSGGS | 4160 | GALV_P21414_3mutA |
| EAAAKGGSGSS | 4179 | FFV_O93209-Pro |
| EAAAKPAP | 4155 | PERV_Q4VFZ2 |
| GSSGGGEAAAK | 4195 | MLVBM_Q7SVK7_3mut |
| PAPGGSGGG | 4173 | BAEVM_P10272 |
| EAAAKGGGPAP | 4207 | MLVF5_P26810 |
| GSSGSSGSS | 4121 | MLVBM_Q7SVK7_3mut |
| GSSGGS | 4140 | AVIRE_P03360_3mutA |
| GGSEAAAKGGG | 4164 | FOAMV_P14350_2mut |
| EAAAKGGS | 4142 | MLVF5_P26810_3mutA |
| GGSGSSGGG | 4158 | WMSV_P03359_3mut |
| EAAAK | 4028 | SFV1_P23074_2mut |
| GSSGGSPAP | 4183 | SFV3L_P27401-Pro_2mutA |
| GGGGSSGGS | 4160 | KORV_Q9TTC1_3mut |
| PAPGGSGGG | 4173 | FFV_O93209-Pro_2mut |
| GGGPAPGGS | 4172 | SFV3L_P27401_2mutA |
| GSSPAPEAAAK | 4212 | FLV_P10273_3mut |
| GGSGSSPAP | 4181 | SFV3L_P27401_2mut |
| GSSEAAAKGGS | 4178 | SFV3L_P27401_2mut |
| PAPGGG | 4150 | SFV3L_P27401_2mutA |
| SGSETPGTSESATPES | 4220 | KORV_Q9TTC1-Pro_3mut |
| GGGGS | 4027 | SFV1_P23074-Pro_2mutA |
| GSSGGGEAAAK | 4195 | WMSV_P03359 |
| EAAAKGGGGSEAAAK | 4219 | MLVF5_P26810_3mutA |
| GSSEAAAKPAP | 4211 | FFV_O93209 |
| GGGGGG | 4116 | SFV1_P23074_2mutA |
| EAAAKEAAAKEAAAK | 4127 | MMTVB_P03365-Pro |
| EAAAKPAPGSS | 4214 | MLVBM_Q7SVK7_3mut |
| GGSGSSEAAAK | 4175 | SFV3L_P27401_2mutA |
| GGSEAAAK | 4141 | MLVMS_P03355_3mut |
| GGSPAPEAAAK | 4188 | SFV3L_P27401_2mut |
| GGGPAPGSS | 4200 | SFV1_P23074 |
| GGGGGSEAAAK | 4165 | MLVBM_Q7SVK7_3mutA_WS |
| EAAAKPAPGSS | 4214 | KORV_Q9TTC1-Pro |
| GSSGSSGSSGSS | 4122 | SFV3L_P27401_2mut |
| EAAAKPAP | 4155 | SFV3L_P27401_2mut |
| GGGEAAAK | 4147 | PERV_Q4VFZ2_3mut |
| GGSGGS | 4102 | SFV3L_P27401_2mutA |
| EAAAKGSSGGS | 4180 | MMTVB_P03365 |
| SGSETPGTSESATPES | 4220 | SFV3L_P27401 |
| EAAAKGSSGGG | 4198 | PERV_Q4VFZ2 |
| EAAAKEAAAKEAAAKEAAAKEAAAKEAAAK | 4130 | MMTVB_P03365 |
| GGSGGGPAP | 4169 | KORV_Q9TTC1_3mutA |
| PAPAPAPAP | 4134 | SFV3L_P27401 |
| GGGEAAAKGGS | 4166 | SFV1_P23074_2mut |
| GSSGGSGGG | 4161 | PERV_Q4VFZ2_3mut |
| PAPEAAAKGGS | 4192 | FOAMV_P14350_2mutA |
| GGGEAAAKGSS | 4194 | SFV3L_P27401_2mut |
| GGGGSGGGGSGGGGSGGGGS | 4110 | MLVBM_Q7SVK7 |
| PAPGSSGGG | 4204 | FLV_P10273 |
| GGSGSSGGG | 4158 | FFV_O93209 |
| EAAAKPAPGSS | 4214 | MLVBM_Q7SVK7 |
| GSSEAAAKGGG | 4196 | SFV3L_P27401_2mutA |
| GGSGGSGGSGGSGGS | 4105 | MLVF5_P26810 |
| GGSEAAAKPAP | 4187 | SFV3L_P27401-Pro_2mutA |
| EAAAKGGSPAP | 4189 | SFV3L_P27401_2mutA |
| EAAAKGGGGGS | 4168 | SFV3L_P27401_2mut |
| GSSPAPEAAAK | 4212 | SFV3L_P27401_2mutA |
| PAPAP | 4132 | MLVBM_Q7SVK7_3mut |
| PAPGGSEAAAK | 4191 | KORV_Q9TTC1-Pro |
| GGSGSS | 4139 | MLVF5_P26810_3mutA |
| GGSEAAAKPAP | 4187 | FFV_O93209_2mut |
| GSS | | MLVMS_P03355 |
| SGGSSGGSSGSETPGTSESATPESSGGSSGGSS | 4006 | SFV3L_P27401-Pro |
| PAPGGGEAAAK | 4209 | SFV3L_P27401_2mut |
| PAPGGGGGS | 4174 | SFV3L_P27401-Pro_2mut |
| PAPGGSGSS | 4185 | BAEVM_P10272_3mut |
| GSSGGGEAAAK | 4195 | FFV_O93209 |
| GGSEAAAKPAP | 4187 | SFV1_P23074_2mut |
| GGGGG | 4115 | FLV_P10273_3mut |
| GGGEAAAKGSS | 4194 | SFV3L_P27401 |
| GSSGSSGSSGSSGSS | 4123 | SFV1_P23074-Pro |
| SGSETPGTSESATPES | 4220 | AVIRE_P03360 |
| PAPGSSGGG | 4204 | MLVBM_Q7SVK7_3mut |
| GGGGSSPAP | 4199 | HTL3P_Q4U0X6_2mut |
| GGGEAAAK | 4147 | SFV1_P23074 |
| GGSGGG | 4137 | AVIRE_P03360 |
| EAAAKGSSGGG | 4198 | SFV3L_P27401_2mutA |
| GSSPAPEAAAK | 4212 | FOAMV_P14350-Pro_2mutA |
| GGGPAPGSS | 4200 | WMSV_P03359 |
| EAAAKGSSGGG | 4198 | MLVMS_P03355 |
| GGGGGSEAAAK | 4165 | MLVMS_P03355 |
| EAAAKPAPGGS | 4190 | SFV3L_P27401 |
| EAAAKGSSPAP | 4213 | SFV3L_P27401 |
| GGGGGGG | 4117 | FOAMV_P14350_2mutA |
| EAAAKEAAAKEAAAK | 4127 | SFV3L_P27401 |
| GSSPAPGGS | 4184 | FFV_O93209_2mutA |
| GGGGSSEAAAK | 4193 | SFV3L_P27401-Pro_2mutA |
| GGSEAAAKGSS | 4176 | GALV_P21414_3mutA |
| GGSEAAAKGSS | 4176 | BAEVM_P10272_3mutA |
| EAAAKPAPGGG | 4208 | MLVCB_P08361 |
| GSSGSSGSSGSSGSSGSS | 4124 | SFV1_P23074-Pro |
| GGGGSEAAAKGGGGS | 4218 | FOAMV_P14350_2mut |
| GSSPAPGGS | 4184 | MLVMS_P03355_PLV919 |
| GGGGSGGGGS | 4108 | FFV_O93209-Pro |
| GSSGGSPAP | 4183 | KORV_Q9TTC1_3mutA |
| GGSGGS | 4102 | GALV_P21414_3mutA |
| PAPGSSEAAAK | 4215 | WMSV_P03359 |
| PAPGGGGSS | 4203 | MMTVB_P03365-Pro |
| GGGGSSGGS | 4160 | PERV_Q4VFZ2_3mutA_WS |
| GGGGSGGGGS | 4108 | FFV_O93209_2mut |
| GGGGSGGGGSGGGGSGGGGS | 4110 | XMRV6_A1Z651 |
| GGSGSSEAAAK | 4175 | SFV1_P23074_2mut |
| GGSGGGGSS | 4157 | GALV_P21414_3mutA |
| GGSEAAAKPAP | 4187 | MLVBM_Q7SVK7 |
| EAAAKGGSPAP | 4189 | SFV1_P23074_2mutA |
| PAPAPAPAP | 4134 | FFV_O93209 |
| GSSGGSPAP | 4183 | MMTVB_P03365-Pro |
| GGGGGSPAP | 4171 | KORV_Q9TTC1_3mutA |
| EAAAKGGGPAP | 4207 | PERV_Q4VFZ2 |
| GSSGGSPAP | 4183 | BAEVM_P10272 |
| GGGGG | 4115 | FFV_O93209 |
| GGGGGS | 4138 | FLV_P10273_3mutA |
| EAAAKEAAAKEAAAK | 4127 | FOAMV_P14350 |
| PAPGGG | 4150 | MLVCB_P08361_3mut |
| GSSGGSEAAAK | 4177 | FOAMV_P14350_2mutA |
| GGSPAPGGG | 4170 | FLV_P10273_3mut |
| GSSGSSGSSGSSGSSGSS | 4124 | SFV1_P23074-Pro_2mutA |
| GGSPAPEAAAK | 4188 | SFV3L_P27401 |
| PAPGGGGSS | 4203 | HTL3P_Q4U0X6_2mutB |
| GGGGSSEAAAK | 4193 | MMTVB_P03365_2mut_WS |
| PAPGGS | 4144 | MLVRD_P11227_3mut |
| GGSGGSGGSGGSGGS | 4105 | MMTVB_P03365 |
| GSAGSAAGSGEF | 4221 | AVIRE_P03360 |
| GSSGGS | 4140 | BAEVM_P10272_3mutA |
| GGSGGGGSS | 4157 | MMTVB_P03365 |
| GGSGGGGSS | 4157 | WMSV_P03359 |
| PAPEAAAKGSS | 4216 | SFV1_P23074 |
| GSSGSSGSSGSS | 4122 | SFV1_P23074-Pro_2mutA |
| PAPAPAPAPAPAP | 4136 | SFV3L_P27401 |
| PAPGSSGGG | 4204 | FLV_P10273_3mut |
| GGSGSSPAP | 4181 | MLVMS_P03355 |
| GGSGGGPAP | 4169 | FOAMV_P14350 |
| PAPGGGGGS | 4174 | KORV_Q9TTC1_3mutA |
| EAAAKGSSPAP | 4213 | GALV_P21414_3mutA |
| GGSGSSPAP | 4181 | MLVBM_Q7SVK7_3mut |
| EAAAKGSS | 4152 | SFV3L_P27401_2mut |
| GGGGGSEAAAK | 4165 | WMSV_P03359 |
| GGGGGGGG | 4118 | SFV1_P23074-Pro |
| EAAAKEAAAK | 4126 | MLVBM_Q7SVK7 |
| GGGEAAAKGGS | 4166 | MLVBM_Q7SVK7 |
| EAAAKGGSPAP | 4189 | SFV3L_P27401_2mut |
| GSSEAAAK | 4151 | XMRV6_A1Z651 |
| PAPGGGEAAAK | 4209 | MMTVB_P03365_WS |
| GGSPAP | 4143 | GALV_P21414_3mutA |
| GSSPAPGGG | 4202 | MLVBM_Q7SVK7_3mutA_WS |
| GGSGSSPAP | 4181 | SFV1_P23074_2mutA |
| GGS | | HTL32_Q0R5R2_2mut |
| GGSGGGGSS | 4157 | MMTVB_P03365-Pro |
| GGGGSGGGGSGGGGSGGGGS | 4110 | SFVCP_Q87040_2mutA |
| EAAAKGGGPAP | 4207 | FOAMV_P14350_2mut |
| GSSGGGEAAAK | 4195 | MMTVB_P03365 |
| SGGSSGGSSGSETPGTSESATPESSGGSSGGSS | 4006 | MLVBM_Q7SVK7_3mutA_WS |
| AEAAAKEAAAKEAAAKEAAAKALEAEAAAKEAAAKEAAAKEAAAKA | 4217 | MMTVB_P03365_WS |
| EAAAKEAAAK | 4126 | FOAMV_P14350-Pro_2mut |
| GSSPAPEAAAK | 4212 | FOAMV_P14350_2mutA |
| EAAAKPAPGGS | 4190 | GALV_P21414_3mutA |
| GSSGGSPAP | 4183 | KORV_Q9TTC1-Pro_3mut |
| GGGPAPEAAAK | 4206 | MLVAV_P03356 |
| GGGEAAAKPAP | 4205 | SFV1_P23074-Pro_2mut |
| GGGGGSEAAAK | 4165 | SFV3L_P27401_2mut |
| GGGPAPGSS | 4200 | SFV3L_P27401_2mut |
| GGSEAAAKPAP | 4187 | AVIRE_P03360 |
| GSSGSSGSSGSSGSSGSS | 4124 | SFV1_P23074-Pro_2mut |
| EAAAKGSSGGS | 4180 | FOAMV_P14350_2mutA |
| GGGGGG | 4116 | MLVBM_Q7SVK7_3mut |
| GSSPAPGGS | 4184 | PERV_Q4VFZ2 |
| GGSGSSPAP | 4181 | GALV_P21414_3mutA |
| GGGPAPEAAAK | 4206 | SFV3L_P27401 |
| GGSGGGEAAAK | 4163 | WMSV_P03359 |
| GSAGSAAGSGEF | 4221 | SFV1_P23074_2mut |
| GSSGGGEAAAK | 4195 | MLVMS_P03355 |
| GGG | | MMTVB_P03365-Pro |
| PAPGSSGGS | 4186 | FOAMV_P14350_2mut |
| GGGGSSPAP | 4199 | FFV_O93209_2mut |
| SGGSSGGSSGSETPGTSESATPESSGGSSGGSS | 4006 | MMTVB_P03365_WS |
| GGGGGGG | 4117 | XMRV6_A1Z651 |
| PAPAPAPAPAP | 4135 | FOAMV_P14350 |
| GGGGSGGGGSGGGGSGGGGS | 4110 | MMTVB_P03365_2mut_WS |
| GGSGGGPAP | 4169 | SFV3L_P27401_2mut |
| GGGGGG | 4116 | SFV1_P23074-Pro |
| EAAAKPAPGSS | 4214 | SFV3L_P27401_2mut |
| GGGGSSGGS | 4160 | HTL3P_Q4U0X6_2mut |
| PAPGSSEAAAK | 4215 | MMTVB_P03365-Pro |
| GGGGSSPAP | 4199 | FOAMV_P14350-Pro_2mut |
| PAPGSSGGS | 4186 | MMTVB_P03365 |
| AEAAAKEAAAKEAAAKEAAAKALEAEAAAKEAAAKEAAAKEAAAKA | 4217 | SRV2_P51517 |
| PAPAPAP | 4133 | MMTVB_P03365_2mut_WS |
| PAPGGGGGS | 4174 | MMTVB_P03365_2mutB |
| GGGGSS | 4145 | SFV1_P23074-Pro_2mutA |
| EAAAKEAAAKEAAAKEAAAK | 4128 | SFV3L_P27401-Pro |
| GGSGGSGGSGGSGGS | 4105 | MMTVB_P03365-Pro |
| GGGGGGG | 4117 | SFV3L_P27401_2mut |
| PAPGGGEAAAK | 4209 | SFV3L_P27401 |
| PAPGSS | 4154 | FOAMV_P14350_2mutA |
| GGGGSGGGGS | 4108 | SFVCP_Q87040_2mutA |
| GSSGGSGGG | 4161 | XMRV6_A1Z651 |
| GGGGSGGGGSGGGGSGGGGSGGGGSGGGGS | 4112 | MLVBM_Q7SVK7 |
| GSSEAAAKGGG | 4196 | FFV_O93209-Pro_2mut |
| GGSEAAAKPAP | 4187 | SFV3L_P27401-Pro |
| GSSGGSGGG | 4161 | SFV1_P23074_2mut |
| EAAAKGGGGSS | 4197 | FOAMV_P14350_2mutA |
| GGGGGG | 4116 | SFV3L_P27401_2mut |
| GGGGG | 4115 | MLVBM_Q7SVK7_3mut |
| PAPEAAAKGGG | 4210 | SFV3L_P27401 |
| EAAAKGGSPAP | 4189 | KORV_Q9TTC1_3mutA |
| GGGEAAAKPAP | 4205 | SFV1_P23074_2mut |
| GSSGSSGSSGSSGSSGSS | 4124 | KORV_Q9TTC1-Pro |
| EAAAKEAAAKEAAAKEAAAK | 4128 | SFVCP_Q87040 |
| PAPGSSEAAAK | 4215 | MLVBM_Q7SVK7 |
| GSSGSSGSS | 4121 | FFV_O93209-Pro_2mut |
| GSSGGGPAP | 4201 | SFV3L_P27401-Pro_2mut |
| GGGPAPEAAAK | 4206 | WMSV_P03359_3mut |
| GGGEAAAK | 4147 | MMTVB_P03365-Pro |
| GSSGSSGSSGSS | 4122 | SFV3L_P27401-Pro_2mutA |
| PAPAPAPAPAP | 4135 | FFV_O93209-Pro |
| GGSPAPEAAAK | 4188 | FFV_O93209-Pro_2mut |
| GSSGSSGSSGSSGSSGSS | 4124 | GALV_P21414 |
| EAAAKEAAAKEAAAKEAAAKEAAAK | 4129 | FOAMV_P14350 |
| GGGPAPEAAAK | 4206 | MMTVB_P03365-Pro |
| PAPGGSGGG | 4173 | MLVF5_P26810_3mutA |
| PAPGGSGGG | 4173 | FLV_P10273_3mut |
| GGGEAAAKGGS | 4166 | SFV3L_P27401 |
| GSAGSAAGSGEF | 4221 | MLVBM_Q7SVK7_3mut |
| GSSPAPGGG | 4202 | MPMV_P07572_2mutB |
| GSSGSSGSSGSSGSSGSS | 4124 | FOAMV_P14350 |
| GGSGGGGSS | 4157 | BLVJ_P03361_2mut |
| PAPEAAAKGSS | 4216 | SFV1_P23074-Pro |
| GGG | | FFV_O93209 |
| EAAAKGGGGSS | 4197 | SFV1_P23074_2mut |
| EAAAKEAAAKEAAAKEAAAKEAAAKEAAAK | 4130 | SRV2_P51517 |
| GGGGSGGGGSGGGGSGGGGSGGGGSGGGGS | 4112 | MMTVB_P03365 |
| GGGEAAAKGGS | 4166 | MMTVB_P03365_WS |
| GSSGSS | 4120 | SFV1_P23074 |
| GSSGGGGGS | 4162 | SFV3L_P27401 |
| GGGGSSEAAAK | 4193 | SFV1_P23074 |
| EAAAKGSSGGS | 4180 | HTL1A_P03362_2mutB |
| GSSEAAAKGGS | 4178 | GALV_P21414_3mutA |
| EAAAKGSSPAP | 4213 | SFV1_P23074 |
| EAAAKPAPGSS | 4214 | SFV3L_P27401_2mutA |
| PAPGSSGGG | 4204 | SFV3L_P27401-Pro_2mut |
| GGGGSGGGGSGGGGSGGGGSGGGGSGGGGS | 4112 | SFV3L_P27401-Pro |
| EAAAKEAAAKEAAAKEAAAKEAAAK | 4129 | MMTVB_P03365_WS |
| GGGGSSEAAAK | 4193 | MLVF5_P26810_3mutA |
| EAAAKGGSPAP | 4189 | GALV_P21414 |
| PAPEAAAKGSS | 4216 | MMTVB_P03365_WS |
| GSSGGGGGS | 4162 | SFVCP_Q87040_2mut |
| GGGGSSPAP | 4199 | SFV1_P23074 |
| EAAAKGGGGSS | 4197 | XMRV6_A1Z651 |
| PAPAPAPAP | 4134 | MMTVB_P03365 |
| GGSEAAAKGSS | 4176 | SFV3L_P27401_2mutA |
| GSSPAPGGG | 4202 | MMTVB_P03365_WS |
| GGGGGG | 4116 | SFV3L_P27401-Pro |
| GGSGGSGGS | 4103 | FOAMV_P14350-Pro_2mut |
| PAPAPAPAPAPAP | 4136 | WMSV_P03359 |
| GSSPAP | 4153 | MLVBM_Q7SVK7 |
| GGGGGSGSS | 4159 | MMTVB_P03365_2mut_WS |
| EAAAKGSSGGS | 4180 | MMTVB_P03365_2mutB_WS |
| EAAAK | 4028 | FFV_O93209_2mutA |
| PAPEAAAK | 4156 | SFV1_P23074-Pro |
| EAAAKGGSGSS | 4179 | SFV3L_P27401 |
| GGSGGSGGS | 4103 | FFV_O93209-Pro |
| GSSGGGEAAAK | 4195 | MMTVB_P03365 |
| SGGSSGGSSGSETPGTSESATPESSGGSSGGSS | 4006 | MLVFF_P26809_3mutA |
| GGSGGSGGSGGSGGSGGS | 4106 | HTL1L_P0C211_2mutB |
| GGGEAAAK | 4147 | SFV3L_P27401-Pro_2mutA |
| GGGGGSGSS | 4159 | MMTVB_P03365 |
| GSSPAPGGS | 4184 | FOAMV_P14350_2mutA |
| EAAAKGSS | 4152 | MLVMS_P03355 |
| GSSGGSGGG | 4161 | FFV_O93209-Pro |
| GGSGGGGSS | 4157 | MMTVB_P03365-Pro_2mut |
| GGSPAPGSS | 4182 | FOAMV_P14350_2mut |
| GGSGGSGGSGGSGGSGGS | 4106 | SFVCP_Q87040-Pro_2mut |
| GSSEAAAKGGG | 4196 | FOAMV_P14350_2mutA |
| GGSGGSGGS | 4103 | MMTVB_P03365-Pro |
| GSSGSSGSSGSSGSSGSS | 4124 | MMTVB_P03365_2mut_WS |
| GSSGSSGSSGSSGSS | 4123 | MMTVB_P03365-Pro |
| PAPEAAAK | 4156 | WDSV_O92815 |
| GSSGSSGSSGSSGSS | 4123 | FFV_O93209-Pro_2mut |
| EAAAKGGGGSEAAAK | 4219 | MMTVB_P03365-Pro |
| GGSPAPEAAAK | 4188 | FOAMV_P14350 |
| GSSGSS | 4120 | PERV_Q4VFZ2 |
| GGG | | MMTVB_P03365-Pro |
| GGGGSGGGGSGGGGS | 4109 | FFV_O93209_2mut |
| EAAAKEAAAKEAAAKEAAAKEAAAKEAAAK | 4130 | MMTVB_P03365-Pro |
| GGSGSSPAP | 4181 | WMSV_P03359 |
| GGGGGGGG | 4118 | SFV3L_P27401_2mut |
| PAPGSSEAAAK | 4215 | FOAMV_P14350-Pro_2mutA |
| GGGGSSPAP | 4199 | FOAMV_P14350_2mut |
| GSSGGSPAP | 4183 | MLVBM_Q7SVK7_3mut |
| GSSGGGGGS | 4162 | GALV_P21414_3mutA |
| EAAAKEAAAKEAAAKEAAAKEAAAK | 4129 | MMTVB_P03365 |
| GSSGGGGGS | 4162 | SFV1_P23074_2mut |
| GGGGSEAAAKGGGGS | 4218 | SFV1_P23074 |
| GGGEAAAKPAP | 4205 | FFV_O93209 |
| PAPGGGEAAAK | 4209 | SFV1_P23074 |
| GGSGGGEAAAK | 4163 | PERV_Q4VFZ2_3mutA_WS |
| GSSGGG | 4146 | MMTVB_P03365-Pro |
| EAAAKGSSGGS | 4180 | FFV_O93209_2mut |
| GGGGG | 4115 | SFV1_P23074_2mut |
| GGGPAP | 4149 | SFV3L_P27401 |
| GSSGGSEAAAK | 4177 | FFV_O93209 |
| SGGSSGGSSGSETPGTSESATPESSGGSSGGSS | 4006 | MMTVB_P03365-Pro |
| GSSGGGEAAAK | 4195 | SFV1_P23074_2mutA |
| GSSGSSGSSGSSGSS | 4123 | SFV3L_P27401_2mut |
| GGSEAAAKPAP | 4187 | FLV_P10273 |
| GGGGSGGGGS | 4108 | FOAMV_P14350-Pro_2mutA |
| GSSEAAAKPAP | 4211 | SFV3L_P27401 |
| GGGGSEAAAKGGGGS | 4218 | MMTVB_P03365-Pro |
| PAPGSSEAAAK | 4215 | MLVF5_P26810_3mut |
| EAAAKGGSGGG | 4167 | SFV3L_P27401 |
| GGGPAPGGS | 4172 | SFV3L_P27401 |
| GSSEAAAKGGS | 4178 | FOAMV_P14350_2mutA |
| EAAAKGGSGGG | 4167 | HTL1L_P0C211 |
| GSSGGSPAP | 4183 | SFV3L_P27401_2mutA |
| PAPAP | 4132 | FFV_O93209 |
| PAPGGSGSS | 4185 | MMTVB_P03365_WS |
| EAAAKGGGGGS | 4168 | FOAMV_P14350_2mut |
| PAPEAAAKGGS | 4192 | SFV3L_P27401_2mut |
| GSSEAAAKPAP | 4211 | MMTVB_P03365-Pro |
| GGSGGS | 4102 | PERV_Q4VFZ2_3mut |
| GSSEAAAKGGG | 4196 | FFV_O93209-Pro_2mutA |
| EAAAK | 4028 | HTL1L_P0C211 |
| GSSPAP | 4153 | MLVMS_P03355 |
| EAAAKPAPGGG | 4208 | FFV_O93209-Pro_2mut |
| GGGGSEAAAKGGGGS | 4218 | SFV1_P23074-Pro_2mut |
| EAAAKGSSGGS | 4180 | SFV3L_P27401 |
| GSAGSAAGSGEF | 4221 | FFV_O93209_2mutA |
| PAPEAAAKGGS | 4192 | MMTVB_P03365_2mutB_WS |
| EAAAKEAAAKEAAAKEAAAKEAAAKEAAAK | 4130 | MMTVB_P03365 |
| GGS | | MMTVB_P03365 |
| GGSEAAAKPAP | 4187 | SFV1_P23074 |
| EAAAKGSSGGG | 4198 | HTLV2_P03363_2mut |
| GGSEAAAKGGG | 4164 | MMTVB_P03365_WS |
| GGSGGS | 4102 | FFV_O93209-Pro |
| GSSEAAAKGGS | 4178 | MMTVB_P03365-Pro |
| PAPAPAPAPAP | 4135 | SFV1_P23074_2mutA |
| GGSEAAAKGGG | 4164 | MMTVB_P03365_2mutB_WS |
| PAPAPAPAP | 4134 | MMTVB_P03365_WS |
| GGGGSGGGGSGGGGSGGGGSGGGGS | 4111 | HTL3P_Q4U0X6_2mut |
| PAPGGSEAAAK | 4191 | SFV1_P23074-Pro_2mut |
| GGSGGGPAP | 4169 | MMTVB_P03365 |
| GSSGSSGSSGSSGSSGSS | 4124 | MMTVB_P03365-Pro |
| GGSEAAAKPAP | 4187 | SFV1_P23074-Pro |
| GGGEAAAKGSS | 4194 | SFV3L_P27401_2mutA |
| GGGPAPGGS | 4172 | AVIRE_P03360 |
| PAPGGG | 4150 | MLVRD_P11227 |
| GGSEAAAKGSS | 4176 | SFV3L_P27401_2mut |
| GGGEAAAKGSS | 4194 | FOAMV_P14350_2mut |
| GGGEAAAKGSS | 4194 | SFV1_P23074-Pro |
| EAAAKEAAAKEAAAKEAAAK | 4128 | MLVAV_P03356 |
| EAAAKGGGPAP | 4207 | JSRV_P31623_2mutB |
| EAAAKGGGGSS | 4197 | FOAMV_P14350_2mut |
| EAAAKEAAAKEAAAKEAAAKEAAAK | 4129 | SRV2_P51517 |
| GSSGGGGGS | 4162 | FFV_O93209 |
| PAPAPAP | 4133 | FOAMV_P14350_2mutA |
| GGSGGSGGSGGS | 4104 | FOAMV_P14350 |
| GGGEAAAK | 4147 | MMTVB_P03365_WS |
| GGGGGS | 4138 | SFV1_P23074_2mutA |
| GGSGGS | 4102 | WMSV_P03359_3mut |
| EAAAKGGS | 4142 | MMTVB_P03365-Pro |
| GGGGSS | 4145 | BLVJ_P03361_2mut |
| PAPAP | 4132 | MMTVB_P03365-Pro_2mut |
| PAPGGG | 4150 | SMRVH_P03364 |
| EAAAKGGGGSS | 4197 | SFV3L_P27401 |
| PAPAPAPAPAP | 4135 | MMTVB_P03365 |
| GGGPAP | 4149 | MMTVB_P03365-Pro |
| GSSGGSGGG | 4161 | MMTVB_P03365 |
| EAAAKGGGPAP | 4207 | FOAMV_P14350_2mutA |
| GSSGSSGSSGSS | 4122 | SFV1_P23074 |
| GGGGSGGGGS | 4108 | SFV3L_P27401 |
| GSSGGSGGG | 4161 | MLVF5_P26810 |
| GGGEAAAKPAP | 4205 | MMTVB_P03365-Pro |
| PAPEAAAK | 4156 | HTLV2_P03363_2mut |
| GSSGSSGSSGSS | 4122 | FOAMV_P14350_2mut |
| GSSEAAAKPAP | 4211 | MMTVB_P03365-Pro |
| PAPEAAAKGGG | 4210 | HTL3P_Q4U0X6_2mut |
| GGSEAAAKGSS | 4176 | MMTVB_P03365-Pro |
| EAAAKPAPGGS | 4190 | MMTVB_P03365_2mut_WS |
| GSSGGSEAAAK | 4177 | MLVF5_P26810_3mutA |
| GGGGSGGGGSGGGGSGGGGSGGGGSGGGGS | 4112 | MLVF5_P26810_3mut |
| EAAAKGGGGSS | 4197 | MMTVB_P03365-Pro |
| GGGGGSGSS | 4159 | HTL1A_P03362_2mutB |
| PAPAP | 4132 | FFV_O93209-Pro_2mut |
| GGGGGSPAP | 4171 | HTL1C_P14078_2mut |
| GGGPAP | 4149 | HTLV2_P03363_2mut |
| EAAAKGGGGSEAAAK | 4219 | SFVCP_Q87040 |
| GGSEAAAKGGG | 4164 | FFV_O93209-Pro_2mutA |
| GSSPAPGGS | 4184 | FOAMV_P14350-Pro_2mut |
| GGGGGGG | 4117 | MMTVB_P03365-Pro |
| EAAAKGSS | 4152 | SFV3L_P27401_2mutA |
| EAAAKGGGGSEAAAK | 4219 | MMTVB_P03365-Pro |
| GGGGSEAAAKGGGGS | 4218 | SFV1_P23074-Pro_2mutA |
| EAAAKGGGGSS | 4197 | MMTVB_P03365 |
| GGGEAAAKGGS | 4166 | SFV1_P23074 |
| PAPEAAAKGGG | 4210 | MLVF5_P26810 |
| GGGGSSGGS | 4160 | MMTVB_P03365 |
| GGSGSS | 4139 | MMTVB_P03365 |
| PAPAPAPAPAPAP | 4136 | KORV_Q9TTC1 |
| EAAAKGGG | 4148 | SFV1_P23074-Pro_2mut |
| PAPAPAPAPAPAP | 4136 | SRV2_P51517 |
| GSSGSSGSSGSSGSS | 4123 | FFV_O93209-Pro_2mutA |
| GGGGSS | 4145 | FOAMV_P14350_2mut |
| PAPGGGEAAAK | 4209 | MMTVB_P03365_WS |
| GGSGGGEAAAK | 4163 | FFV_O93209-Pro_2mut |
| PAPAPAPAPAP | 4135 | MMTVB_P03365_WS |
| GGGEAAAKGGS | 4166 | MMTVB_P03365-Pro |
| GGGEAAAKGSS | 4194 | MMTVB_P03365_2mutB |
| GSSPAPEAAAK | 4212 | MMTVB_P03365_WS |
| EAAAKEAAAKEAAAKEAAAKEAAAK | 4129 | SFV1_P23074-Pro_2mutA |
| PAPGGG | 4150 | SFV3L_P27401 |
| GSSEAAAKGGG | 4196 | MMTVB_P03365_WS |
| GGGGSSEAAAK | 4193 | FOAMV_P14350_2mut |
| PAPGSSGGS | 4186 | SFV1_P23074-Pro_2mut |
| GSSGSSGSSGSSGSSGSS | 4124 | SFV3L_P27401 |
| EAAAKGSSGGG | 4198 | MMTVB_P03365 |
| PAPGGGGSS | 4203 | WDSV_O92815_2mutA |
| GGSPAP | 4143 | MMTVB_P03365-Pro |
| GGSGGSGGSGGSGGS | 4105 | SFVCP_Q87040-Pro_2mut |
| PAPAPAPAP | 4134 | MMTVB_P03365-Pro |
| GGGGG | 4115 | HTL1A_P03362 |
| GGSGGSGGSGGS | 4104 | SFV1_P23074_2mutA |
| GSSGSSGSSGSSGSS | 4123 | FOAMV_P14350-Pro_2mut |
| PAPGGSEAAAK | 4191 | MMTVB_P03365_2mutB_WS |
| PAPAPAPAP | 4134 | SFV1_P23074_2mut |
| PAPGGGGSS | 4203 | MMTVB_P03365 |
| GGSGSS | 4139 | SFV3L_P27401_2mut |
| EAAAKEAAAKEAAAKEAAAK | 4128 | MMTVB_P03365_2mut |
| EAAAKGGSGGG | 4167 | HTL3P_Q4U0X6_2mut |
| PAPGGGGSS | 4203 | SFVCP_Q87040-Pro_2mutA |
| EAAAKGGGGGS | 4168 | MLVAV_P03356 |
| GGGGGS | 4138 | FOAMV_P14350_2mut |
| GGGEAAAKGGS | 4166 | FFV_O93209-Pro_2mutA |
| EAAAKPAPGGG | 4208 | MMTVB_P03365_2mutB |
| GGSGGGPAP | 4169 | FFV_O93209_2mut |
| GSSEAAAKPAP | 4211 | MMTVB_P03365 |
| PAPAPAPAPAPAP | 4136 | SFV1_P23074_2mut |
| GGSPAPGGG | 4170 | MMTVB_P03365-Pro |
| GGSGGGEAAAK | 4163 | MMTVB_P03365 |
| PAPAP | 4132 | SFVCP_Q87040 |
| GSSEAAAK | 4151 | SFVCP_Q87040 |
| GGGGSGGGGSGGGGS | 4109 | MMTVB_P03365-Pro |
| GSSGSSGSS | 4121 | SFV3L_P27401 |
| EAAAKGGSGGG | 4167 | MMTVB_P03365-Pro |
| GSSPAP | 4153 | SFV1_P23074_2mut |
| GGGEAAAK | 4147 | SFV1_P23074-Pro |
| AEAAAKEAAAKEAAAKEAAAKALEAEAAAKEAAAKEAAAKEAAAKA | 4217 | MMTVB_P03365-Pro |
| PAPGGS | 4144 | HTL1C_P14078_2mut |
| PAPGSSGGS | 4186 | SFV1_P23074_2mut |
| PAPEAAAK | 4156 | MMTVB_P03365_WS |
| PAPAP | 4132 | MMTVB_P03365-Pro |
| EAAAKGGS | 4142 | HTL1A_P03362_2mut |
| GGGGSEAAAKGGGGS | 4218 | HTL1C_P14078 |
| EAAAKGSSGGS | 4180 | FOAMV_P14350-Pro |
| PAPGGSGSS | 4185 | MMTVB_P03365-Pro |
| PAPGGSEAAAK | 4191 | SFV1_P23074_2mut |
| PAPGSSEAAAK | 4215 | FFV_O93209-Pro_2mut |
| PAPGSSGGG | 4204 | FOAMV_P14350-Pro_2mutA |
| GSSGGGEAAAK | 4195 | AVIRE_P03360 |
| GGGGGG | 4116 | SMRVH_P03364_2mut |
| PAPEAAAKGGG | 4210 | MMTVB_P03365-Pro |
| GGGEAAAKGGS | 4166 | SFVCP_Q87040_2mutA |
| PAPAPAPAPAP | 4135 | SRV2_P51517 |
| GSSGSSGSSGSSGSSGSS | 4124 | MMTVB_P03365 |
| EAAAKGGGPAP | 4207 | MLVAV_P03356 |
| PAPAPAPAPAP | 4135 | FOAMV_P14350-Pro_2mutA |
| PAPGGSEAAAK | 4191 | FOAMV_P14350 |
| GSSGGGPAP | 4201 | HTL32_Q0R5R2_2mutB |
| GGGGGSPAP | 4171 | HTL3P_Q4U0X6_2mutB |
| GSSGGSGGG | 4161 | MMTVB_P03365-Pro |
| PAPAP | 4132 | SFVCP_Q87040-Pro |
| GSSGGGPAP | 4201 | MMTVB_P03365-Pro |
| GGSGSS | 4139 | MMTVB_P03365-Pro_2mut |
| GGSPAPEAAAK | 4188 | SFV1_P23074-Pro_2mut |
| EAAAKGGSGGG | 4167 | SFV3L_P27401_2mut |
| GGGGSSEAAAK | 4193 | MMTVB_P03365_WS |
| GGGGGSGSS | 4159 | MMTVB_P03365_2mut |
| GGGGSSGGS | 4160 | SFV1_P23074-Pro_2mutA |
| EAAAKGGGGSEAAAK | 4219 | MMTVB_P03365_WS |
| PAPGGGEAAAK | 4209 | SFV1_P23074-Pro |
| PAPEAAAKGGG | 4210 | MMTVB_P03365 |
| AEAAAKEAAAKEAAAKEAAAKALEAEAAAKEAAAKEAAAKEAAAKA | 4217 | MMTVB_P03365 |
| GSSGGSEAAAK | 4177 | FOAMV_P14350-Pro_2mut |
| GGSPAP | 4143 | MLVBM_Q7SVK7_3mut |
| GSSEAAAK | 4151 | FOAMV_P14350 |
| GSSEAAAK | 4151 | MMTVB_P03365-Pro |
| EAAAKGSSGGS | 4180 | HTL1A_P03362_2mut |
| GGGEAAAKPAP | 4205 | FOAMV_P14350-Pro_2mut |
| EAAAKGGSPAP | 4189 | FOAMV_P14350 |
| GSSEAAAKPAP | 4211 | MMTVB_P03365_WS |
| GSSGSSGSS | 4121 | FOAMV_P14350_2mut |
| EAAAKEAAAKEAAAKEAAAK | 4128 | MMTVB_P03365_WS |
| EAAAK | 4028 | MMTVB_P03365 |
| PAPGSS | 4154 | BAEVM_P10272 |
| PAPGGS | 4144 | FFV_O93209-Pro_2mut |
| GGSGGS | 4102 | SFV1_P23074-Pro_2mutA |
| SGGSSGGSSGSETPGTSESATPESSGGSSGGSS | 4006 | HTLV2_P03363_2mut |
| GGSGGGEAAAK | 4163 | MMTVB_P03365_WS |
| PAPGSSGGG | 4204 | HTL1A_P03362 |
| GGSGGS | 4102 | SFV3L_P27401-Pro |
| GSSGSS | 4120 | SFV1_P23074-Pro |
| PAPGGSEAAAK | 4191 | MMTVB_P03365 |
| GSAGSAAGSGEF | 4221 | MMTVB_P03365-Pro |
| PAPGGG | 4150 | FOAMV_P14350_2mut |
| EAAAKGGSGSS | 4179 | MMTVB_P03365_WS |
| GSSGGGEAAAK | 4195 | SFV3L_P27401-Pro |
| GGSGGGPAP | 4169 | FOAMV_P14350-Pro_2mut |
| PAPAPAPAPAPAP | 4136 | WDSV_O92815 |
| SGSETPGTSESATPES | 4220 | SFVCP_Q87040-Pro_2mutA |
| GGSGGSGGS | 4103 | SFV1_P23074 |
| GGGGSS | 4145 | SFVCP_Q87040_2mut |
| GGGGGSEAAAK | 4165 | MMTVB_P03365 |
| SGSETPGTSESATPES | 4220 | MMTVB_P03365_WS |
| PAPAPAP | 4133 | SFV3L_P27401 |
| PAPEAAAKGSS | 4216 | MMTVB_P03365_2mutB_WS |
| GSSGSSGSSGSSGSS | 4123 | SRV2_P51517 |
| GGGPAPGSS | 4200 | HTL32_Q0R5R2_2mutB |
| GGSGGGGSS | 4157 | MMTVB_P03365-Pro |
| SGSETPGTSESATPES | 4220 | SRV2_P51517 |
| EAAAKGSSGGS | 4180 | MMTVB_P03365-Pro |
| GSSPAPEAAAK | 4212 | MMTVB_P03365-Pro |
| GSSPAPEAAAK | 4212 | SRV2_P51517 |
| GGGGSSPAP | 4199 | MMTVB_P03365-Pro |
| PAPGGGEAAAK | 4209 | SFV1_P23074-Pro_2mutA |
| PAPEAAAKGGS | 4192 | MMTVB_P03365 |
| GSSGSSGSSGSSGSSGSS | 4124 | FOAMV_P14350-Pro |
| GGSPAPGSS | 4182 | SFV3L_P27401 |
| GGGPAPGGS | 4172 | SFV1_P23074-Pro_2mutA |
| GGGPAPGSS | 4200 | MMTVB_P03365-Pro |
| EAAAKPAP | 4155 | MLVBM_Q7SVK7 |
| EAAAKEAAAKEAAAK | 4127 | HTL1C_P14078 |
| GSSGGSEAAAK | 4177 | SRV2_P51517 |
| PAPGGGGGS | 4174 | SRV2_P51517 |
| GGGEAAAK | 4147 | FFV_O93209-Pro_2mut |
| EAAAKGGGPAP | 4207 | HTL32_Q0R5R2 |
| GGSGSSGGG | 4158 | MMTVB_P03365 |
| PAPEAAAKGSS | 4216 | MMTVB_P03365-Pro |
| PAPGGGGGS | 4174 | MMTVB_P03365-Pro |
| EAAAKGGGGGS | 4168 | MMTVB_P03365_WS |
| GGGGGS | 4138 | MMTVB_P03365-Pro |
| GGGGSGGGGSGGGGSGGGGSGGGGS | 4111 | HTL1C_P14078 |
| EAAAKGGSPAP | 4189 | MMTVB_P03365 |
| GGGGSSPAP | 4199 | FFV_O93209-Pro_2mut |
| GGGGSSGGS | 4160 | MMTVB_P03365-Pro |
| PAPGSSGGS | 4186 | MMTVB_P03365-Pro |
| GGGGGS | 4138 | SRV2_P51517 |
| GGSGSSGGG | 4158 | MMTVB_P03365 |
| GSSGGSEAAAK | 4177 | MMTVB_P03365-Pro |
| EAAAKEAAAKEAAAKEAAAK | 4128 | GALV_P21414 |
| GGSEAAAKGGG | 4164 | MMTVB_P03365-Pro |
| SGGSSGGSSGSETPGTSESATPESSGGSSGGSS | 4006 | MMTVB_P03365-Pro |
| GSSEAAAKGGS | 4178 | MMTVB_P03365 |
| GGGGSGGGGSGGGGSGGGGSGGGGSGGGGS | 4112 | HTL3P_Q4U0X6_2mutB |
| GGGEAAAK | 4147 | MMTVB_P03365-Pro |
| PAPAPAPAP | 4134 | MMTVB_P03365-Pro |
| PAPGSSGGG | 4204 | MMTVB_P03365 |
| GSSGSSGSSGSSGSS | 4123 | GALV_P21414 |
| GGSPAP | 4143 | MMTVB_P03365_WS |
| GGGGSGGGGSGGGGSGGGGSGGGGSGGGGS | 4112 | MMTVB_P03365-Pro |
| PAPEAAAK | 4156 | MMTVB_P03365-Pro |
| PAPGSSGGG | 4204 | SFV1_P23074-Pro_2mutA |
| GGGGGSEAAAK | 4165 | MMTVB_P03365_2mutB_WS |
| PAPAPAPAPAP | 4135 | MMTVB_P03365-Pro |
| EAAAKGGSGSS | 4179 | MMTVB_P03365-Pro |
| EAAAKEAAAKEAAAKEAAAK | 4128 | MLVRD_P11227_3mut |
| PAPAPAPAP | 4134 | FOAMV_P14350_2mutA |
| GGGPAPGSS | 4200 | SFVCP_Q87040_2mut |
| PAPEAAAKGSS | 4216 | SFVCP_Q87040_2mut |
| GGSPAPGGG | 4170 | MMTVB_P03365-Pro |
| GGGGSGGGGSGGGGSGGGGS | 4110 | MMTVB_P03365 |
| EAAAKGGS | 4142 | HTL3P_Q4U0X6_2mut |
| PAPGSSGGS | 4186 | MMTVB_P03365_WS |
| GGGGSGGGGS | 4108 | MMTVB_P03365 |
| GGSGGS | 4102 | FOAMV_P14350 |
| EAAAKGGGGSEAAAK | 4219 | SFVCP_Q87040-Pro_2mut |
| EAAAKEAAAKEAAAKEAAAK | 4128 | MMTVB_P03365-Pro_2mutB |
| PAPGGGEAAAK | 4209 | SFVCP_Q87040-Pro |
| GSSGSS | 4120 | JSRV_P31623_2mutB |
| EAAAKGGGGGS | 4168 | MMTVB_P03365_2mut_WS |
| GSSPAPEAAAK | 4212 | MMTVB_P03365-Pro |
| GGGEAAAK | 4147 | HTL1C_P14078 |
| PAPEAAAKGSS | 4216 | HTL32_Q0R5R2_2mutB |
| GGGGSSEAAAK | 4193 | MMTVB_P03365-Pro |
| PAPGSSGGS | 4186 | MMTVB_P03365-Pro |
| EAAAKGGGGGS | 4168 | MMTVB_P03365 |
| GGGGSGGGGSGGGGSGGGGS | 4110 | MMTVB_P03365 |
| EAAAKGGGGSS | 4197 | HTL3P_Q4U0X6_2mut |
| GGGEAAAKGGS | 4166 | SFVCP_Q87040-Pro |
| GGGGGSPAP | 4171 | MMTVB_P03365-Pro_2mutB |
| GGSGGGEAAAK | 4163 | SFV3L_P27401-Pro |
| PAPGGGGGS | 4174 | SFV3L_P27401-Pro |
| EAAAKGGGGSEAAAK | 4219 | MMTVB_P03365 |
| PAPEAAAKGSS | 4216 | MMTVB_P03365-Pro |
| GGSEAAAKGGG | 4164 | MMTVB_P03365-Pro |
| GGSGGSGGSGGSGGS | 4105 | SMRVH_P03364_2mutB |
| GGSGGSGGSGGSGGS | 4105 | HTL1L_P0C211_2mut |
| GGGGGG | 4116 | WDSV_O92815 |
| GGGGGSGSS | 4159 | MMTVB_P03365-Pro |
| GGSEAAAKPAP | 4187 | SFV3L_P27401-Pro_2mut |
| GGGPAPGSS | 4200 | MMTVB_P03365_2mut_WS |
| GGGGGS | 4138 | MMTVB_P03365_WS |
| GGSPAPEAAAK | 4188 | MMTVB_P03365 |
| PAPEAAAKGGS | 4192 | HTL1A_P03362 |
| EAAAKGGSGSS | 4179 | MMTVB_P03365_2mut_WS |
| GGGPAPEAAAK | 4206 | SFV3L_P27401-Pro_2mut |
| PAPGGGGSS | 4203 | HTL32_QOR5R2_2mut |
| GSSPAPGGG | 4202 | HTL3P_Q4U0X6_2mut |
| GGGGSSGGS | 4160 | BLVAU_P25059_2mut |
| EAAAKGGGGGS | 4168 | HTL1L_P0C211 |
| GGSEAAAKGSS | 4176 | JSRV_P31623_2mutB |
| GSSGGG | 4146 | USRV_P31623 |
| GGSGGSGGSGGS | 4104 | MMTVB_P03365-Pro |
| EAAAKPAP | 4155 | SFV1_P23074-Pro_2mutA |
| GGGGSSGGS | 4160 | MMTVB_P03365_WS |
| GGSGGS | 4102 | MMTVB_P03365_WS |
| EAAAKGGGGGS | 4168 | MMTVB_P03365-Pro |
| GGGGSGGGGSGGGGSGGGGSGGGGSGGGGS | 4112 | MMTVB_P03365 |
| GGSGGSGGS | 4103 | MMTVB_P03365 |
| GGGGGSEAAAK | 4165 | MLVBM_Q7SVK7 |
| GGSGSSPAP | 4181 | MMTVB_P03365_WS |
| EAAAKEAAAKEAAAK | 4127 | JSRV_P31623 |
| PAPEAAAKGGS | 4192 | MMTVB_P03365-Pro |
| GGSGSSEAAAK | 4175 | FOAMV_P14350 |
| GGGGGSGSS | 4159 | MMTVB_P03365-Pro_2mut |
| GGGPAPGGS | 4172 | MMTVB_P03365 |
| SGSETPGTSESATPES | 4220 | SFVCP_Q87040_2mut |
| GSSPAPGGS | 4184 | SFV1_P23074-Pro_2mutA |
| GSSGSSGSSGSSGSS | 4123 | MMTVB_P03365 |
| EAAAKGGGPAP | 4207 | MMTVB_P03365 |
| GSSGGG | 4146 | MMTVB_P03365_2mut_WS |
| GGGEAAAKPAP | 4205 | MMTVB_P03365 |
| PAPGGSGGG | 4173 | MMTVB_P03365-Pro |
| GSSGGSGGG | 4161 | WDSV_O92815_2mut |
| GGSGGG | 4137 | HTL32_Q0R5R2_2mut |
| EAAAKGGSPAP | 4189 | HTLV2_P03363_2mut |
| GGSPAPEAAAK | 4188 | MMTVB_P03365-Pro |
| GSSGGSEAAAK | 4177 | MMTVB_P03365_2mut |
| GSAGSAAGSGEF | 4221 | MMTVB_P03365_WS |
| PAPGGSGSS | 4185 | FFV_O93209 |
| GGSEAAAKGGG | 4164 | MMTVB_P03365 |
| GGSPAPGSS | 4182 | MMTVB_P03365-Pro |
| GSSGGSGGG | 4161 | SFV3L_P27401 |
| PAPEAAAKGGG | 4210 | HTL1A_P03362_2mutB |
| GGGEAAAKPAP | 4205 | MMTVB_P03365-Pro |
| GGSEAAAK | 4141 | HTL32_Q0R5R2_2mutB |
| GGGEAAAKGSS | 4194 | MPMV_P07572 |
| GGGGGSEAAAK | 4165 | MMTVB_P03365-Pro |
| PAPAPAPAPAP | 4135 | SFVCP_Q87040-Pro_2mutA |
| PAPAPAPAPAP | 4135 | HTL1L_P0C211_2mut |
| GGGGSSGGS | 4160 | HTL3P_Q4U0X6 |
| PAPGGSEAAAK | 4191 | MMTVB_P03365_2mut_WS |
| PAPAPAPAPAP | 4135 | HTL1A_P03362 |
| EAAAKPAPGGG | 4208 | MMTVB_P03365_2mut_WS |
| GGSEAAAK | 4141 | MMTVB_P03365_2mut_WS |
| GGGEAAAKGSS | 4194 | SFV1_P23074-Pro_2mutA |
| GGSPAPGSS | 4182 | MMTVB_P03365-Pro |
| GGSEAAAKPAP | 4187 | MLVBM_Q7SVK7 |
| PAPEAAAKGGG | 4210 | MMTVB_P03365_2mut_WS |
| GSSEAAAKPAP | 4211 | MMTVB_P03365-Pro_2mutB |
| GGGGSEAAAKGGGGS | 4218 | MMTVB_P03365-Pro_2mut |
| GSSEAAAKGGS | 4178 | MMTVB_P03365-Pro_2mutB |
| GSSGSSGSSGSSGSS | 4123 | SRV2_P51517_2mutB |
| GGGGGSPAP | 4171 | HTL1L_P0C211_2mut |
| GGSEAAAK | 4141 | MMTVB_P03365 |
| GSSPAPEAAAK | 4212 | SMRVH_P03364_2mutB |
| GGGPAPGGS | 4172 | HTL1C_P14078_2mut |
| GGSPAPEAAAK | 4188 | MMTVB_P03365_WS |
| GGSEAAAKPAP | 4187 | HTL1A_P03362_2mut |
| PAPAPAPAP | 4134 | HTLV2_P03363_2mut |
| GSSPAPGGG | 4202 | MMTVB_P03365 |
| GSSGSSGSSGSS | 4122 | MMTVB_P03365-Pro |
| GGSEAAAKGSS | 4176 | MMTVB_P03365_WS |
| GGSGSSGGG | 4158 | MMTVB_P03365_2mutB |
| GSSGSSGSSGSSGSSGSS | 4124 | JSRV_P31623_2mutB |
| GGSEAAAKPAP | 4187 | MMTVB_P03365-Pro |
| GSSGGSGGG | 4161 | HTLV2_P03363_2mut |
| AEAAAKEAAAKEAAAKEAAAKALEAEAAAKEAAAKEAAAKEAAAKA | 4217 | WDSV_O92815_2mut |
| GGSPAPEAAAK | 4188 | MMTVB_P03365 |
| GGGGSSEAAAK | 4193 | MMTVB_P03365 |
| GGSGGGEAAAK | 4163 | SFV1_P23074-Pro_2mutA |
| GGGGSEAAAKGGGGS | 4218 | WDSV_O92815_2mut |
| GGSGSSEAAAK | 4175 | MMTVB_P03365_2mutB_WS |
| GGSEAAAKPAP | 4187 | MMTVB_P03365_WS |
| GSSGGGEAAAK | 4195 | SFVCP_Q87040-Pro |
| GSSGGS | 4140 | SFVCP_Q87040-Pro_2mut |
| GGSEAAAKPAP | 4187 | SFVCP_Q87040_2mut |
| GSSGGSEAAAK | 4177 | SFVCP_Q87040_2mut |
| GSSPAPEAAAK | 4212 | SRV2_P51517_2mutB |
| GGSGGSGGSGGSGGSGGS | 4106 | BLVAU_P25059 |
| GSSGSSGSSGSSGSS | 4123 | HTL1C_P14078_2mut |
| EAAAKGGGGSS | 4197 | MMTVB_P03365_2mutB |
| GGGEAAAKGSS | 4194 | SFVCP_Q87040-Pro |

### Example 4: Gene Modifying Systems Comprising Cas-Pol Fusions with Various Human DNA Polymerase Theta Domains Enable Precise Editing in Human Cells

[0563] In this example, exemplary gene modifying polypeptides comprising a Cas domain and a polymerase domain (Cas-Pol fusions), were characterized and their ability to programmably install mutations in genomic DNA in human cells was determined. The gene modifying polypeptides comprised different truncations of an exemplary human polymerase (human DNA Polymerase Theta (Polθ) (FIG. 2, Table 23): the gene modifying polypeptide included the polymerase domain, exonuclease domain, and either of two truncated central domains (Polθ_M or Polθ_L) or lacked a central domain (Polθ_4x0q). The gene modifying polypeptides comprised an exemplary Cas domain, SpCas9, comprising an N863A mutation (nCas9). Two different linker sequences were used to connect the Cas domain and Pol domain:

### Exemplary Linker FL:

DNA sequence:
(SEQ ID NO: 4400)
TCTGGAGGATCTAGCGGAGGATCCTCTGGCAGCGAGACACCAGGA
ACAAGCGAGTCAGCAACACCAGAGAGCAGTGGCGGCAGCAGCGGC
GGCAGCAGC
Amino acid sequence:
(SEQ ID NO: 4401)
SGGSSGGSSGSETPGTSESATPESSGGSSGGSS

### Exemplary Linker UL:

DNA sequence:
(SEQ ID NO: 4402)
GCCGAAGCCGCCGCCAAGGAGGCCGCCGCTAAGGAGGCTGCTGCC
AAGGAAGCTGCTGCTAAGGCTTTAGAAGCTGAAGCTGCTGCCAAA
GAAGCTGCCGCCAAAGAGGCTGCCGCAAAGGAGGCCGCTGCCAAG
GCT
Amino acid sequence:
(SEQ ID NO: 4403)
AEAAAKEAAAKEAAAKEAAAKALEAEAAAKEAAAKEAAAKEAAAK
A

Six gene modifying polypeptides (Cas-Pol fusions) were tested: (1) nCas9-FL-Polθ_M, (2) nCas9-FL-Polθ_4x0q, (3) nCas9-UL-Polθ_L, (4) nCas9-UL-Polθ_M, (5) nCas9-UL-Polθ_4x0q, and (6) a benchmark gene modifying polypeptide comprising nCas9 and a reverse transcriptase domain instead of a polymerase domain.

TABLE 23
Exemplary Cas-Pol Fusion Gene
Modifying Polypeptides

| | | SEQ |
|---|---|---|
| | | ID |
| Name | Amino acid sequence | NO |
| Pole_L | GASFDLSPGLQRILDKVSSPLENEKLKSMT | 4404 |
| | INFSSLNRKNTELNEEQEVISNLETKQVQG | |
| | ISFSSNNEVKSKIEMLENNANHDETSSLLP | |
| | RKESNIVDDNGLIPPTPIPTSASKLTFPGI | |
| | LETPVNPWKTNNVLQPGESYLFGSPSDIKN | |
| | HDLSPGSRNGFKDNSPISDTSFSLQLSQDG | |
| | LQLTPASSSSESLSIIDVASDQNLFQTFIK | |
| | EWRCKKRFSISLACEKIRSLTSSKTATIGS | |
| | RFKQASSPQEIPIRDDGFPIKGCDDTLVVG | |
| | LAVCWGGRDAYYFSLQKEQKHSEISASLVP | |
| | PSLDPSLTLKDRMWYLQSCLRKESDKECSV | |
| | VIYDFIQSYKILLLSCGISLEQSYEDPKVA | |
| | CWLLDPDSQEPTLHSIVTSFLPHELPLLEG | |
| | METSQGIQSLGLNAGSEHSGRYRASVESIL | |
| | IFNSMNQLNSLLQKENLQDVFRKVEMPSQY | |
| | CLALLELNGIGFSTAECESQKHIMQAKLDA | |
| | IETQAYQLAGHSFSFTSSDDIAEVLFLELK | |
| | LPPNREMKNQGSKKTLGSTRRGIDNGRKLR | |
| | LGRQFSTSKDVLNKLKALHPLPGLILEWRR | |
| | ITNAITKVVFPLQREKCLNPFLGMERIYPV | |
| | SQSHTATGRITFTEPNIQNVPRDFEIKMPT | |
| | LVGESPPSQAVGKGLLPMGRGKYKKGFSVN | |
| | PRCQAQMEERAADRGMPFSISMRHAFVPFP | |
| | GGSILAADYSQLELRILAHLSHDRRLIQVL | |
| | NTGADVFRSIAAEWKMIEPESVGDDLRQQA | |
| | KQICYGIIYGMGAKSLGEQMGIKENDAACY | |
| | IDSFKSRYTGINQFMTETVKNCKRDGFVQT | |
| | ILGRRRYLPGIKDNNPYRKAHAERQAINTI | |
| | VQGSAADIVKIATVNIQKQLETFHSTFKSH | |
| | GHREGMLQSDQTGLSRKRKLQGMFCPIRGG | |
| | FFILQLHDELLYEVAEEDVVQVAQIVKNEM | |
| | ESAVKLSVKLKVKVKIGASWGELKDFDV | |
| Pole_M | GFKDNSPISDTSFSLQLSQDGLQLTPASSS | 4405 |
| | SESLSIIDVASDQNLFQTFIKEWRCKKRFS | |
| | ISLACEKIRSLTSSKTATIGSRFKQASSPQ | |
| | EIPIRDDGFPIKGCDDTLVVGLAVCWGGRD | |
| | AYYFSLQKEQKHSEISASLVPPSLDPSLTL | |
| | KDRMWYLQSCLRKESDKECSVVIYDFIQSY | |
| | KILLLSCGISLEQSYEDPKVACWLLDPDSQ | |
| | EPTLHSIVTSFLPHELPLLEGMETSQGIQS | |
| | LGLNAGSEHSGRYRASVESILIFNSMNQLN | |
| | SLLQKENLQDVFRKVEMPSQYCLALLELNG | |
| | IGFSTAECESQKHIMQAKLDAIETQAYQLA | |
| | GHSFSFTSSDDIAEVLFLELKLPPNREMKN | |
| | QGSKKTLGSTRRGIDNGRKLRLGRQFSTSK | |
| | DVLNKLKALHPLPGLILEWRRITNAITKVV | |
| | FPLQREKCLNPFLGMERIYPVSQSHTATGR | |
| | ITFTEPNIQNVPRDFEIKMPTLVGESPPSQ | |
| | AVGKGLLPMGRGKYKKGFSVNPRCQAQMEE | |
| | RAADRGMPFSISMRHAFVPFPGGSILAADY | |
| | SQLELRILAHLSHDRRLIQVLNTGADVFRS | |
| | IAAEWKMIEPESVGDDLRQQAKQICYGIIY | |
| | GMGAKSLGEQMGIKENDAACYIDSFKSRYT | |
| | GINQFMTETVKNCKRDGFVQTILGRRRYLP | |
| | GIKDNNPYRKAHAERQAINTIVQGSAADIV | |
| | KIATVNIQKQLETFHSTFKSHGHREGMLQS | |
| | DQTGLSRKRKLQGMFCPIRGGFFILQLHDE | |
| | LLYEVAEEDVVQVAQIVKNEMESAVKLSVK | |
| | LKVKVKIGASWGELKDFDV | |
| Pole_4x0g | SSSSESLSIIDVASDQNLFQTFIKEWRCKK | 4406 |
| | RFSISLACEKIRSLTSSKTATIGSRFKQAS | |
| | SPQEIPIRDDGFPIKGCDDTLVVGLAVCWG | |
| | GRDAYYFSLQKEQKHSEISASLVPPSLDPS | |
| | LTLKDRMWYLQSCLRKESDKECSVVIYDFI | |
| | QSYKILLLSCGISLEQSYEDPKVACWLLDP | |
| | DSQEPTLHSIVTSFLPHELPLLEGMETSQG | |
| | IQSLGLNAGSEHSGRYRASVESILIFNSMN | |
| | QLNSLLQKENLQDVFRKVEMPSQYCLALLE | |
| | LNGIGFSTAECESQKHIMQAKLDAIETQAY | |
| | QLAGHSFSFTSSDDIAEVLFLELKLPPNRE | |
| | MKNQGSKKTLGSTRRGIDNGRKLRLGRQFS | |
| | TSKDVLNKLKALHPLPGLILEWRRITNAIT | |
| | KVVFPLQREKCLNPFLGMERIYPVSQSHTA | |
| | TGRITFTEPNIQNVPRDFEIKMPTLVGESP | |
| | PSQAVGKGLLPMGRGKYKKGFSVNPRCQAQ | |
| | MEERAADRGMPFSISMRHAFVPFPGGSILA | |
| | ADYSQLELRILAHLSHDRRLIQVLNTGADV | |
| | FRSIAAEWKMIEPESVGDDLRQQAKQICYG | |
| | IIYGMGAKSLGEQMGIKENDAACYIDSFKS | |
| | RYTGINQFMTETVKNCKRDGFVQTILGRRR | |
| | YLPGIKDNNPYRKAHAERQAINTIVQGSAA | |
| | DIVKIATVNIQKQLETFHSTFKSHGHREGM | |
| | LQSDQTGLSRKRKLQGMFCPIRGGFFILQL | |
| | HDELLYEVAEEDVVQVAQIVKNEMESAVKL | |
| | SVKLKVKVKIGASWGELKDFDV | |
| Pole_4x0q | SSSSESLSIIDVASDQNLFQTFIKEWRCKK | 4407 |
| GS | RFSISLACEKIRGSGDDTLVVGLAVCWGGR | |
| | DAYYFSLGGSGGLDPSLTLKDRMWYLQSCL | |
| | RKESDKECSVVIYDFIQSYKILLLSCGISL | |
| | EQSYEDPKVACWLLDPDSQEPTLHSIVTSF | |
| | LPHELPLLEGMETSQGIQSLGLNAGSEHSG | |
| | RYRASVESILIFNSMNQLNSLLQKENLQDV | |
| | FRKVEMPSQYCLALLELNGIGFSTAECESQ | |
| | KHIMQAKLDAIETQAYQLAGHSFSFTSSDD | |
| | IAEVLFLELKLPPGGSGGQFSTSKDVLNKL | |
| | KALHPLPGLILEWRRITNAITKVVFPLQRE | |
| | KCLNPFLGMERIYPVSQSHTATGRITFTEP | |
| | NIQNVPRDFEIKMGGSGGMPFSISMRHAFV | |
| | PFPGGSILAADYSQLELRILAHLSHDRRLI | |
| | QVLNTGADVFRSIAAEWKMIEPESVGDDLR | |
| | QQAKQICYGIIYGMGAKSLGEQMGIKENDA | |
| | ACYIDSFKSRYTGINQFMTETVKNCKRDGF | |
| | VQTILGRRRYLPGIKDNNPYRKAHAERQAI | |
| | NTIVQGSAADIVKIATVNIQKQLETFHSTF | |
| | KSHGHREGMLQSDGGSGGCPIRGGFFILQL | |
| | HDELLYEVAEEDVVQVAQIVKNEMESAVKL | |
| | SVKLKVKVKIGASWGELKDFDV | |
| nCas9 | DKKYSIGLDIGTNSVGWAVITDEYKVPSKK | 4408 |
| | FKVLGNTDRHSIKKNLIGALLFDSGETAEA | |
| | TRLKRTARRRYTRRKNRICYLQEIFSNEMA | |
| | KVDDSFFHRLEESFLVEEDKKHERHPIFGN | |
| | IVDEVAYHEKYPTIYHLRKKLVDSTDKADL | |
| | RLIYLALAHMIKFRGHFLIEGDLNPDNSDV | |
| | DKLFIQLVQTYNQLFEENPINASGVDAKAI | |
| | LSARLSKSRRLENLIAQLPGEKKNGLFGNL | |
| | IALSLGLTPNFKSNFDLAEDAKLQLSKDTY | |
| | DDDLDNLLAQIGDQYADLFLAAKNLSDAIL | |
| | LSDILRVNTEITKAPLSASMIKRYDEHHQD | |
| | LTLLKALVRQQLPEKYKEIFFDQSKNGYAG | |
| | YIDGGASQEEFYKFIKPILEKMDGTEELLV | |
| | KLNREDLLRKQRTFDNGSIPHQIHLGELHA | |
| | ILRRQEDFYPFLKDNREKIEKILTFRIPYY | |
| | VGPLARGNSRFAWMTRKSEETITPWNFEEV | |
| | VDKGASAQSFIERMTNFDKNLPNEKVLPKH | |
| | SLLYEYFTVYNELTKVKYVTEGMRKPAFLS | |
| | GEQKKAIVDLLFKTNRKVTVKQLKEDYFKK | |
| | IECFDSVEISGVEDRFNASLGTYHDLLKII | |
| | KDKDFLDNEENEDILEDIVLTLTLFEDREM | |
| | IEERLKTYAHLFDDKVMKQLKRRRYTGWGR | |
| | LSRKLINGIRDKQSGKTILDFLKSDGFANR | |
| | NFMQLIHDDSLTFKEDIQKAQVSGQGDSLH | |
| | EHIANLAGSPAIKKGILQTVKVVDELVKVM | |
| | GRHKPENIVIEMARENQTTQKGQKNSRERM | |
| | KRIEEGIKELGSQILKEHPVENTQLQNEKL | |
| | YLYYLQNGRDMYVDQELDINRLSDYDVDHI | |
| | VPQSFLKDDSIDNKVLTRSDKARGKSDNVP | |
| | SEEVVKKMKNYWRQLLNAKLITQRKFDNLT | |
| | KAERGGLSELDKAGFIKRQLVETRQITKHV | |
| | AQILDSRMNTKYDENDKLIREVKVITLKSK | |
| | LVSDFRKDFQFYKVREINNYHHAHDAYLNA | |
| | VVGTALIKKYPKLESEFVYGDYKVYDVRKM | |
| | IAKSEQEIGKATAKYFFYSNIMNFFKTEIT | |
| | LANGEIRKRPLIETNGETGEIVWDKGRDFA | |
| | TVRKVLSMPQVNIVKKTEVQTGGFSKESIL | |
| | PKRNSDKLIARKKDWDPKKYGGFDSPTVAY | |
| | SVLVVAKVEKGKSKKLKSVKELLGITIMER | |
| | SSFEKNPIDFLEAKGYKEVKKDLIIKLPKY | |
| | SLFELENGRKRMLASAGELQKGNELALPSK | |
| | YVNFLYLASHYEKLKGSPEDNEQKQLFVEQ | |
| | HKHYLDEIIEQISEFSKRVILADANLDKVL | |
| | SAYNKHRDKPIREQAENIIHLFTLTNLGAP | |
| | AAFKYFDTTIDRKRYTSTKEVLDATLIHQS | |
| | ITGLYETRIDLSQLGGD | |

[0566] Test template nucleic acids were constructed coding for a direct a single base pair substitution which, when introduced as an edit by the exemplary gene modifying polypeptides, act to convert an exogenous BFP marker to GFP (as described herein). Template nucleic acids comprised (i) a gRNA spacer sequence for guiding the gene modifying polypeptide to the target region, e.g., a sequence complementary to a 20-nucleotide sequence in BFP locus; (ii) a primer-binding sequence (PBS) capable of complementary base pairing with a single strand of the nicked DNA for target-primed polymerization; (iii) a heterologous object sequence providing a template for polymerization that further comprises the intended final target sequence; and (iv) a gRNA scaffold sequence to associate with the Cas9 domain of the gene modifying polypeptide. The exemplary template nucleic acids were arranged, from 5′ to 3′ in the following order: (i)-(iv)-(iii)-(ii). Template compositions are described in Table 24 (RNACS-4239-DD, and RNACS-4241-DR), where (ii) and (iii) may each be included as either RNA or DNA nucleotides.

TABLE 24
Template nucleic acids used in Example 1

| | Descrip- | Spacer | Scaffold | Pol template | PBS | Full Template |
|---|---|---|---|---|---|---|
| Name | tion | (i) | (iv) | (iii) | (ii) | Molecule |
| Template | BFP_g4_ | mG*mC*mC*rGrArA | rGrUrUrUrUrArGr | CCTGACGTACG | GCGTGCAG | mG*mC*mC*rGrArA |
| DD | 11RT_ | rGrCrArCrUrGrCr | ArGrCrUrArGrArA | (SEQ ID | TG*mC*m | rGrCrArCrUrGrCr |
| | 13PBS_DD | ArCrGrCrCrGrU | rArUrArGrCrArAr | NO: 4413) | U*mU | ArCrGrCrCrGrUrG |
| | | (SEQ ID | GrUrUrArArArArU | | (SEQ ID | rUrUrUrUrArGrAr |
| | | NO: 4409) | rArArGrGrCrUrAr | | NO: 4415) | GrCrUrArGrArArA |
| | | | GrUrCrCrGrUrUrA | | | rUrArGrCrArArGr |
| | | | rUrCrArArCrUrUr | | | UrUrArArArArUrA |
| | | | GrArArArArArGrU | | | rArGrGrCrUrArGr |
| | | | rGrGrCrArCrCrGr | | | UrCrCrGrUrUrArU |
| | | | ArGrUrCrGrGrUrG | | | rCrArArCrUrUrGr |
| | | | rC | | | ArArArArArGrUrG |
| | | | (SEQ ID | | | rGrCrArCrCrGrAr |
| | | | NO: 4411) | | | GrUrCrGrGrUrGrC |
| | | | | | | CCTGACGTACGGCGT |
| | | | | | | GCAGTG*mC*mU*mU |
| | | | | | | (SEQ ID NO: 4417) |
| Template | BFP_g4_ | mG*mC*mC*rGrArA | rGrUrUrUrUrArGr | CCTGACGTACG | rGrCrGrU | mG*mC*mC*rGrArA |
| DR | 11RT_ | rGrCrArCrUrGrCr | ArGrCrUrArGrArA | (SEQ ID | rGrCrAr | rGrCrArCrUrGrCr |
| | 13PBS_DR | ArCrGrCrCrGrU | rArUrArGrCrArAr | NO: 4414) | GrUrG*mC | ArCrGrCrCrGrUrG |
| | | (SEQ ID | GrUrUrArArArArU | | *mU*mU | rUrUrUrUrArGrAr |
| | | NO: 4410) | rArArGrGrCrUrAr | | (SEQ ID | GrCrUrArGrArArA |
| | | | GrUrCrCrGrUrUrA | | NO: 4416) | rUrArGrCrArArGr |
| | | | rUrCrArArCrUrUr | | | UrUrArArArArUrA |
| | | | GrArArArArArGrU | | | rArGrGrCrUrArGr |
| | | | rGrGrCrArCrCrGr | | | UrCrCrGrUrUrArU |
| | | | ArGrUrCrGr | | | rCrArArCrUrUrGr |
| | | | GrUrGrC | | | ArArArArArGrUrG |
| | | | (SEQ ID | | | rGrCrArCrCrGrAr |
| | | | NO: 4412) | | | GrUrCrGrGrUrGrC |
| | | | | | | CCTGACGTACGrGrC |
| | | | | | | rGrUrGrCrArGrUr |
| | | | | | | G*mC*mU*mU (SEQ |
| | | | | | | ID NO: 4418) |
| Template | BFP_g4_ | mG*mC*mC*rGrArA | rGrUrUrUrUrArGr | rCrCrUrGrAr | rGrCrGr | mG*mC*mC*rGrArA |
| RR | 11RT_ | rGrCrArCrUrGrCr | ArGrCrUrArGrArA | CrGrUrArCrG | UrGrCrAr | rGrCrArCrUrGrCr |
| | 13PBS_RR | ArCrGrCrCrGrU | rArUrArGrCrArAr | (SEQ ID | GrUrG*m | ArCrGrCrCrGrUrG |
| | | (SEQ ID | GrUrUrArArArArU | NO: 4421) | C*mU*mU | rUrUrUrUrArGrAr |
| | | NO: 4419) | rArArGrGrCrUrAr | | (SEQ ID | GrCrUrArGrArArA |
| | | | GrUrCrCrGrUrUrA | | NO: 4422) | rUrArGrCrArArGr |
| | | | rUrCrArArCrUrUr | | | UrUrArArArArUrA |
| | | | GrArArArArArGrU | | | rArGrGrCrUrArGr |
| | | | rGrGrCrArCrCrGr | | | UrCrCrGrUrUrArU |
| | | | ArGrUrCrGrGrUrG | | | rCrArArCrUrUrGr |
| | | | rC | | | ArArArArArGrUrG |
| | | | (SEQ ID | | | rGrCrArCrCrGrAr |
| | | | NO: 4420) | | | GrUrCrGrGrUrGrC |
| | | | | | | rCrCrUrGrArCrGr |
| | | | | | | UrArCrGrGrCrGrU |
| | | | | | | rGrCrArGrUrG*mC |
| | | | | | | *mU*mU (SEQ ID |
| | | | | | | NO: 4423) |

RNA, expressed as ‘r_’, for example rA, rU; DNA, expressed as ‘_’, for example A, T; 2′ O-methyl RNA bases are expressed as ‘m_’; Phosphorothioated 2′-O-methyl RNA bases are entered as ‘m_*’.

[0567] Experiments were performed to determine the genome editing capacity of the Cas-Pol fusion gene modifying polypeptides.

[0568] U2OS or HEK293T cells were infected with lentiviral vectors encoding an exemplary gene modifying polypeptide and containing an antibiotic (Puromycin) resistance cassette. The cells stably expressing the gene modifying polypeptide were selected by culturing the cells in puromycin-supplemented media. 250,000 cells/well (96-well plate) were nucleofected with 2.5 uM and 5 uM of the chemically synthesized exemplary template nucleic acid molecules. Cells were subjected to Fluorescence-activated Cell Sorting (FACS, flow) on day 3 post-nucleofection. The frequency of intended editing (conversion of BFP positive cells into GFP positive cells) was determined as the percentage of GFP positive cells relative to the percentage of BFP positive cells (FIGS. 3A and 3B).

[0569] The results show that gene modifying polypeptides nCas9-UL-Polθ_L, nCas9-UL-Polθ_M, nCas9-UL-Polθ_4x0q, nCas9-FL-Polθ_M, and nCas9-FL-Polθ_4x0q exhibited editing activity, e.g., up to ˜75% editing efficiency in HEK293 cells. The gene modifying polypeptides showed high editing activity (comparable to or higher than the benchmark gene modifying polypeptide containing a control reverse transcriptase) with template nucleic acid comprising a DNA-encoded heterologous object sequence and an RNA primer binding sequence, denoted as “DR” (FIG. 3A-B). The gene modifying polypeptides also exhibited editing activity with template nucleic acid comprising both DNA heterologous object sequence and DNA primer binding sequence, denoted as “DD”, although less than when an RNA primer binding sequence was used (FIG. 3A-B). The gene modifying polypeptides showed no editing activity with template nucleic acids comprising RNA heterologous object sequence and RNA primer binding sequences, denoted as “RR” (FIG. 3A-B). The levels of editing were comparable or higher than the benchmark gene modifying polypeptide, demonstrating that gene modifying polypeptides using polymerase domains are useful alternatives to gene modifying polypeptides using reverse transcriptase domains. The results further demonstrate that a variety of truncations of Pole can be used as polymerase domains, as the data shows gene modifying polypeptides comprising any truncations tested (including complete truncation of the central domain) had editing activity.

[0570] It should be understood that for all numerical bounds describing some parameter in this application, such as “about,” “at least,” “less than,” and “more than,” the description also necessarily encompasses any range bounded by the recited values. Accordingly, for example, the description “at least 1, 2, 3, 4, or 5” also describes, inter alia, the ranges 1-2, 1-3, 1-4, 1-5, 2-3, 2-4, 2-5, 3-4, 3-5, and 4-5, et cetera.

[0571] For all patents, applications, or other reference cited herein, such as non-patent literature and reference sequence information, it should be understood that they are incorporated by reference in their entirety for all purposes as well as for the proposition that is recited. Where any conflict exists between a document incorporated by reference and the present application, this application will control. All information associated with reference gene sequences disclosed in this application, such as GeneIDs or accession numbers (typically referencing NCBI accession numbers), including, for example, genomic loci, genomic sequences, functional annotations, allelic variants, and reference mRNA (including, e.g., exon boundaries or response elements) and protein sequences (such as conserved domain structures), as well as chemical references (e.g., PubChem compound, PubChem substance, or PubChem Bioassay entries, including the annotations therein, such as structures and assays, et cetera), are hereby incorporated by reference in their entirety.

[0572] Headings used in this application are for convenience only and do not affect the interpretation of this application.

What is claimed is:

1. A gene modifying polypeptide comprising:
a Cas domain (e.g., a Cas nickase domain, e.g., a Cas9 nickase domain);
a polymerase (Pol) domain of Table 1 or Table 23, or a sequence having at least 70%, 75%, 80%, 85%, 90%, 95%, 97%, 98%, or 99% identity thereto, wherein the Pol domain is C-terminal of the Cas domain; and
a linker disposed between the Pol domain and the Cas domain.

2. The gene modifying polypeptide of claim 1, wherein the linker has a sequence from Table 6, or a sequence having at least 70%, 75%, 80%, 85%, 90%, 95%, 97%, 98%, or 99% identity thereto.

3. The gene modifying polypeptide of claim 1 or 2, wherein the Pol domain has a sequence with at least 90% identity to the Pol domain of Table 1 or 23.

4. The gene modifying polypeptide of any of the preceding claims, wherein the Pol domain has a sequence with at least 95% identity to the Pol domain of Table 1 or 23.

5. The gene modifying polypeptide of any of the preceding claims, wherein the Pol domain has a sequence with at least 98% identity to the Pol domain of Table 1 or 23.

6. The gene modifying polypeptide of any of the preceding claims, wherein the Pol domain has a sequence with at least 99% identity to the Pol domain of Table 1 or 23.

7. The gene modifying polypeptide of any of the preceding claims, wherein the Pol domain has a sequence with 100% identity to the Pol domain of Table 1 or 23.

8. The gene modifying polypeptide of any of the preceding claims, wherein the linker has a sequence with at least 90% identity to the linker sequence from Table 6.

9. The gene modifying polypeptide of any of the preceding claims, wherein the linker has a sequence with at least 95% identity to the linker sequence from Table 6.

10. The gene modifying polypeptide of any of the preceding claims, wherein the linker has a sequence with at least 97% identity to the linker sequence from Table 6.

11. The gene modifying polypeptide of any of the preceding claims, wherein the linker has a sequence with 100% identity to the linker sequence from Table 6.

12. The gene modifying polypeptide of any of the preceding claims, wherein the Cas domain comprises a sequence of Table 4, or a sequence having at least 70%, 75%, 80%, 85%, 90%, 95%, 98%, or 99% identity thereto.

13. The gene modifying polypeptide of any of the preceding claims, wherein the Cas domain is a Cas nickase domain.

14. The gene modifying polypeptide of any of the preceding claims, wherein the Cas domain is a Cas9 nickase domain.

15. The gene modifying polypeptide of any of the preceding claims, wherein the Cas domain comprises an N863A mutation.

16. The gene modifying polypeptide of any of the preceding claims, which comprises an NLS, e.g., wherein the gene modifying polypeptide comprises two NLSs.

17. The gene modifying polypeptide of any of the preceding claims, which comprises an NLS N-terminal of the Cas9 domain.

18. The gene modifying polypeptide of any of the preceding claims, which comprises an NLS C-terminal of the Pol domain.

19. The gene modifying polypeptide of any of the preceding claims, which comprises a first NLS which is N-terminal of the Cas9 domain and a second NLS which is C-terminal of the Pol domain.

20. A nucleic acid (e.g., DNA or RNA, e.g., mRNA) encoding the gene modifying polypeptide of any of the preceding claims.

21. A cell comprising the gene modifying polypeptide of any of claims 1-19 or the nucleic acid of claim 20.

22. A system comprising:
i) the gene modifying polypeptide of any of claims 1-19, and
ii) a template nucleic acid (e.g., a template RNA) that comprises:
a) a gRNA spacer that is complementary to a portion a target nucleic acid sequence;
b) a gRNA scaffold that binds the Cas domain of the gene modifying polypeptide;
c) a heterologous object sequence; and
d) a primer binding site sequence (PBS sequence).

23. The system of claim 22, wherein the template nucleic acid comprises RNA.

24. The system of claim 22 or 23, wherein the template nucleic acid comprises DNA.

25. The system of claim 22, wherein the template nucleic acid comprises DNA and RNA.

26. The system of any of claims 22-25, wherein the template nucleic acid comprises a nucleic acid sequence as listed in Table 24, or a nucleic acid sequence having at least 75%, 80%, 85%, 90%, 95%, 96%, 97%, 98%, or 99% sequence identity thereto.

27. The system of claim 26, wherein the gRNA spacer of the template nucleic acid comprises a spacer sequence as listed in Table 24, or a nucleic acid sequence having at least 75%, 80%, 85%, 90%, 95%, 96%, 97%, 98%, or 99% sequence identity thereto.

28. The system of claim 26 or 27, wherein the gRNA scaffold of the template nucleic acid comprises a scaffold sequence as listed in Table 24, or a nucleic acid sequence having at least 75%, 80%, 85%, 90%, 95%, 96%, 97%, 98%, or 99% sequence identity thereto.

29. The system of any of claims 26-28, wherein the PBS sequence of the template nucleic acid comprises a PBS sequence as listed in Table 24, or a nucleic acid sequence having at least 75%, 80%, 85%, 90%, 95%, 96%, 97%, 98%, or 99% sequence identity thereto.

30. The system of claim 26, wherein the template nucleic acid sequence comprises one or more (e.g., 1, 2, or all 3) of the following, e.g., in 5′ to 3′ order:
(i) a spacer sequence as listed in Table 24, or a nucleic acid sequence having at least 75%, 80%, 85%, 90%, 95%, 96%, 97%, 98%, or 99% sequence identity thereto;
(ii) a scaffold sequence as listed in Table 24, or a nucleic acid sequence having at least 75%, 80%, 85%, 90%, 95%, 96%, 97%, 98%, or 99% sequence identity thereto; and/or
(iii) a PBS sequence as listed in Table 24, or a nucleic acid sequence having at least 75%, 80%, 85%, 90%, 95%, 96%, 97%, 98%, or 99% sequence identity thereto.

31. The system of any of claims 26-30, wherein the template nucleic acid comprises a full template molecule sequence as listed in Table 24, or a nucleic acid sequence having at least 75%, 80%, 85%, 90%, 95%, 96%, 97%, 98%, or 99% sequence identity thereto.

32. The system of any of claims 22-31, wherein the gRNA spacer and the gRNA scaffold comprise RNA.

33. The system of any of claims 22-32, wherein the heterologous object sequence comprises DNA and PBS sequence comprise RNA.

34. The system of any of claims 22-32, wherein the heterologous object sequence and PBS sequence comprise DNA.

35. The system of any of claims 22-34, wherein the gene modifying polypeptide comprises an amino acid sequence as listed in Table 23, or an amino acid sequence having at least 75%, 80%, 85%, 90%, 95%, 96%, 97%, 98%, or 99% sequence identity thereto.

36. The system of any of claims 22-35, wherein the gene modifying polypeptide comprises an amino acid sequence of any one of nCas9-UL-Polθ_L, nCas9-UL-Polθ_M, nCas9-UL-Polθ_4×0q, nCas9-FL-Polθ_M, or nCas9-FL-Polθ_4×0q, or an amino acid sequence having at least 75%, 80%, 85%, 90%, 95%, 96%, 97%, 98%, or 99% sequence identity thereto.

37. The system of any of claims 22-36, wherein the gene modifying polypeptide comprises a Cas domain amino acid sequence of a gene modifying polypeptide as listed in Table 23, or an amino acid sequence having at least 75%, 80%, 85%, 90%, 95%, 96%, 97%, 98%, or 99% sequence identity thereto.

38. The system of any of claims 22-37, wherein the gene modifying polypeptide comprises a Cas domain amino acid sequence of any one of nCas9-UL-Polθ_L, nCas9-UL-Polθ_M, nCas9-UL-Polθ_4×0q, nCas9-FL-Polθ_M, or nCas9-FL-Polθ_4×0q, or an amino acid sequence having at least 75%, 80%, 85%, 90%, 95%, 96%, 97%, 98%, or 99% sequence identity thereto.

39. The system of any of claims 22-38, wherein the gene modifying polypeptide comprises a Pol domain amino acid sequence of a gene modifying polypeptide as listed in Table 23, or an amino acid sequence having at least 75%, 80%, 85%, 90%, 95%, 96%, 97%, 98%, or 99% sequence identity thereto.

40. The system of any of claims 22-39, wherein the gene modifying polypeptide comprises a Pol domain amino acid sequence of any one of nCas9-UL-Polθ_L, nCas9-UL-Polθ_M, nCas9-UL-Polθ_4×0q, nCas9-FL-Polθ_M, or nCas9-FL-Polθ_4×0q, or an amino acid sequence having at least 75%, 80%, 85%, 90%, 95%, 96%, 97%, 98%, or 99% sequence identity thereto.

41. The system of any of claims 22-40, wherein the gene modifying polypeptide comprises a Cas domain amino acid sequence and a Pol domain amino acid sequence of a gene modifying polypeptide as listed in Table 23, or amino acid sequences having at least 75%, 80%, 85%, 90%, 95%, 96%, 97%, 98%, or 99% sequence identity thereto.

42. The system of any of claims 22-41, wherein the gene modifying polypeptide comprises a Cas domain amino acid sequence and a Pol domain amino acid sequence of any one of nCas9-UL-Pole L, nCas9-UL-Polθ_M, nCas9-UL-Polθ_4×0q, nCas9-FL-Polθ_M, or nCas9-FL-Polθ_4×0q, or amino acid sequences having at least 75%, 80%, 85%, 90%, 95%, 96%, 97%, 98%, or 99% sequence identity thereto.

43. A method for modifying a target nucleic acid in a cell (e.g., a human cell), the method comprising contacting the cell with the system of any of claims 22-42, or nucleic acid encoding the same, thereby modifying the target nucleic acid.

44. A method for treating a subject having a disease or condition associated with a genetic defect, the method comprising:
administering to the subject a system, polypeptide, template RNA or DNA encoding the same of any of the preceding claims, thereby treating the subject having a disease or condition associated with a genetic defect.

45. The method of claim 44, wherein the disease or condition associated with a genetic defect is an indication listed in any of Tables 12-15 and/or wherein the genetic defect is a defect in a gene listed in any of Tables 12-15.

46. The method of claim 44 or 45, wherein the subject is a human patient.

The application's sequence listing, which the Patent Office published only in electronic form, follows.

SEQUENCE LISTING (4645 sequences)

SEQ ID NO: 1 - protein, 2133 aa, synthetic construct
  source 1..2133: note = Description of Artificial Sequence: Synthetic polypeptide
MPAAKRVKLDGGDKKYSIGLDIGTNSVGWAVITDEYKVPSKKFKVLGNTDRHSIKKNLIGALLFDSGETAEATRLKRTARRRYTRRKNRICYLQEIFSNEMAKVDDSFFHRLEESFLVEEDKKHERHPIFGNIVDEVAYHEKYPTIYHLRKKLVDSTDKADLRLIYLALAHMIKFRGHFLIEGDLNPDNSDVDKLFIQLVQTYNQLFEENPINASGVDAKAILSARLSKSRRLENLIAQLPGEKKNGLFGNLIALSLGLTPNFKSNFDLAEDAKLQLSKDTYDDDLDNLLAQIGDQYADLFLAAKNLSDAILLSDILRVNTEITKAPLSASMIKRYDEHHQDLTLLKALVRQQLPEKYKEIFFDQSKNGYAGYIDGGASQEEFYKFIKPILEKMDGTEELLVKLNREDLLRKQRTFDNGSIPHQIHLGELHAILRRQEDFYPFLKDNREKIEKILTFRIPYYVGPLARGNSRFAWMTRKSEETITPWNFEEVVDKGASAQSFIERMTNFDKNLPNEKVLPKHSLLYEYFTVYNELTKVKYVTEGMRKPAFLSGEQKKAIVDLLFKTNRKVTVKQLKEDYFKKIECFDSVEISGVEDRFNASLGTYHDLLKIIKDKDFLDNEENEDILEDIVLTLTLFEDREMIEERLKTYAHLFDDKVMKQLKRRRYTGWGRLSRKLINGIRDKQSGKTILDFLKSDGFANRNFMQLIHDDSLTFKEDIQKAQVSGQGDSLHEHIANLAGSPAIKKGILQTVKVVDELVKVMGRHKPENIVIEMARENQTTQKGQKNSRERMKRIEEGIKELGSQILKEHPVENTQLQNEKLYLYYLQNGRDMYVDQELDINRLSDYDVDHIVPQSFLKDDSIDNKVLTRSDKARGKSDNVPSEEVVKKMKNYWRQLLNAKLITQRKFDNLTKAERGGLSELDKAGFIKRQLVETRQITKHVAQILDSRMNTKYDENDKLIREVKVITLKSKLVSDFRKDFQFYKVREINNYHHAHDAYLNAVVGTALIKKYPKLESEFVYGDYKVYDVRKMIAKSEQEIGKATAKYFFYSNIMNFFKTEITLANGEIRKRPLIETNGETGEIVWDKGRDFATVRKVLSMPQVNIVKKTEVQTGGFSKESILPKRNSDKLIARKKDWDPKKYGGFDSPTVAYSVLVVAKVEKGKSKKLKSVKELLGITIMERSSFEKNPIDFLEAKGYKEVKKDLIIKLPKYSLFELENGRKRMLASAGELQKGNELALPSKYVNFLYLASHYEKLKGSPEDNEQKQLFVEQHKHYLDEIIEQISEFSKRVILADANLDKVLSAYNKHRDKPIREQAENIIHLFTLTNLGAPAAFKYFDTTIDRKRYTSTKEVLDATLIHQSITGLYETRIDLSQLGGDGGAEAAAKEAAAKEAAAKEAAAKALEAEAAAKEAAAKEAAAKEAAAKAGGTAPLEEEYRLFLEAPIQNVTLLEQWKREIPKVWAEINPPGLASTQAPIHVQLLSTALPVRVRQYPITLEAKRSLRETIRKFRAAGILRPVHSPWNTPLLPVRKSGTSEYRMVQDLREVNKRVETIHPTVPNPYTLLSLLPPDRIWYSVLDLKDAFFCIPLAPESQLIFAFEWADAEEGESGQLTWTRLPQGFKNSPTLFDEALNRDLQGFRLDHPSVSLLQYVDDLLIAADTQAACLSATRDLLMTLAELGYRVSGKKAQLCQEEVTYLGFKIHKGSRSLSNSRTQAILQIPVPKTKRQVREFLGTIGYCRLWIPGFAELAQPLYAATRGGNDPLVWGEKEEEAFQSLKLALTQPPALALPSLDKPFQLFVEETSGAAKGVLTQALGPWKRPVAYLSKRLDPVAAGWPRCLRAIAAAALLTREASKLTFGQDIEITSSHNLESLLRSPPDKWLTNARITQYQVLLLDPPRVRFKQTAALNPATLLPETDDTLPIHHCLDTLDSLTSTRPDLTDQPLAQAEATLFTDGSSYIRDGKRYAGAAVVTLDSVIWAEPLPIGTSAQKAELIALTKALEWSKDKSVNIYTDSRYAFATLHVHGMIYRERGLLTAGGKAIKNAPEILALLTAVWLPKRVAVMHCKGHQKDDAPTSTGNRRADEVAREVAIRPLSTQATISAGKRTADGSEFEKRTADGSEFESPKKKAKVE

SEQ ID NO: 2 - protein, 2112 aa, synthetic construct
  source 1..2112: note = Description of Artificial Sequence: Synthetic polypeptide
MPAAKRVKLDGGDKKYSIGLDIGTNSVGWAVITDEYKVPSKKFKVLGNTDRHSIKKNLIGALLFDSGETAEATRLKRTARRRYTRRKNRICYLQEIFSNEMAKVDDSFFHRLEESFLVEEDKKHERHPIFGNIVDEVAYHEKYPTIYHLRKKLVDSTDKADLRLIYLALAHMIKFRGHFLIEGDLNPDNSDVDKLFIQLVQTYNQLFEENPINASGVDAKAILSARLSKSRRLENLIAQLPGEKKNGLFGNLIALSLGLTPNFKSNFDLAEDAKLQLSKDTYDDDLDNLLAQIGDQYADLFLAAKNLSDAILLSDILRVNTEITKAPLSASMIKRYDEHHQDLTLLKALVRQQLPEKYKEIFFDQSKNGYAGYIDGGASQEEFYKFIKPILEKMDGTEELLVKLNREDLLRKQRTFDNGSIPHQIHLGELHAILRRQEDFYPFLKDNREKIEKILTFRIPYYVGPLARGNSRFAWMTRKSEETITPWNFEEVVDKGASAQSFIERMTNFDKNLPNEKVLPKHSLLYEYFTVYNELTKVKYVTEGMRKPAFLSGEQKKAIVDLLFKTNRKVTVKQLKEDYFKKIECFDSVEISGVEDRFNASLGTYHDLLKIIKDKDFLDNEENEDILEDIVLTLTLFEDREMIEERLKTYAHLFDDKVMKQLKRRRYTGWGRLSRKLINGIRDKQSGKTILDFLKSDGFANRNFMQLIHDDSLTFKEDIQKAQVSGQGDSLHEHIANLAGSPAIKKGILQTVKVVDELVKVMGRHKPENIVIEMARENQTTQKGQKNSRERMKRIEEGIKELGSQILKEHPVENTQLQNEKLYLYYLQNGRDMYVDQELDINRLSDYDVDHIVPQSFLKDDSIDNKVLTRSDKARGKSDNVPSEEVVKKMKNYWRQLLNAKLITQRKFDNLTKAERGGLSELDKAGFIKRQLVETRQITKHVAQILDSRMNTKYDENDKLIREVKVITLKSKLVSDFRKDFQFYKVREINNYHHAHDAYLNAVVGTALIKKYPKLESEFVYGDYKVYDVRKMIAKSEQEIGKATAKYFFYSNIMNFFKTEITLANGEIRKRPLIETNGETGEIVWDKGRDFATVRKVLSMPQVNIVKKTEVQTGGFSKESILPKRNSDKLIARKKDWDPKKYGGFDSPTVAYSVLVVAKVEKGKSKKLKSVKELLGITIMERSSFEKNPIDFLEAKGYKEVKKDLIIKLPKYSLFELENGRKRMLASAGELQKGNELALPSKYVNFLYLASHYEKLKGSPEDNEQKQLFVEQHKHYLDEIIEQISEFSKRVILADANLDKVLSAYNKHRDKPIREQAENIIHLFTLTNLGAPAAFKYFDTTIDRKRYTSTKEVLDATLIHQSITGLYETRIDLSQLGGDGGGGGGSGGGGSGGGGSGGGGSGGGGSGGTAPLEEEYRLFLEAPIQNVTLLEQWKREIPKVWAEINPPGLASTQAPIHVQLLSTALPVRVRQYPITLEAKRSLRETIRKFRAAGILRPVHSPWNTPLLPVRKSGTSEYRMVQDLREVNKRVETIHPTVPNPYTLLSLLPPDRIWYSVLDLKDAFFCIPLAPESQLIFAFEWADAEEGESGQLTWTRLPQGFKNSPTLFDEALNRDLQGFRLDHPSVSLLQYVDDLLIAADTQAACLSATRDLLMTLAELGYRVSGKKAQLCQEEVTYLGFKIHKGSRSLSNSRTQAILQIPVPKTKRQVREFLGTIGYCRLWIPGFAELAQPLYAATRGGNDPLVWGEKEEEAFQSLKLALTQPPALALPSLDKPFQLFVEETSGAAKGVLTQALGPWKRPVAYLSKRLDPVAAGWPRCLRAIAAAALLTREASKLTFGQDIEITSSHNLESLLRSPPDKWLTNARITQYQVLLLDPPRVRFKQTAALNPATLLPETDDTLPIHHCLDTLDSLTSTRPDLTDQPLAQAEATLFTDGSSYIRDGKRYAGAAVVTLDSVIWAEPLPIGTSAQKAELIALTKALEWSKDKSVNIYTDSRYAFATLHVHGMIYRERGLLTAGGKAIKNAPEILALLTAVWLPKRVAVMHCKGHQKDDAPTSTGNRRADEVAREVAIRPLSTQATISAGKRTADGSEFEKRTADGSEFESPKKKAKVE

SEQ ID NO: 3 - protein, 2098 aa, synthetic construct
  source 1..2098: note = Description of Artificial Sequence: Synthetic polypeptide
MPAAKRVKLDGGDKKYSIGLDIGTNSVGWAVITDEYKVPSKKFKVLGNTDRHSIKKNLIGALLFDSGETAEATRLKRTARRRYTRRKNRICYLQEIFSNEMAKVDDSFFHRLEESFLVEEDKKHERHPIFGNIVDEVAYHEKYPTIYHLRKKLVDSTDKADLRLIYLALAHMIKFRGHFLIEGDLNPDNSDVDKLFIQLVQTYNQLFEENPINASGVDAKAILSARLSKSRRLENLIAQLPGEKKNGLFGNLIALSLGLTPNFKSNFDLAEDAKLQLSKDTYDDDLDNLLAQIGDQYADLFLAAKNLSDAILLSDILRVNTEITKAPLSASMIKRYDEHHQDLTLLKALVRQQLPEKYKEIFFDQSKNGYAGYIDGGASQEEFYKFIKPILEKMDGTEELLVKLNREDLLRKQRTFDNGSIPHQIHLGELHAILRRQEDFYPFLKDNREKIEKILTFRIPYYVGPLARGNSRFAWMTRKSEETITPWNFEEVVDKGASAQSFIERMTNFDKNLPNEKVLPKHSLLYEYFTVYNELTKVKYVTEGMRKPAFLSGEQKKAIVDLLFKTNRKVTVKQLKEDYFKKIECFDSVEISGVEDRFNASLGTYHDLLKIIKDKDFLDNEENEDILEDIVLTLTLFEDREMIEERLKTYAHLFDDKVMKQLKRRRYTGWGRLSRKLINGIRDKQSGKTILDFLKSDGFANRNFMQLIHDDSLTFKEDIQKAQVSGQGDSLHEHIANLAGSPAIKKGILQTVKVVDELVKVMGRHKPENIVIEMARENQTTQKGQKNSRERMKRIEEGIKELGSQILKEHPVENTQLQNEKLYLYYLQNGRDMYVDQELDINRLSDYDVDHIVPQSFLKDDSIDNKVLTRSDKARGKSDNVPSEEVVKKMKNYWRQLLNAKLITQRKFDNLTKAERGGLSELDKAGFIKRQLVETRQITKHVAQILDSRMNTKYDENDKLIREVKVITLKSKLVSDFRKDFQFYKVREINNYHHAHDAYLNAVVGTALIKKYPKLESEFVYGDYKVYDVRKMIAKSEQEIGKATAKYFFYSNIMNFFKTEITLANGEIRKRPLIETNGETGEIVWDKGRDFATVRKVLSMPQVNIVKKTEVQTGGFSKESILPKRNSDKLIARKKDWDPKKYGGFDSPTVAYSVLVVAKVEKGKSKKLKSVKELLGITIMERSSFEKNPIDFLEAKGYKEVKKDLIIKLPKYSLFELENGRKRMLASAGELQKGNELALPSKYVNFLYLASHYEKLKGSPEDNEQKQLFVEQHKHYLDEIIEQISEFSKRVILADANLDKVLSAYNKHRDKPIREQAENIIHLFTLTNLGAPAAFKYFDTTIDRKRYTSTKEVLDATLIHQSITGLYETRIDLSQLGGDGGPAPEAAAKGGGGGTAPLEEEYRLFLEAPIQNVTLLEQWKREIPKVWAEINPPGLASTQAPIHVQLLSTALPVRVRQYPITLEAKRSLRETIRKFRAAGILRPVHSPWNTPLLPVRKSGTSEYRMVQDLREVNKRVETIHPTVPNPYTLLSLLPPDRIWYSVLDLKDAFFCIPLAPESQLIFAFEWADAEEGESGQLTWTRLPQGFKNSPTLFDEALNRDLQGFRLDHPSVSLLQYVDDLLIAADTQAACLSATRDLLMTLAELGYRVSGKKAQLCQEEVTYLGFKIHKGSRSLSNSRTQAILQIPVPKTKRQVREFLGTIGYCRLWIPGFAELAQPLYAATRGGNDPLVWGEKEEEAFQSLKLALTQPPALALPSLDKPFQLFVEETSGAAKGVLTQALGPWKRPVAYLSKRLDPVAAGWPRCLRAIAAAALLTREASKLTFGQDIEITSSHNLESLLRSPPDKWLTNARITQYQVLLLDPPRVRFKQTAALNPATLLPETDDTLPIHHCLDTLDSLTSTRPDLTDQPLAQAEATLFTDGSSYIRDGKRYAGAAVVTLDSVIWAEPLPIGTSAQKAELIALTKALEWSKDKSVNIYTDSRYAFATLHVHGMIYRERGLLTAGGKAIKNAPEILALLTAVWLPKRVAVMHCKGHQKDDAPTSTGNRRADEVAREVAIRPLSTQATISAGKRTADGSEFEKRTADGSEFESPKKKAKVE

SEQ ID NO: 4 - protein, 2090 aa, synthetic construct
  source 1..2090: note = Description of Artificial Sequence: Synthetic polypeptide
MPAAKRVKLDGGDKKYSIGLDIGTNSVGWAVITDEYKVPSKKFKVLGNTDRHSIKKNLIGALLFDSGETAEATRLKRTARRRYTRRKNRICYLQEIFSNEMAKVDDSFFHRLEESFLVEEDKKHERHPIFGNIVDEVAYHEKYPTIYHLRKKLVDSTDKADLRLIYLALAHMIKFRGHFLIEGDLNPDNSDVDKLFIQLVQTYNQLFEENPINASGVDAKAILSARLSKSRRLENLIAQLPGEKKNGLFGNLIALSLGLTPNFKSNFDLAEDAKLQLSKDTYDDDLDNLLAQIGDQYADLFLAAKNLSDAILLSDILRVNTEITKAPLSASMIKRYDEHHQDLTLLKALVRQQLPEKYKEIFFDQSKNGYAGYIDGGASQEEFYKFIKPILEKMDGTEELLVKLNREDLLRKQRTFDNGSIPHQIHLGELHAILRRQEDFYPFLKDNREKIEKILTFRIPYYVGPLARGNSRFAWMTRKSEETITPWNFEEVVDKGASAQSFIERMTNFDKNLPNEKVLPKHSLLYEYFTVYNELTKVKYVTEGMRKPAFLSGEQKKAIVDLLFKTNRKVTVKQLKEDYFKKIECFDSVEISGVEDRFNASLGTYHDLLKIIKDKDFLDNEENEDILEDIVLTLTLFEDREMIEERLKTYAHLFDDKVMKQLKRRRYTGWGRLSRKLINGIRDKQSGKTILDFLKSDGFANRNFMQLIHDDSLTFKEDIQKAQVSGQGDSLHEHIANLAGSPAIKKGILQTVKVVDELVKVMGRHKPENIVIEMARENQTTQKGQKNSRERMKRIEEGIKELGSQILKEHPVENTQLQNEKLYLYYLQNGRDMYVDQELDINRLSDYDVDHIVPQSFLKDDSIDNKVLTRSDKARGKSDNVPSEEVVKKMKNYWRQLLNAKLITQRKFDNLTKAERGGLSELDKAGFIKRQLVETRQITKHVAQILDSRMNTKYDENDKLIREVKVITLKSKLVSDFRKDFQFYKVREINNYHHAHDAYLNAVVGTALIKKYPKLESEFVYGDYKVYDVRKMIAKSEQEIGKATAKYFFYSNIMNFFKTEITLANGEIRKRPLIETNGETGEIVWDKGRDFATVRKVLSMPQVNIVKKTEVQTGGFSKESILPKRNSDKLIARKKDWDPKKYGGFDSPTVAYSVLVVAKVEKGKSKKLKSVKELLGITIMERSSFEKNPIDFLEAKGYKEVKKDLIIKLPKYSLFELENGRKRMLASAGELQKGNELALPSKYVNFLYLASHYEKLKGSPEDNEQKQLFVEQHKHYLDEIIEQISEFSKRVILADANLDKVLSAYNKHRDKPIREQAENIIHLFTLTNLGAPAAFKYFDTTIDRKRYTSTKEVLDATLIHQSITGLYETRIDLSQLGGDGGGGGGGTAPLEEEYRLFLEAPIQNVTLLEQWKREIPKVWAEINPPGLASTQAPIHVQLLSTALPVRVRQYPITLEAKRSLRETIRKFRAAGILRPVHSPWNTPLLPVRKSGTSEYRMVQDLREVNKRVETIHPTVPNPYTLLSLLPPDRIWYSVLDLKDAFFCIPLAPESQLIFAFEWADAEEGESGQLTWTRLPQGFKNSPTLFDEALNRDLQGFRLDHPSVSLLQYVDDLLIAADTQAACLSATRDLLMTLAELGYRVSGKKAQLCQEEVTYLGFKIHKGSRSLSNSRTQAILQIPVPKTKRQVREFLGTIGYCRLWIPGFAELAQPLYAATRGGNDPLVWGEKEEEAFQSLKLALTQPPALALPSLDKPFQLFVEETSGAAKGVLTQALGPWKRPVAYLSKRLDPVAAGWPRCLRAIAAAALLTREASKLTFGQDIEITSSHNLESLLRSPPDKWLTNARITQYQVLLLDPPRVRFKQTAALNPATLLPETDDTLPIHHCLDTLDSLTSTRPDLTDQPLAQAEATLFTDGSSYIRDGKRYAGAAVVTLDSVIWAEPLPIGTSAQKAELIALTKALEWSKDKSVNIYTDSRYAFATLHVHGMIYRERGLLTAGGKAIKNAPEILALLTAVWLPKRVAVMHCKGHQKDDAPTSTGNRRADEVAREVAIRPLSTQATISAGKRTADGSEFEKRTADGSEFESPKKKAKVE

SEQ ID NO: 5 - protein, 2098 aa, synthetic construct
  source 1..2098: note = Description of Artificial Sequence: Synthetic polypeptide
MPAAKRVKLDGGDKKYSIGLDIGTNSVGWAVITDEYKVPSKKFKVLGNTDRHSIKKNLIGALLFDSGETAEATRLKRTARRRYTRRKNRICYLQEIFSNEMAKVDDSFFHRLEESFLVEEDKKHERHPIFGNIVDEVAYHEKYPTIYHLRKKLVDSTDKADLRLIYLALAHMIKFRGHFLIEGDLNPDNSDVDKLFIQLVQTYNQLFEENPINASGVDAKAILSARLSKSRRLENLIAQLPGEKKNGLFGNLIALSLGLTPNFKSNFDLAEDAKLQLSKDTYDDDLDNLLAQIGDQYADLFLAAKNLSDAILLSDILRVNTEITKAPLSASMIKRYDEHHQDLTLLKALVRQQLPEKYKEIFFDQSKNGYAGYIDGGASQEEFYKFIKPILEKMDGTEELLVKLNREDLLRKQRTFDNGSIPHQIHLGELHAILRRQEDFYPFLKDNREKIEKILTFRIPYYVGPLARGNSRFAWMTRKSEETITPWNFEEVVDKGASAQSFIERMTNFDKNLPNEKVLPKHSLLYEYFTVYNELTKVKYVTEGMRKPAFLSGEQKKAIVDLLFKTNRKVTVKQLKEDYFKKIECFDSVEISGVEDRFNASLGTYHDLLKIIKDKDFLDNEENEDILEDIVLTLTLFEDREMIEERLKTYAHLFDDKVMKQLKRRRYTGWGRLSRKLINGIRDKQSGKTILDFLKSDGFANRNFMQLIHDDSLTFKEDIQKAQVSGQGDSLHEHIANLAGSPAIKKGILQTVKVVDELVKVMGRHKPENIVIEMARENQTTQKGQKNSRERMKRIEEGIKELGSQILKEHPVENTQLQNEKLYLYYLQNGRDMYVDQELDINRLSDYDVDHIVPQSFLKDDSIDNKVLTRSDKARGKSDNVPSEEVVKKMKNYWRQLLNAKLITQRKFDNLTKAERGGLSELDKAGFIKRQLVETRQITKHVAQILDSRMNTKYDENDKLIREVKVITLKSKLVSDFRKDFQFYKVREINNYHHAHDAYLNAVVGTALIKKYPKLESEFVYGDYKVYDVRKMIAKSEQEIGKATAKYFFYSNIMNFFKTEITLANGEIRKRPLIETNGETGEIVWDKGRDFATVRKVLSMPQVNIVKKTEVQTGGFSKESILPKRNSDKLIARKKDWDPKKYGGFDSPTVAYSVLVVAKVEKGKSKKLKSVKELLGITIMERSSFEKNPIDFLEAKGYKEVKKDLIIKLPKYSLFELENGRKRMLASAGELQKGNELALPSKYVNFLYLASHYEKLKGSPEDNEQKQLFVEQHKHYLDEIIEQISEFSKRVILADANLDKVLSAYNKHRDKPIREQAENIIHLFTLTNLGAPAAFKYFDTTIDRKRYTSTKEVLDATLIHQSITGLYETRIDLSQLGGDGGGGGGSSEAAAKGGTAPLEEEYRLFLEAPIQNVTLLEQWKREIPKVWAEINPPGLASTQAPIHVQLLSTALPVRVRQYPITLEAKRSLRETIRKFRAAGILRPVHSPWNTPLLPVRKSGTSEYRMVQDLREVNKRVETIHPTVPNPYTLLSLLPPDRIWYSVLDLKDAFFCIPLAPESQLIFAFEWADAEEGESGQLTWTRLPQGFKNSPTLFDEALNRDLQGFRLDHPSVSLLQYVDDLLIAADTQAACLSATRDLLMTLAELGYRVSGKKAQLCQEEVTYLGFKIHKGSRSLSNSRTQAILQIPVPKTKRQVREFLGTIGYCRLWIPGFAELAQPLYAATRGGNDPLVWGEKEEEAFQSLKLALTQPPALALPSLDKPFQLFVEETSGAAKGVLTQALGPWKRPVAYLSKRLDPVAAGWPRCLRAIAAAALLTREASKLTFGQDIEITSSHNLESLLRSPPDKWLTNARITQYQVLLLDPPRVRFKQTAALNPATLLPETDDTLPIHHCLDTLDSLTSTRPDLTDQPLAQAEATLFTDGSSYIRDGKRYAGAAVVTLDSVIWAEPLPIGTSAQKAELIALTKALEWSKDKSVNIYTDSRYAFATLHVHGMIYRERGLLTAGGKAIKNAPEILALLTAVWLPKRVAVMHCKGHQKDDAPTSTGNRRADEVAREVAIRPLSTQATISAGKRTADGSEFEKRTADGSEFESPKKKAKVE

SEQ ID NO: 6 - protein, 2098 aa, synthetic construct
  source 1..2098: note = Description of Artificial Sequence: Synthetic polypeptide
MPAAKRVKLDGGDKKYSIGLDIGTNSVGWAVITDEYKVPSKKFKVLGNTDRHSIKKNLIGALLFDSGETAEATRLKRTARRRYTRRKNRICYLQEIFSNEMAKVDDSFFHRLEESFLVEEDKKHERHPIFGNIVDEVAYHEKYPTIYHLRKKLVDSTDKADLRLIYLALAHMIKFRGHFLIEGDLNPDNSDVDKLFIQLVQTYNQLFEENPINASGVDAKAILSARLSKSRRLENLIAQLPGEKKNGLFGNLIALSLGLTPNFKSNFDLAEDAKLQLSKDTYDDDLDNLLAQIGDQYADLFLAAKNLSDAILLSDILRVNTEITKAPLSASMIKRYDEHHQDLTLLKALVRQQLPEKYKEIFFDQSKNGYAGYIDGGASQEEFYKFIKPILEKMDGTEELLVKLNREDLLRKQRTFDNGSIPHQIHLGELHAILRRQEDFYPFLKDNREKIEKILTFRIPYYVGPLARGNSRFAWMTRKSEETITPWNFEEVVDKGASAQSFIERMTNFDKNLPNEKVLPKHSLLYEYFTVYNELTKVKYVTEGMRKPAFLSGEQKKAIVDLLFKTNRKVTVKQLKEDYFKKIECFDSVEISGVEDRFNASLGTYHDLLKIIKDKDFLDNEENEDILEDIVLTLTLFEDREMIEERLKTYAHLFDDKVMKQLKRRRYTGWGRLSRKLINGIRDKQSGKTILDFLKSDGFANRNFMQLIHDDSLTFKEDIQKAQVSGQGDSLHEHIANLAGSPAIKKGILQTVKVVDELVKVMGRHKPENIVIEMARENQTTQKGQKNSRERMKRIEEGIKELGSQILKEHPVENTQLQNEKLYLYYLQNGRDMYVDQELDINRLSDYDVDHIVPQSFLKDDSIDNKVLTRSDKARGKSDNVPSEEVVKKMKNYWRQLLNAKLITQRKFDNLTKAERGGLSELDKAGFIKRQLVETRQITKHVAQILDSRMNTKYDENDKLIREVKVITLKSKLVSDFRKDFQFYKVREINNYHHAHDAYLNAVVGTALIKKYPKLESEFVYGDYKVYDVRKMIAKSEQEIGKATAKYFFYSNIMNFFKTEITLANGEIRKRPLIETNGETGEIVWDKGRDFATVRKVLSMPQVNIVKKTEVQTGGFSKESILPKRNSDKLIARKKDWDPKKYGGFDSPTVAYSVLVVAKVEKGKSKKLKSVKELLGITIMERSSFEKNPIDFLEAKGYKEVKKDLIIKLPKYSLFELENGRKRMLASAGELQKGNELALPSKYVNFLYLASHYEKLKGSPEDNEQKQLFVEQHKHYLDEIIEQISEFSKRVILADANLDKVLSAYNKHRDKPIREQAENIIHLFTLTNLGAPAAFKYFDTTIDRKRYTSTKEVLDATLIHQSITGLYETRIDLSQLGGDGGGGSEAAAKGGGGGTAPLEEEYRLFLEAPIQNVTLLEQWKREIPKVWAEINPPGLASTQAPIHVQLLSTALPVRVRQYPITLEAKRSLRETIRKFRAAGILRPVHSPWNTPLLPVRKSGTSEYRMVQDLREVNKRVETIHPTVPNPYTLLSLLPPDRIWYSVLDLKDAFFCIPLAPESQLIFAFEWADAEEGESGQLTWTRLPQGFKNSPTLFDEALNRDLQGFRLDHPSVSLLQYVDDLLIAADTQAACLSATRDLLMTLAELGYRVSGKKAQLCQEEVTYLGFKIHKGSRSLSNSRTQAILQIPVPKTKRQVREFLGTIGYCRLWIPGFAELAQPLYAATRGGNDPLVWGEKEEEAFQSLKLALTQPPALALPSLDKPFQLFVEETSGAAKGVLTQALGPWKRPVAYLSKRLDPVAAGWPRCLRAIAAAALLTREASKLTFGQDIEITSSHNLESLLRSPPDKWLTNARITQYQVLLLDPPRVRFKQTAALNPATLLPETDDTLPIHHCLDTLDSLTSTRPDLTDQPLAQAEATLFTDGSSYIRDGKRYAGAAVVTLDSVIWAEPLPIGTSAQKAELIALTKALEWSKDKSVNIYTDSRYAFATLHVHGMIYRERGLLTAGGKAIKNAPEILALLTAVWLPKRVAVMHCKGHQKDDAPTSTGNRRADEVAREVAIRPLSTQATISAGKRTADGSEFEKRTADGSEFESPKKKAKVE

SEQ ID NO: 7 - protein, 2093 aa, synthetic construct
  source 1..2093: note = Description of Artificial Sequence: Synthetic polypeptide
MPAAKRVKLDGGDKKYSIGLDIGTNSVGWAVITDEYKVPSKKFKVLGNTDRHSIKKNLIGALLFDSGETAEATRLKRTARRRYTRRKNRICYLQEIFSNEMAKVDDSFFHRLEESFLVEEDKKHERHPIFGNIVDEVAYHEKYPTIYHLRKKLVDSTDKADLRLIYLALAHMIKFRGHFLIEGDLNPDNSDVDKLFIQLVQTYNQLFEENPINASGVDAKAILSARLSKSRRLENLIAQLPGEKKNGLFGNLIALSLGLTPNFKSNFDLAEDAKLQLSKDTYDDDLDNLLAQIGDQYADLFLAAKNLSDAILLSDILRVNTEITKAPLSASMIKRYDEHHQDLTLLKALVRQQLPEKYKEIFFDQSKNGYAGYIDGGASQEEFYKFIKPILEKMDGTEELLVKLNREDLLRKQRTFDNGSIPHQIHLGELHAILRRQEDFYPFLKDNREKIEKILTFRIPYYVGPLARGNSRFAWMTRKSEETITPWNFEEVVDKGASAQSFIERMTNFDKNLPNEKVLPKHSLLYEYFTVYNELTKVKYVTEGMRKPAFLSGEQKKAIVDLLFKTNRKVTVKQLKEDYFKKIECFDSVEISGVEDRFNASLGTYHDLLKIIKDKDFLDNEENEDILEDIVLTLTLFEDREMIEERLKTYAHLFDDKVMKQLKRRRYTGWGRLSRKLINGIRDKQSGKTILDFLKSDGFANRNFMQLIHDDSLTFKEDIQKAQVSGQGDSLHEHIANLAGSPAIKKGILQTVKVVDELVKVMGRHKPENIVIEMARENQTTQKGQKNSRERMKRIEEGIKELGSQILKEHPVENTQLQNEKLYLYYLQNGRDMYVDQELDINRLSDYDVDHIVPQSFLKDDSIDNKVLTRSDKARGKSDNVPSEEVVKKMKNYWRQLLNAKLITQRKFDNLTKAERGGLSELDKAGFIKRQLVETRQITKHVAQILDSRMNTKYDENDKLIREVKVITLKSKLVSDFRKDFQFYKVREINNYHHAHDAYLNAVVGTALIKKYPKLESEFVYGDYKVYDVRKMIAKSEQEIGKATAKYFFYSNIMNFFKTEITLANGEIRKRPLIETNGETGEIVWDKGRDFATVRKVLSMPQVNIVKKTEVQTGGFSKESILPKRNSDKLIARKKDWDPKKYGGFDSPTVAYSVLVVAKVEKGKSKKLKSVKELLGITIMERSSFEKNPIDFLEAKGYKEVKKDLIIKLPKYSLFELENGRKRMLASAGELQKGNELALPSKYVNFLYLASHYEKLKGSPEDNEQKQLFVEQHKHYLDEIIEQISEFSKRVILADANLDKVLSAYNKHRDKPIREQAENIIHLFTLTNLGAPAAFKYFDTTIDRKRYTSTKEVLDATLIHQSITGLYETRIDLSQLGGDGGGGSGSSGGTAPLEEEYRLFLEAPIQNVTLLEQWKREIPKVWAEINPPGLASTQAPIHVQLLSTALPVRVRQYPITLEAKRSLRETIRKFRAAGILRPVHSPWNTPLLPVRKSGTSEYRMVQDLREVNKRVETIHPTVPNPYTLLSLLPPDRIWYSVLDLKDAFFCIPLAPESQLIFAFEWADAEEGESGQLTWTRLPQGFKNSPTLFDEALNRDLQGFRLDHPSVSLLQYVDDLLIAADTQAACLSATRDLLMTLAELGYRVSGKKAQLCQEEVTYLGFKIHKGSRSLSNSRTQAILQIPVPKTKRQVREFLGTIGYCRLWIPGFAELAQPLYAATRGGNDPLVWGEKEEEAFQSLKLALTQPPALALPSLDKPFQLFVEETSGAAKGVLTQALGPWKRPVAYLSKRLDPVAAGWPRCLRAIAAAALLTREASKLTFGQDIEITSSHNLESLLRSPPDKWLTNARITQYQVLLLDPPRVRFKQTAALNPATLLPETDDTLPIHHCLDTLDSLTSTRPDLTDQPLAQAEATLFTDGSSYIRDGKRYAGAAVVTLDSVIWAEPLPIGTSAQKAELIALTKALEWSKDKSVNIYTDSRYAFATLHVHGMIYRERGLLTAGGKAIKNAPEILALLTAVWLPKRVAVMHCKGHQKDDAPTSTGNRRADEVAREVAIRPLSTQATISAGKRTADGSEFEKRTADGSEFESPKKKAKVE

SEQ ID NO: 8 - protein, 2093 aa, synthetic construct
  source 1..2093: note = Description of Artificial Sequence: Synthetic polypeptide
MPAAKRVKLDGGDKKYSIGLDIGTNSVGWAVITDEYKVPSKKFKVLGNTDRHSIKKNLIGALLFDSGETAEATRLKRTARRRYTRRKNRICYLQEIFSNEMAKVDDSFFHRLEESFLVEEDKKHERHPIFGNIVDEVAYHEKYPTIYHLRKKLVDSTDKADLRLIYLALAHMIKFRGHFLIEGDLNPDNSDVDKLFIQLVQTYNQLFEENPINASGVDAKAILSARLSKSRRLENLIAQLPGEKKNGLFGNLIALSLGLTPNFKSNFDLAEDAKLQLSKDTYDDDLDNLLAQIGDQYADLFLAAKNLSDAILLSDILRVNTEITKAPLSASMIKRYDEHHQDLTLLKALVRQQLPEKYKEIFFDQSKNGYAGYIDGGASQEEFYKFIKPILEKMDGTEELLVKLNREDLLRKQRTFDNGSIPHQIHLGELHAILRRQEDFYPFLKDNREKIEKILTFRIPYYVGPLARGNSRFAWMTRKSEETITPWNFEEVVDKGASAQSFIERMTNFDKNLPNEKVLPKHSLLYEYFTVYNELTKVKYVTEGMRKPAFLSGEQKKAIVDLLFKTNRKVTVKQLKEDYFKKIECFDSVEISGVEDRFNASLGTYHDLLKIIKDKDFLDNEENEDILEDIVLTLTLFEDREMIEERLKTYAHLFDDKVMKQLKRRRYTGWGRLSRKLINGIRDKQSGKTILDFLKSDGFANRNFMQLIHDDSLTFKEDIQKAQVSGQGDSLHEHIANLAGSPAIKKGILQTVKVVDELVKVMGRHKPENIVIEMARENQTTQKGQKNSRERMKRIEEGIKELGSQILKEHPVENTQLQNEKLYLYYLQNGRDMYVDQELDINRLSDYDVDHIVPQSFLKDDSIDNKVLTRSDKARGKSDNVPSEEVVKKMKNYWRQLLNAKLITQRKFDNLTKAERGGLSELDKAGFIKRQLVETRQITKHVAQILDSRMNTKYDENDKLIREVKVITLKSKLVSDFRKDFQFYKVREINNYHHAHDAYLNAVVGTALIKKYPKLESEFVYGDYKVYDVRKMIAKSEQEIGKATAKYFFYSNIMNFFKTEITLANGEIRKRPLIETNGETGEIVWDKGRDFATVRKVLSMPQVNIVKKTEVQTGGFSKESILPKRNSDKLIARKKDWDPKKYGGFDSPTVAYSVLVVAKVEKGKSKKLKSVKELLGITIMERSSFEKNPIDFLEAKGYKEVKKDLIIKLPKYSLFELENGRKRMLASAGELQKGNELALPSKYVNFLYLASHYEKLKGSPEDNEQKQLFVEQHKHYLDEIIEQISEFSKRVILADANLDKVLSAYNKHRDKPIREQAENIIHLFTLTNLGAPAAFKYFDTTIDRKRYTSTKEVLDATLIHQSITGLYETRIDLSQLGGDGGGGSPAPGGTAPLEEEYRLFLEAPIQNVTLLEQWKREIPKVWAEINPPGLASTQAPIHVQLLSTALPVRVRQYPITLEAKRSLRETIRKFRAAGILRPVHSPWNTPLLPVRKSGTSEYRMVQDLREVNKRVETIHPTVPNPYTLLSLLPPDRIWYSVLDLKDAFFCIPLAPESQLIFAFEWADAEEGESGQLTWTRLPQGFKNSPTLFDEALNRDLQGFRLDHPSVSLLQYVDDLLIAADTQAACLSATRDLLMTLAELGYRVSGKKAQLCQEEVTYLGFKIHKGSRSLSNSRTQAILQIPVPKTKRQVREFLGTIGYCRLWIPGFAELAQPLYAATRGGNDPLVWGEKEEEAFQSLKLALTQPPALALPSLDKPFQLFVEETSGAAKGVLTQALGPWKRPVAYLSKRLDPVAAGWPRCLRAIAAAALLTREASKLTFGQDIEITSSHNLESLLRSPPDKWLTNARITQYQVLLLDPPRVRFKQTAALNPATLLPETDDTLPIHHCLDTLDSLTSTRPDLTDQPLAQAEATLFTDGSSYIRDGKRYAGAAVVTLDSVIWAEPLPIGTSAQKAELIALTKALEWSKDKSVNIYTDSRYAFATLHVHGMIYRERGLLTAGGKAIKNAPEILALLTAVWLPKRVAVMHCKGHQKDDAPTSTGNRRADEVAREVAIRPLSTQATISAGKRTADGSEFEKRTADGSEFESPKKKAKVE

SEQ ID NO: 9 - protein, 2097 aa, synthetic construct
  source 1..2097: note = Description of Artificial Sequence: Synthetic polypeptide
MPAAKRVKLDGGDKKYSIGLDIGTNSVGWAVITDEYKVPSKKFKVLGNTDRHSIKKNLIGALLFDSGETAEATRLKRTARRRYTRRKNRICYLQEIFSNEMAKVDDSFFHRLEESFLVEEDKKHERHPIFGNIVDEVAYHEKYPTIYHLRKKLVDSTDKADLRLIYLALAHMIKFRGHFLIEGDLNPDNSDVDKLFIQLVQTYNQLFEENPINASGVDAKAILSARLSKSRRLENLIAQLPGEKKNGLFGNLIALSLGLTPNFKSNFDLAEDAKLQLSKDTYDDDLDNLLAQIGDQYADLFLAAKNLSDAILLSDILRVNTEITKAPLSASMIKRYDEHHQDLTLLKALVRQQLPEKYKEIFFDQSKNGYAGYIDGGASQEEFYKFIKPILEKMDGTEELLVKLNREDLLRKQRTFDNGSIPHQIHLGELHAILRRQEDFYPFLKDNREKIEKILTFRIPYYVGPLARGNSRFAWMTRKSEETITPWNFEEVVDKGASAQSFIERMTNFDKNLPNEKVLPKHSLLYEYFTVYNELTKVKYVTEGMRKPAFLSGEQKKAIVDLLFKTNRKVTVKQLKEDYFKKIECFDSVEISGVEDRFNASLGTYHDLLKIIKDKDFLDNEENEDILEDIVLTLTLFEDREMIEERLKTYAHLFDDKVMKQLKRRRYTGWGRLSRKLINGIRDKQSGKTILDFLKSDGFANRNFMQLIHDDSLTFKEDIQKAQVSGQGDSLHEHIANLAGSPAIKKGILQTVKVVDELVKVMGRHKPENIVIEMARENQTTQKGQKNSRERMKRIEEGIKELGSQILKEHPVENTQLQNEKLYLYYLQNGRDMYVDQELDINRLSDYDVDHIVPQSFLKDDSIDNKVLTRSDKARGKSDNVPSEEVVKKMKNYWRQLLNAKLITQRKFDNLTKAERGGLSELDKAGFIKRQLVETRQITKHVAQILDSRMNTKYDENDKLIREVKVITLKSKLVSDFRKDFQFYKVREINNYHHAHDAYLNAVVGTALIKKYPKLESEFVYGDYKVYDVRKMIAKSEQEIGKATAKYFFYSNIMNFFKTEITLANGEIRKRPLIETNGETGEIVWDKGRDFATVRKVLSMPQVNIVKKTEVQTGGFSKESILPKRNSDKLIARKKDWDPKKYGGFDSPTVAYSVLVVAKVEKGKSKKLKSVKELLGITIMERSSFEKNPIDFLEAKGYKEVKKDLIIKLPKYSLFELENGRKRMLASAGELQKGNELALPSKYVNFLYLASHYEKLKGSPEDNEQKQLFVEQHKHYLDEIIEQISEFSKRVILADANLDKVLSAYNKHRDKPIREQAENIIHLFTLTNLGAPAAFKYFDTTIDRKRYTSTKEVLDATLIHQSITGLYETRIDLSQLGGDGGGGGGSGGGGSGGTAPLEEEYRLFLEAPIQNVTLLEQWKREIPKVWAEINPPGLASTQAPIHVQLLSTALPVRVRQYPITLEAKRSLRETIRKFRAAGILRPVHSPWNTPLLPVRKSGTSEYRMVQDLREVNKRVETIHPTVPNPYTLLSLLPPDRIWYSVLDLKDAFFCIPLAPESQLIFAFEWADAEEGESGQLTWTRLPQGFKNSPTLFDEALNRDLQGFRLDHPSVSLLQYVDDLLIAADTQAACLSATRDLLMTLAELGYRVSGKKAQLCQEEVTYLGFKIHKGSRSLSNSRTQAILQIPVPKTKRQVREFLGTIGYCRLWIPGFAELAQPLYAATRGGNDPLVWGEKEEEAFQSLKLALTQPPALALPSLDKPFQLFVEETSGAAKGVLTQALGPWKRPVAYLSKRLDPVAAGWPRCLRAIAAAALLTREASKLTFGQDIEITSSHNLESLLRSPPDKWLTNARITQYQVLLLDPPRVRFKQTAALNPATLLPETDDTLPIHHCLDTLDSLTSTRPDLTDQPLAQAEATLFTDGSSYIRDGKRYAGAAVVTLDSVIWAEPLPIGTSAQKAELIALTKALEWSKDKSVNIYTDSRYAFATLHVHGMIYRERGLLTAGGKAIKNAPEILALLTAVWLPKRVAVMHCKGHQKDDAPTSTGNRRADEVAREVAIRPLSTQATISAGKRTADGSEFEKRTADGSEFESPKKKAKVE

SEQ ID NO: 10 - protein, 2097 aa, synthetic construct
  source 1..2097: note = Description of Artificial Sequence: Synthetic polypeptide
MPAAKRVKLDGGDKKYSIGLDIGTNSVGWAVITDEYKVPSKKFKVLGNTDRHSIKKNLIGALLFDSGETAEATRLKRTARRRYTRRKNRICYLQEIFSNEMAKVDDSFFHRLEESFLVEEDKKHERHPIFGNIVDEVAYHEKYPTIYHLRKKLVDSTDKADLRLIYLALAHMIKFRGHFLIEGDLNPDNSDVDKLFIQLVQTYNQLFEENPINASGVDAKAILSARLSKSRRLENLIAQLPGEKKNGLFGNLIALSLGLTPNFKSNFDLAEDAKLQLSKDTYDDDLDNLLAQIGDQYADLFLAAKNLSDAILLSDILRVNTEITKAPLSASMIKRYDEHHQDLTLLKALVRQQLPEKYKEIFFDQSKNGYAGYIDGGASQEEFYKFIKPILEKMDGTEELLVKLNREDLLRKQRTFDNGSIPHQIHLGELHAILRRQEDFYPFLKDNREKIEKILTFRIPYYVGPLARGNSRFAWMTRKSEETITPWNFEEVVDKGASAQSFIERMTNFDKNLPNEKVLPKHSLLYEYFTVYNELTKVKYVTEGMRKPAFLSGEQKKAIVDLLFKTNRKVTVKQLKEDYFKKIECFDSVEISGVEDRFNASLGTYHDLLKIIKDKDFLDNEENEDILEDIVLTLTLFEDREMIEERLKTYAHLFDDKVMKQLKRRRYTGWGRLSRKLINGIRDKQSGKTILDFLKSDGFANRNFMQLIHDDSLTFKEDIQKAQVSGQGDSLHEHIANLAGSPAIKKGILQTVKVVDELVKVMGRHKPENIVIEMARENQTTQKGQKNSRERMKRIEEGIKELGSQILKEHPVENTQLQNEKLYLYYLQNGRDMYVDQELDINRLSDYDVDHIVPQSFLKDDSIDNKVLTRSDKARGKSDNVPSEEVVKKMKNYWRQLLNAKLITQRKFDNLTKAERGGLSELDKAGFIKRQLVETRQITKHVAQILDSRMNTKYDENDKLIREVKVITLKSKLVSDFRKDFQFYKVREINNYHHAHDAYLNAVVGTALIKKYPKLESEFVYGDYKVYDVRKMIAKSEQEIGKATAKYFFYSNIMNFFKTEITLANGEIRKRPLIETNGETGEIVWDKGRDFATVRKVLSMPQVNIVKKTEVQTGGFSKESILPKRNSDKLIARKKDWDPKKYGGFDSPTVAYSVLVVAKVEKGKSKKLKSVKELLGITIMERSSFEKNPIDFLEAKGYKEVKKDLIIKLPKYSLFELENGRKRMLASAGELQKGNELALPSKYVNFLYLASHYEKLKGSPEDNEQKQLFVEQHKHYLDEIIEQISEFSKRVILADANLDKVLSAYNKHRDKPIREQAENIIHLFTLTNLGAPAAFKYFDTTIDRKRYTSTKEVLDATLIHQSITGLYETRIDLSQLGGDGGEAAAKEAAAKGGTAPLEEEYRLFLEAPIQNVTLLEQWKREIPKVWAEINPPGLASTQAPIHVQLLSTALPVRVRQYPITLEAKRSLRETIRKFRAAGILRPVHSPWNTPLLPVRKSGTSEYRMVQDLREVNKRVETIHPTVPNPYTLLSLLPPDRIWYSVLDLKDAFFCIPLAPESQLIFAFEWADAEEGESGQLTWTRLPQGFKNSPTLFDEALNRDLQGFRLDHPSVSLLQYVDDLLIAADTQAACLSATRDLLMTLAELGYRVSGKKAQLCQEEVTYLGFKIHKGSRSLSNSRTQAILQIPVPKTKRQVREFLGTIGYCRLWIPGFAELAQPLYAATRGGNDPLVWGEKEEEAFQSLKLALTQPPALALPSLDKPFQLFVEETSGAAKGVLTQALGPWKRPVAYLSKRLDPVAAGWPRCLRAIAAAALLTREASKLTFGQDIEITSSHNLESLLRSPPDKWLTNARITQYQVLLLDPPRVRFKQTAALNPATLLPETDDTLPIHHCLDTLDSLTSTRPDLTDQPLAQAEATLFTDGSSYIRDGKRYAGAAVVTLDSVIWAEPLPIGTSAQKAELIALTKALEWSKDKSVNIYTDSRYAFATLHVHGMIYRERGLLTAGGKAIKNAPEILALLTAVWLPKRVAVMHCKGHQKDDAPTSTGNRRADEVAREVAIRPLSTQATISAGKRTADGSEFEKRTADGSEFESPKKKAKVE

SEQ ID NO: 11 - protein, 2098 aa, synthetic construct
  source 1..2098: note = Description of Artificial Sequence: Synthetic polypeptide
MPAAKRVKLDGGDKKYSIGLDIGTNSVGWAVITDEYKVPSKKFKVLGNTDRHSIKKNLIGALLFDSGETAEATRLKRTARRRYTRRKNRICYLQEIFSNEMAKVDDSFFHRLEESFLVEEDKKHERHPIFGNIVDEVAYHEKYPTIYHLRKKLVDSTDKADLRLIYLALAHMIKFRGHFLIEGDLNPDNSDVDKLFIQLVQTYNQLFEENPINASGVDAKAILSARLSKSRRLENLIAQLPGEKKNGLFGNLIALSLGLTPNFKSNFDLAEDAKLQLSKDTYDDDLDNLLAQIGDQYADLFLAAKNLSDAILLSDILRVNTEITKAPLSASMIKRYDEHHQDLTLLKALVRQQLPEKYKEIFFDQSKNGYAGYIDGGASQEEFYKFIKPILEKMDGTEELLVKLNREDLLRKQRTFDNGSIPHQIHLGELHAILRRQEDFYPFLKDNREKIEKILTFRIPYYVGPLARGNSRFAWMTRKSEETITPWNFEEVVDKGASAQSFIERMTNFDKNLPNEKVLPKHSLLYEYFTVYNELTKVKYVTEGMRKPAFLSGEQKKAIVDLLFKTNRKVTVKQLKEDYFKKIECFDSVEISGVEDRFNASLGTYHDLLKIIKDKDFLDNEENEDILEDIVLTLTLFEDREMIEERLKTYAHLFDDKVMKQLKRRRYTGWGRLSRKLINGIRDKQSGKTILDFLKSDGFANRNFMQLIHDDSLTFKEDIQKAQVSGQGDSLHEHIANLAGSPAIKKGILQTVKVVDELVKVMGRHKPENIVIEMARENQTTQKGQKNSRERMKRIEEGIKELGSQILKEHPVENTQLQNEKLYLYYLQNGRDMYVDQELDINRLSDYDVDHIVPQSFLKDDSIDNKVLTRSDKARGKSDNVPSEEVVKKMKNYWRQLLNAKLITQRKFDNLTKAERGGLSELDKAGFIKRQLVETRQITKHVAQILDSRMNTKYDENDKLIREVKVITLKSKLVSDFRKDFQFYKVREINNYHHAHDAYLNAVVGTALIKKYPKLESEFVYGDYKVYDVRKMIAKSEQEIGKATAKYFFYSNIMNFFKTEITLANGEIRKRPLIETNGETGEIVWDKGRDFATVRKVLSMPQVNIVKKTEVQTGGFSKESILPKRNSDKLIARKKDWDPKKYGGFDSPTVAYSVLVVAKVEKGKSKKLKSVKELLGITIMERSSFEKNPIDFLEAKGYKEVKKDLIIKLPKYSLFELENGRKRMLASAGELQKGNELALPSKYVNFLYLASHYEKLKGSPEDNEQKQLFVEQHKHYLDEIIEQISEFSKRVILADANLDKVLSAYNKHRDKPIREQAENIIHLFTLTNLGAPAAFKYFDTTIDRKRYTSTKEVLDATLIHQSITGLYETRIDLSQLGGDGGGGSEAAAKPAPGGTAPLEEEYRLFLEAPIQNVTLLEQWKREIPKVWAEINPPGLASTQAPIHVQLLSTALPVRVRQYPITLEAKRSLRETIRKFRAAGILRPVHSPWNTPLLPVRKSGTSEYRMVQDLREVNKRVETIHPTVPNPYTLLSLLPPDRIWYSVLDLKDAFFCIPLAPESQLIFAFEWADAEEGESGQLTWTRLPQGFKNSPTLFDEALNRDLQGFRLDHPSVSLLQYVDDLLIAADTQAACLSATRDLLMTLAELGYRVSGKKAQLCQEEVTYLGFKIHKGSRSLSNSRTQAILQIPVPKTKRQVREFLGTIGYCRLWIPGFAELAQPLYAATRGGNDPLVWGEKEEEAFQSLKLALTQPPALALPSLDKPFQLFVEETSGAAKGVLTQALGPWKRPVAYLSKRLDPVAAGWPRCLRAIAAAALLTREASKLTFGQDIEITSSHNLESLLRSPPDKWLTNARITQYQVLLLDPPRVRFKQTAALNPATLLPETDDTLPIHHCLDTLDSLTSTRPDLTDQPLAQAEATLFTDGSSYIRDGKRYAGAAVVTLDSVIWAEPLPIGTSAQKAELIALTKALEWSKDKSVNIYTDSRYAFATLHVHGMIYRERGLLTAGGKAIKNAPEILALLTAVWLPKRVAVMHCKGHQKDDAPTSTGNRRADEVAREVAIRPLSTQATISAGKRTADGSEFEKRTADGSEFESPKKKAKVE

SEQ ID NO: 12 - protein, 2093 aa, synthetic construct
  source 1..2093: note = Description of Artificial Sequence: Synthetic polypeptide
MPAAKRVKLDGGDKKYSIGLDIGTNSVGWAVITDEYKVPSKKFKVLGNTDRHSIKKNLIGALLFDSGETAEATRLKRTARRRYTRRKNRICYLQEIFSNEMAKVDDSFFHRLEESFLVEEDKKHERHPIFGNIVDEVAYHEKYPTIYHLRKKLVDSTDKADLRLIYLALAHMIKFRGHFLIEGDLNPDNSDVDKLFIQLVQTYNQLFEENPINASGVDAKAILSARLSKSRRLENLIAQLPGEKKNGLFGNLIALSLGLTPNFKSNFDLAEDAKLQLSKDTYDDDLDNLLAQIGDQYADLFLAAKNLSDAILLSDILRVNTEITKAPLSASMIKRYDEHHQDLTLLKALVRQQLPEKYKEIFFDQSKNGYAGYIDGGASQEEFYKFIKPILEKMDGTEELLVKLNREDLLRKQRTFDNGSIPHQIHLGELHAILRRQEDFYPFLKDNREKIEKILTFRIPYYVGPLARGNSRFAWMTRKSEETITPWNFEEVVDKGASAQSFIERMTNFDKNLPNEKVLPKHSLLYEYFTVYNELTKVKYVTEGMRKPAFLSGEQKKAIVDLLFKTNRKVTVKQLKEDYFKKIECFDSVEISGVEDRFNASLGTYHDLLKIIKDKDFLDNEENEDILEDIVLTLTLFEDREMIEERLKTYAHLFDDKVMKQLKRRRYTGWGRLSRKLINGIRDKQSGKTILDFLKSDGFANRNFMQLIHDDSLTFKEDIQKAQVSGQGDSLHEHIANLAGSPAIKKGILQTVKVVDELVKVMGRHKPENIVIEMARENQTTQKGQKNSRERMKRIEEGIKELGSQILKEHPVENTQLQNEKLYLYYLQNGRDMYVDQELDINRLSDYDVDHIVPQSFLKDDSIDNKVLTRSDKARGKSDNVPSEEVVKKMKNYWRQLLNAKLITQRKFDNLTKAERGGLSELDKAGFIKRQLVETRQITKHVAQILDSRMNTKYDENDKLIREVKVITLKSKLVSDFRKDFQFYKVREINNYHHAHDAYLNAVVGTALIKKYPKLESEFVYGDYKVYDVRKMIAKSEQEIGKATAKYFFYSNIMNFFKTEITLANGEIRKRPLIETNGETGEIVWDKGRDFATVRKVLSMPQVNIVKKTEVQTGGFSKESILPKRNSDKLIARKKDWDPKKYGGFDSPTVAYSVLVVAKVEKGKSKKLKSVKELLGITIMERSSFEKNPIDFLEAKGYKEVKKDLIIKLPKYSLFELENGRKRMLASAGELQKGNELALPSKYVNFLYLASHYEKLKGSPEDNEQKQLFVEQHKHYLDEIIEQISEFSKRVILADANLDKVLSAYNKHRDKPIREQAENIIHLFTLTNLGAPAAFKYFDTTIDRKRYTSTKEVLDATLIHQSITGLYETRIDLSQLGGDGGGGSGGGGGTAPLEEEYRLFLEAPIQNVTLLEQWKREIPKVWAEINPPGLASTQAPIHVQLLSTALPVRVRQYPITLEAKRSLRETIRKFRAAGILRPVHSPWNTPLLPVRKSGTSEYRMVQDLREVNKRVETIHPTVPNPYTLLSLLPPDRIWYSVLDLKDAFFCIPLAPESQLIFAFEWADAEEGESGQLTWTRLPQGFKNSPTLFDEALNRDLQGFRLDHPSVSLLQYVDDLLIAADTQAACLSATRDLLMTLAELGYRVSGKKAQLCQEEVTYLGFKIHKGSRSLSNSRTQAILQIPVPKTKRQVREFLGTIGYCRLWIPGFAELAQPLYAATRGGNDPLVWGEKEEEAFQSLKLALTQPPALALPSLDKPFQLFVEETSGAAKGVLTQALGPWKRPVAYLSKRLDPVAAGWPRCLRAIAAAALLTREASKLTFGQDIEITSSHNLESLLRSPPDKWLTNARITQYQVLLLDPPRVRFKQTAALNPATLLPETDDTLPIHHCLDTLDSLTSTRPDLTDQPLAQAEATLFTDGSSYIRDGKRYAGAAVVTLDSVIWAEPLPIGTSAQKAELIALTKALEWSKDKSVNIYTDSRYAFATLHVHGMIYRERGLLTAGGKAIKNAPEILALLTAVWLPKRVAVMHCKGHQKDDAPTSTGNRRADEVAREVAIRPLSTQATISAGKRTADGSEFEKRTADGSEFESPKKKAKVE

SEQ ID NO: 13 - protein, 2103 aa, synthetic construct
  source 1..2103: note = Description of Artificial Sequence: Synthetic polypeptide
MPAAKRVKLDGGDKKYSIGLDIGTNSVGWAVITDEYKVPSKKFKVLGNTDRHSIKKNLIGALLFDSGETAEATRLKRTARRRYTRRKNRICYLQEIFSNEMAKVDDSFFHRLEESFLVEEDKKHERHPIFGNIVDEVAYHEKYPTIYHLRKKLVDSTDKADLRLIYLALAHMIKFRGHFLIEGDLNPDNSDVDKLFIQLVQTYNQLFEENPINASGVDAKAILSARLSKSRRLENLIAQLPGEKKNGLFGNLIALSLGLTPNFKSNFDLAEDAKLQLSKDTYDDDLDNLLAQIGDQYADLFLAAKNLSDAILLSDILRVNTEITKAPLSASMIKRYDEHHQDLTLLKALVRQQLPEKYKEIFFDQSKNGYAGYIDGGASQEEFYKFIKPILEKMDGTEELLVKLNREDLLRKQRTFDNGSIPHQIHLGELHAILRRQEDFYPFLKDNREKIEKILTFRIPYYVGPLARGNSRFAWMTRKSEETITPWNFEEVVDKGASAQSFIERMTNFDKNLPNEKVLPKHSLLYEYFTVYNELTKVKYVTEGMRKPAFLSGEQKKAIVDLLFKTNRKVTVKQLKEDYFKKIECFDSVEISGVEDRFNASLGTYHDLLKIIKDKDFLDNEENEDILEDIVLTLTLFEDREMIEERLKTYAHLFDDKVMKQLKRRRYTGWGRLSRKLINGIRDKQSGKTILDFLKSDGFANRNFMQLIHDDSLTFKEDIQKAQVSGQGDSLHEHIANLAGSPAIKKGILQTVKVVDELVKVMGRHKPENIVIEMARENQTTQKGQKNSRERMKRIEEGIKELGSQILKEHPVENTQLQNEKLYLYYLQNGRDMYVDQELDINRLSDYDVDHIVPQSFLKDDSIDNKVLTRSDKARGKSDNVPSEEVVKKMKNYWRQLLNAKLITQRKFDNLTKAERGGLSELDKAGFIKRQLVETRQITKHVAQILDSRMNTKYDENDKLIREVKVITLKSKLVSDFRKDFQFYKVREINNYHHAHDAYLNAVVGTALIKKYPKLESEFVYGDYKVYDVRKMIAKSEQEIGKATAKYFFYSNIMNFFKTEITLANGEIRKRPLIETNGETGEIVWDKGRDFATVRKVLSMPQVNIVKKTEVQTGGFSKESILPKRNSDKLIARKKDWDPKKYGGFDSPTVAYSVLVVAKVEKGKSKKLKSVKELLGITIMERSSFEKNPIDFLEAKGYKEVKKDLIIKLPKYSLFELENGRKRMLASAGELQKGNELALPSKYVNFLYLASHYEKLKGSPEDNEQKQLFVEQHKHYLDEIIEQISEFSKRVILADANLDKVLSAYNKHRDKPIREQAENIIHLFTLTNLGAPAAFKYFDTTIDRKRYTSTKEVLDATLIHQSITGLYETRIDLSQLGGDGGSGSETPGTSESATPESGGTAPLEEEYRLFLEAPIQNVTLLEQWKREIPKVWAEINPPGLASTQAPIHVQLLSTALPVRVRQYPITLEAKRSLRETIRKFRAAGILRPVHSPWNTPLLPVRKSGTSEYRMVQDLREVNKRVETIHPTVPNPYTLLSLLPPDRIWYSVLDLKDAFFCIPLAPESQLIFAFEWADAEEGESGQLTWTRLPQGFKNSPTLFDEALNRDLQGFRLDHPSVSLLQYVDDLLIAADTQAACLSATRDLLMTLAELGYRVSGKKAQLCQEEVTYLGFKIHKGSRSLSNSRTQAILQIPVPKTKRQVREFLGTIGYCRLWIPGFAELAQPLYAATRGGNDPLVWGEKEEEAFQSLKLALTQPPALALPSLDKPFQLFVEETSGAAKGVLTQALGPWKRPVAYLSKRLDPVAAGWPRCLRAIAAAALLTREASKLTFGQDIEITSSHNLESLLRSPPDKWLTNARITQYQVLLLDPPRVRFKQTAALNPATLLPETDDTLPIHHCLDTLDSLTSTRPDLTDQPLAQAEATLFTDGSSYIRDGKRYAGAAVVTLDSVIWAEPLPIGTSAQKAELIALTKALEWSKDKSVNIYTDSRYAFATLHVHGMIYRERGLLTAGGKAIKNAPEILALLTAVWLPKRVAVMHCKGHQKDDAPTSTGNRRADEVAREVAIRPLSTQATISAGKRTADGSEFEKRTADGSEFESPKKKAKVE

SEQ ID NO: 14 - protein, 2099 aa, synthetic construct
  source 1..2099: note = Description of Artificial Sequence: Synthetic polypeptide
MPAAKRVKLDGGDKKYSIGLDIGTNSVGWAVITDEYKVPSKKFKVLGNTDRHSIKKNLIGALLFDSGETAEATRLKRTARRRYTRRKNRICYLQEIFSNEMAKVDDSFFHRLEESFLVEEDKKHERHPIFGNIVDEVAYHEKYPTIYHLRKKLVDSTDKADLRLIYLALAHMIKFRGHFLIEGDLNPDNSDVDKLFIQLVQTYNQLFEENPINASGVDAKAILSARLSKSRRLENLIAQLPGEKKNGLFGNLIALSLGLTPNFKSNFDLAEDAKLQLSKDTYDDDLDNLLAQIGDQYADLFLAAKNLSDAILLSDILRVNTEITKAPLSASMIKRYDEHHQDLTLLKALVRQQLPEKYKEIFFDQSKNGYAGYIDGGASQEEFYKFIKPILEKMDGTEELLVKLNREDLLRKQRTFDNGSIPHQIHLGELHAILRRQEDFYPFLKDNREKIEKILTFRIPYYVGPLARGNSRFAWMTRKSEETITPWNFEEVVDKGASAQSFIERMTNFDKNLPNEKVLPKHSLLYEYFTVYNELTKVKYVTEGMRKPAFLSGEQKKAIVDLLFKTNRKVTVKQLKEDYFKKIECFDSVEISGVEDRFNASLGTYHDLLKIIKDKDFLDNEENEDILEDIVLTLTLFEDREMIEERLKTYAHLFDDKVMKQLKRRRYTGWGRLSRKLINGIRDKQSGKTILDFLKSDGFANRNFMQLIHDDSLTFKEDIQKAQVSGQGDSLHEHIANLAGSPAIKKGILQTVKVVDELVKVMGRHKPENIVIEMARENQTTQKGQKNSRERMKRIEEGIKELGSQILKEHPVENTQLQNEKLYLYYLQNGRDMYVDQELDINRLSDYDVDHIVPQSFLKDDSIDNKVLTRSDKARGKSDNVPSEEVVKKMKNYWRQLLNAKLITQRKFDNLTKAERGGLSELDKAGFIKRQLVETRQITKHVAQILDSRMNTKYDENDKLIREVKVITLKSKLVSDFRKDFQFYKVREINNYHHAHDAYLNAVVGTALIKKYPKLESEFVYGDYKVYDVRKMIAKSEQEIGKATAKYFFYSNIMNFFKTEITLANGEIRKRPLIETNGETGEIVWDKGRDFATVRKVLSMPQVNIVKKTEVQTGGFSKESILPKRNSDKLIARKKDWDPKKYGGFDSPTVAYSVLVVAKVEKGKSKKLKSVKELLGITIMERSSFEKNPIDFLEAKGYKEVKKDLIIKLPKYSLFELENGRKRMLASAGELQKGNELALPSKYVNFLYLASHYEKLKGSPEDNEQKQLFVEQHKHYLDEIIEQISEFSKRVILADANLDKVLSAYNKHRDKPIREQAENIIHLFTLTNLGAPAAFKYFDTTIDRKRYTSTKEVLDATLIHQSITGLYETRIDLSQLGGDGGGSAGSAAGSGEFGGTAPLEEEYRLFLEAPIQNVTLLEQWKREIPKVWAEINPPGLASTQAPIHVQLLSTALPVRVRQYPITLEAKRSLRETIRKFRAAGILRPVHSPWNTPLLPVRKSGTSEYRMVQDLREVNKRVETIHPTVPNPYTLLSLLPPDRIWYSVLDLKDAFFCIPLAPESQLIFAFEWADAEEGESGQLTWTRLPQGFKNSPTLFDEALNRDLQGFRLDHPSVSLLQYVDDLLIAADTQAACLSATRDLLMTLAELGYRVSGKKAQLCQEEVTYLGFKIHKGSRSLSNSRTQAILQIPVPKTKRQVREFLGTIGYCRLWIPGFAELAQPLYAATRGGNDPLVWGEKEEEAFQSLKLALTQPPALALPSLDKPFQLFVEETSGAAKGVLTQALGPWKRPVAYLSKRLDPVAAGWPRCLRAIAAAALLTREASKLTFGQDIEITSSHNLESLLRSPPDKWLTNARITQYQVLLLDPPRVRFKQTAALNPATLLPETDDTLPIHHCLDTLDSLTSTRPDLTDQPLAQAEATLFTDGSSYIRDGKRYAGAAVVTLDSVIWAEPLPIGTSAQKAELIALTKALEWSKDKSVNIYTDSRYAFATLHVHGMIYRERGLLTAGGKAIKNAPEILALLTAVWLPKRVAVMHCKGHQKDDAPTSTGNRRADEVAREVAIRPLSTQATISAGKRTADGSEFEKRTADGSEFESPKKKAKVE

SEQ ID NO: 15 - protein, 2096 aa, synthetic construct
  source 1..2096: note = Description of Artificial Sequence: Synthetic polypeptide
MPAAKRVKLDGGDKKYSIGLDIGTNSVGWAVITDEYKVPSKKFKVLGNTDRHSIKKNLIGALLFDSGETAEATRLKRTARRRYTRRKNRICYLQEIFSNEMAKVDDSFFHRLEESFLVEEDKKHERHPIFGNIVDEVAYHEKYPTIYHLRKKLVDSTDKADLRLIYLALAHMIKFRGHFLIEGDLNPDNSDVDKLFIQLVQTYNQLFEENPINASGVDAKAILSARLSKSRRLENLIAQLPGEKKNGLFGNLIALSLGLTPNFKSNFDLAEDAKLQLSKDTYDDDLDNLLAQIGDQYADLFLAAKNLSDAILLSDILRVNTEITKAPLSASMIKRYDEHHQDLTLLKALVRQQLPEKYKEIFFDQSKNGYAGYIDGGASQEEFYKFIKPILEKMDGTEELLVKLNREDLLRKQRTFDNGSIPHQIHLGELHAILRRQEDFYPFLKDNREKIEKILTFRIPYYVGPLARGNSRFAWMTRKSEETITPWNFEEVVDKGASAQSFIERMTNFDKNLPNEKVLPKHSLLYEYFTVYNELTKVKYVTEGMRKPAFLSGEQKKAIVDLLFKTNRKVTVKQLKEDYFKKIECFDSVEISGVEDRFNASLGTYHDLLKIIKDKDFLDNEENEDILEDIVLTLTLFEDREMIEERLKTYAHLFDDKVMKQLKRRRYTGWGRLSRKLINGIRDKQSGKTILDFLKSDGFANRNFMQLIHDDSLTFKEDIQKAQVSGQGDSLHEHIANLAGSPAIKKGILQTVKVVDELVKVMGRHKPENIVIEMARENQTTQKGQKNSRERMKRIEEGIKELGSQILKEHPVENTQLQNEKLYLYYLQNGRDMYVDQELDINRLSDYDVDHIVPQSFLKDDSIDNKVLTRSDKARGKSDNVPSEEVVKKMKNYWRQLLNAKLITQRKFDNLTKAERGGLSELDKAGFIKRQLVETRQITKHVAQILDSRMNTKYDENDKLIREVKVITLKSKLVSDFRKDFQFYKVREINNYHHAHDAYLNAVVGTALIKKYPKLESEFVYGDYKVYDVRKMIAKSEQEIGKATAKYFFYSNIMNFFKTEITLANGEIRKRPLIETNGETGEIVWDKGRDFATVRKVLSMPQVNIVKKTEVQTGGFSKESILPKRNSDKLIARKKDWDPKKYGGFDSPTVAYSVLVVAKVEKGKSKKLKSVKELLGITIMERSSFEKNPIDFLEAKGYKEVKKDLIIKLPKYSLFELENGRKRMLASAGELQKGNELALPSKYVNFLYLASHYEKLKGSPEDNEQKQLFVEQHKHYLDEIIEQISEFSKRVILADANLDKVLSAYNKHRDKPIREQAENIIHLFTLTNLGAPAAFKYFDTTIDRKRYTSTKEVLDATLIHQSITGLYETRIDLSQLGGDGGGGGPAPGGSGGTAPLEEEYRLFLEAPIQNVTLLEQWKREIPKVWAEINPPGLASTQAPIHVQLLSTALPVRVRQYPITLEAKRSLRETIRKFRAAGILRPVHSPWNTPLLPVRKSGTSEYRMVQDLREVNKRVETIHPTVPNPYTLLSLLPPDRIWYSVLDLKDAFFCIPLAPESQLIFAFEWADAEEGESGQLTWTRLPQGFKNSPTLFDEALNRDLQGFRLDHPSVSLLQYVDDLLIAADTQAACLSATRDLLMTLAELGYRVSGKKAQLCQEEVTYLGFKIHKGSRSLSNSRTQAILQIPVPKTKRQVREFLGTIGYCRLWIPGFAELAQPLYAATRGGNDPLVWGEKEEEAFQSLKLALTQPPALALPSLDKPFQLFVEETSGAAKGVLTQALGPWKRPVAYLSKRLDPVAAGWPRCLRAIAAAALLTREASKLTFGQDIEITSSHNLESLLRSPPDKWLTNARITQYQVLLLDPPRVRFKQTAALNPATLLPETDDTLPIHHCLDTLDSLTSTRPDLTDQPLAQAEATLFTDGSSYIRDGKRYAGAAVVTLDSVIWAEPLPIGTSAQKAELIALTKALEWSKDKSVNIYTDSRYAFATLHVHGMIYRERGLLTAGGKAIKNAPEILALLTAVWLPKRVAVMHCKGHQKDDAPTSTGNRRADEVAREVAIRPLSTQATISAGKRTADGSEFEKRTADGSEFESPKKKAKVE

SEQ ID NO: 16 - protein, 2098 aa, synthetic construct
  source 1..2098: note = Description of Artificial Sequence: Synthetic polypeptide
MPAAKRVKLDGGDKKYSIGLDIGTNSVGWAVITDEYKVPSKKFKVLGNTDRHSIKKNLIGALLFDSGETAEATRLKRTARRRYTRRKNRICYLQEIFSNEMAKVDDSFFHRLEESFLVEEDKKHERHPIFGNIVDEVAYHEKYPTIYHLRKKLVDSTDKADLRLIYLALAHMIKFRGHFLIEGDLNPDNSDVDKLFIQLVQTYNQLFEENPINASGVDAKAILSARLSKSRRLENLIAQLPGEKKNGLFGNLIALSLGLTPNFKSNFDLAEDAKLQLSKDTYDDDLDNLLAQIGDQYADLFLAAKNLSDAILLSDILRVNTEITKAPLSASMIKRYDEHHQDLTLLKALVRQQLPEKYKEIFFDQSKNGYAGYIDGGASQEEFYKFIKPILEKMDGTEELLVKLNREDLLRKQRTFDNGSIPHQIHLGELHAILRRQEDFYPFLKDNREKIEKILTFRIPYYVGPLARGNSRFAWMTRKSEETITPWNFEEVVDKGASAQSFIERMTNFDKNLPNEKVLPKHSLLYEYFTVYNELTKVKYVTEGMRKPAFLSGEQKKAIVDLLFKTNRKVTVKQLKEDYFKKIECFDSVEISGVEDRFNASLGTYHDLLKIIKDKDFLDNEENEDILEDIVLTLTLFEDREMIEERLKTYAHLFDDKVMKQLKRRRYTGWGRLSRKLINGIRDKQSGKTILDFLKSDGFANRNFMQLIHDDSLTFKEDIQKAQVSGQGDSLHEHIANLAGSPAIKKGILQTVKVVDELVKVMGRHKPENIVIEMARENQTTQKGQKNSRERMKRIEEGIKELGSQILKEHPVENTQLQNEKLYLYYLQNGRDMYVDQELDINRLSDYDVDHIVPQSFLKDDSIDNKVLTRSDKARGKSDNVPSEEVVKKMKNYWRQLLNAKLITQRKFDNLTKAERGGLSELDKAGFIKRQLVETRQITKHVAQILDSRMNTKYDENDKLIREVKVITLKSKLVSDFRKDFQFYKVREINNYHHAHDAYLNAVVGTALIKKYPKLESEFVYGDYKVYDVRKMIAKSEQEIGKATAKYFFYSNIMNFFKTEITLANGEIRKRPLIETNGETGEIVWDKGRDFATVRKVLSMPQVNIVKKTEVQTGGFSKESILPKRNSDKLIARKKDWDPKKYGGFDSPTVAYSVLVVAKVEKGKSKKLKSVKELLGITIMERSSFEKNPIDFLEAKGYKEVKKDLIIKLPKYSLFELENGRKRMLASAGELQKGNELALPSKYVNFLYLASHYEKLKGSPEDNEQKQLFVEQHKHYLDEIIEQISEFSKRVILADANLDKVLSAYNKHRDKPIREQAENIIHLFTLTNLGAPAAFKYFDTTIDRKRYTSTKEVLDATLIHQSITGLYETRIDLSQLGGDGGGSSGGGEAAAKGGTAPLEEEYRLFLEAPIQNVTLLEQWKREIPKVWAEINPPGLASTQAPIHVQLLSTALPVRVRQYPITLEAKRSLRETIRKFRAAGILRPVHSPWNTPLLPVRKSGTSEYRMVQDLREVNKRVETIHPTVPNPYTLLSLLPPDRIWYSVLDLKDAFFCIPLAPESQLIFAFEWADAEEGESGQLTWTRLPQGFKNSPTLFDEALNRDLQGFRLDHPSVSLLQYVDDLLIAADTQAACLSATRDLLMTLAELGYRVSGKKAQLCQEEVTYLGFKIHKGSRSLSNSRTQAILQIPVPKTKRQVREFLGTIGYCRLWIPGFAELAQPLYAATRGGNDPLVWGEKEEEAFQSLKLALTQPPALALPSLDKPFQLFVEETSGAAKGVLTQALGPWKRPVAYLSKRLDPVAAGWPRCLRAIAAAALLTREASKLTFGQDIEITSSHNLESLLRSPPDKWLTNARITQYQVLLLDPPRVRFKQTAALNPATLLPETDDTLPIHHCLDTLDSLTSTRPDLTDQPLAQAEATLFTDGSSYIRDGKRYAGAAVVTLDSVIWAEPLPIGTSAQKAELIALTKALEWSKDKSVNIYTDSRYAFATLHVHGMIYRERGLLTAGGKAIKNAPEILALLTAVWLPKRVAVMHCKGHQKDDAPTSTGNRRADEVAREVAIRPLSTQATISAGKRTADGSEFEKRTADGSEFESPKKKAKVE

SEQ ID NO: 17 - protein, 1998 aa, synthetic construct
  source 1..1998: note = Description of Artificial Sequence: Synthetic polypeptide
MPAAKRVKLDGGDKKYSIGLDIGTNSVGWAVITDEYKVPSKKFKVLGNTDRHSIKKNLIGALLFDSGETAEATRLKRTARRRYTRRKNRICYLQEIFSNEMAKVDDSFFHRLEESFLVEEDKKHERHPIFGNIVDEVAYHEKYPTIYHLRKKLVDSTDKADLRLIYLALAHMIKFRGHFLIEGDLNPDNSDVDKLFIQLVQTYNQLFEENPINASGVDAKAILSARLSKSRRLENLIAQLPGEKKNGLFGNLIALSLGLTPNFKSNFDLAEDAKLQLSKDTYDDDLDNLLAQIGDQYADLFLAAKNLSDAILLSDILRVNTEITKAPLSASMIKRYDEHHQDLTLLKALVRQQLPEKYKEIFFDQSKNGYAGYIDGGASQEEFYKFIKPILEKMDGTEELLVKLNREDLLRKQRTFDNGSIPHQIHLGELHAILRRQEDFYPFLKDNREKIEKILTFRIPYYVGPLARGNSRFAWMTRKSEETITPWNFEEVVDKGASAQSFIERMTNFDKNLPNEKVLPKHSLLYEYFTVYNELTKVKYVTEGMRKPAFLSGEQKKAIVDLLFKTNRKVTVKQLKEDYFKKIECFDSVEISGVEDRFNASLGTYHDLLKIIKDKDFLDNEENEDILEDIVLTLTLFEDREMIEERLKTYAHLFDDKVMKQLKRRRYTGWGRLSRKLINGIRDKQSGKTILDFLKSDGFANRNFMQLIHDDSLTFKEDIQKAQVSGQGDSLHEHIANLAGSPAIKKGILQTVKVVDELVKVMGRHKPENIVIEMARENQTTQKGQKNSRERMKRIEEGIKELGSQILKEHPVENTQLQNEKLYLYYLQNGRDMYVDQELDINRLSDYDVDHIVPQSFLKDDSIDNKVLTRSDKARGKSDNVPSEEVVKKMKNYWRQLLNAKLITQRKFDNLTKAERGGLSELDKAGFIKRQLVETRQITKHVAQILDSRMNTKYDENDKLIREVKVITLKSKLVSDFRKDFQFYKVREINNYHHAHDAYLNAVVGTALIKKYPKLESEFVYGDYKVYDVRKMIAKSEQEIGKATAKYFFYSNIMNFFKTEITLANGEIRKRPLIETNGETGEIVWDKGRDFATVRKVLSMPQVNIVKKTEVQTGGFSKESILPKRNSDKLIARKKDWDPKKYGGFDSPTVAYSVLVVAKVEKGKSKKLKSVKELLGITIMERSSFEKNPIDFLEAKGYKEVKKDLIIKLPKYSLFELENGRKRMLASAGELQKGNELALPSKYVNFLYLASHYEKLKGSPEDNEQKQLFVEQHKHYLDEIIEQISEFSKRVILADANLDKVLSAYNKHRDKPIREQAENIIHLFTLTNLGAPAAFKYFDTTIDRKRYTSTKEVLDATLIHQSITGLYETRIDLSQLGGDGGPAPEAAAKGGGVLDTPPSHIGLEHLPPPPEVPQFPLNLERLQALQDLVHRSLEAGYISPWDGPGNNPVFPVRKPNGAWRFVHDLRATNALTKPIPALSPGPPDLTAIPTHPPHIICLDLKDAFFQIPVEDRFRFYLSFTLPSPGGLQPHRRFAWRVLPQGFINSPALFERALQEPLRQVSAAFSQSLLVSYMDDILYASPTEEQRSQCYQALAARLRDLGFQVASEKTSQTPSPVPFLGQMVHEQIVTYQSLPTLQISSPISLHQLQAVLGDLQWVSRGTPTTRRPLQLLYSSLKRHHDPRAIIQLSPEQLQGIAELRQALSHNARSRYNEQEPLLAYVHLTRAGSTLVLFQKGAQFPLAYFQTPLTDNQASPWGLLLLLGCQYLQTQALSSYAKPILKYYHNLPKTSLDNWIQSSEDPRVQELLQLWPQISSQGIQPPGPWKTLITRAEVFLTPQFSPDPIPAALCLFSDGATGRGAYCLWKDHLLDFQAVPAPESAQKGELAGLLAGLAAAPPEPVNIWVDSKYLYSLLRTLVLGAWLQPDPVPSYALLYKSLLRHPAIVVGHVRSHSSASHPIASLNNYVDQLAGKRTADGSEFEKRTADGSEFESPKKKAKVE

SEQ ID NO: 18 - protein, 2116 aa, synthetic construct
  source 1..2116: note = Description of Artificial Sequence: Synthetic polypeptide
MPAAKRVKLDGGDKKYSIGLDIGTNSVGWAVITDEYKVPSKKFKVLGNTDRHSIKKNLIGALLFDSGETAEATRLKRTARRRYTRRKNRICYLQEIFSNEMAKVDDSFFHRLEESFLVEEDKKHERHPIFGNIVDEVAYHEKYPTIYHLRKKLVDSTDKADLRLIYLALAHMIKFRGHFLIEGDLNPDNSDVDKLFIQLVQTYNQLFEENPINASGVDAKAILSARLSKSRRLENLIAQLPGEKKNGLFGNLIALSLGLTPNFKSNFDLAEDAKLQLSKDTYDDDLDNLLAQIGDQYADLFLAAKNLSDAILLSDILRVNTEITKAPLSASMIKRYDEHHQDLTLLKALVRQQLPEKYKEIFFDQSKNGYAGYIDGGASQEEFYKFIKPILEKMDGTEELLVKLNREDLLRKQRTFDNGSIPHQIHLGELHAILRRQEDFYPFLKDNREKIEKILTFRIPYYVGPLARGNSRFAWMTRKSEETITPWNFEEVVDKGASAQSFIERMTNFDKNLPNEKVLPKHSLLYEYFTVYNELTKVKYVTEGMRKPAFLSGEQKKAIVDLLFKTNRKVTVKQLKEDYFKKIECFDSVEISGVEDRFNASLGTYHDLLKIIKDKDFLDNEENEDILEDIVLTLTLFEDREMIEERLKTYAHLFDDKVMKQLKRRRYTGWGRLSRKLINGIRDKQSGKTILDFLKSDGFANRNFMQLIHDDSLTFKEDIQKAQVSGQGDSLHEHIANLAGSPAIKKGILQTVKVVDELVKVMGRHKPENIVIEMARENQTTQKGQKNSRERMKRIEEGIKELGSQILKEHPVENTQLQNEKLYLYYLQNGRDMYVDQELDINRLSDYDVDHIVPQSFLKDDSIDNKVLTRSDKARGKSDNVPSEEVVKKMKNYWRQLLNAKLITQRKFDNLTKAERGGLSELDKAGFIKRQLVETRQITKHVAQILDSRMNTKYDENDKLIREVKVITLKSKLVSDFRKDFQFYKVREINNYHHAHDAYLNAVVGTALIKKYPKLESEFVYGDYKVYDVRKMIAKSEQEIGKATAKYFFYSNIMNFFKTEITLANGEIRKRPLIETNGETGEIVWDKGRDFATVRKVLSMPQVNIVKKTEVQTGGFSKESILPKRNSDKLIARKKDWDPKKYGGFDSPTVAYSVLVVAKVEKGKSKKLKSVKELLGITIMERSSFEKNPIDFLEAKGYKEVKKDLIIKLPKYSLFELENGRKRMLASAGELQKGNELALPSKYVNFLYLASHYEKLKGSPEDNEQKQLFVEQHKHYLDEIIEQISEFSKRVILADANLDKVLSAYNKHRDKPIREQAENIIHLFTLTNLGAPAAFKYFDTTIDRKRYTSTKEVLDATLIHQSITGLYETRIDLSQLGGDGGEAAAKPAPGGGGGWVQEISDSRPMLHIYLNGRRFLGLLNTGADKTCIAGRDWPANWPIHQTESSLQGLGMACGVARSSQPLRWQHEDKSGIIHPFVIPTLPFTLWGRDIMKDIKVRLMTDSPDDSQDLMIGAIESNLFADQISWKSDQPVWLNQWPLKQEKLQALQQLVTEQLQLGHLEESNSPWNTPVFVIKKKSGKWRLLQDLRAVNATMHDMGALQPGLPSPVAPPKGWEIIIIDLQDCFFNIKLHPEDCKRFAFSVPSPNFKRPYQRFQWKVLPQGMKNSPTLCQKFVDKAILTVRDKYQDSYIVHYMDDILLAHPSRSIVDEILTSMIQALNKHGLVVSTEKIQKYDNLKYLGTHIQGDSVSYQKLQIRTDKLRTLNDFQKLLGNINWIRPFLKLTTGELKPLFEILNPDSNPISTRKLTPEACKALQLMNERLSTARVKRLDLSQPWSLCILKTEYTPTACLWQDGVVEWIHLPHISPKVITPYDIFCTQLIIKGRHRSKELFSKDPDYIVVPYTKVQFDLLLQEKEDWPISLLGFLGEVHFHLPKDPLLTFTLQTAIIFPHMTSTTPLEKGIVIFTDGSANGRSVTYIQGREPIIKENTQNTAQQAEIVAVITAFEEVSQPFNLYTDSKYVTGLFPEIETATLSPRTKIYTELKHLQRLIHKRQEKFYIGHIRGHTGLPGPLAQGNAYADSLTRILTAGKRTADGSEFEKRTADGSEFESPKKKAKVE

SEQ ID NO: 19 - protein, 2114 aa, synthetic construct
  source 1..2114: note = Description of Artificial Sequence: Synthetic polypeptide
MPAAKRVKLDGGDKKYSIGLDIGTNSVGWAVITDEYKVPSKKFKVLGNTDRHSIKKNLIGALLFDSGETAEATRLKRTARRRYTRRKNRICYLQEIFSNEMAKVDDSFFHRLEESFLVEEDKKHERHPIFGNIVDEVAYHEKYPTIYHLRKKLVDSTDKADLRLIYLALAHMIKFRGHFLIEGDLNPDNSDVDKLFIQLVQTYNQLFEENPINASGVDAKAILSARLSKSRRLENLIAQLPGEKKNGLFGNLIALSLGLTPNFKSNFDLAEDAKLQLSKDTYDDDLDNLLAQIGDQYADLFLAAKNLSDAILLSDILRVNTEITKAPLSASMIKRYDEHHQDLTLLKALVRQQLPEKYKEIFFDQSKNGYAGYIDGGASQEEFYKFIKPILEKMDGTEELLVKLNREDLLRKQRTFDNGSIPHQIHLGELHAILRRQEDFYPFLKDNREKIEKILTFRIPYYVGPLARGNSRFAWMTRKSEETITPWNFEEVVDKGASAQSFIERMTNFDKNLPNEKVLPKHSLLYEYFTVYNELTKVKYVTEGMRKPAFLSGEQKKAIVDLLFKTNRKVTVKQLKEDYFKKIECFDSVEISGVEDRFNASLGTYHDLLKIIKDKDFLDNEENEDILEDIVLTLTLFEDREMIEERLKTYAHLFDDKVMKQLKRRRYTGWGRLSRKLINGIRDKQSGKTILDFLKSDGFANRNFMQLIHDDSLTFKEDIQKAQVSGQGDSLHEHIANLAGSPAIKKGILQTVKVVDELVKVMGRHKPENIVIEMARENQTTQKGQKNSRERMKRIEEGIKELGSQILKEHPVENTQLQNEKLYLYYLQNGRDMYVDQELDINRLSDYDVDHIVPQSFLKDDSIDNKVLTRSDKARGKSDNVPSEEVVKKMKNYWRQLLNAKLITQRKFDNLTKAERGGLSELDKAGFIKRQLVETRQITKHVAQILDSRMNTKYDENDKLIREVKVITLKSKLVSDFRKDFQFYKVREINNYHHAHDAYLNAVVGTALIKKYPKLESEFVYGDYKVYDVRKMIAKSEQEIGKATAKYFFYSNIMNFFKTEITLANGEIRKRPLIETNGETGEIVWDKGRDFATVRKVLSMPQVNIVKKTEVQTGGFSKESILPKRNSDKLIARKKDWDPKKYGGFDSPTVAYSVLVVAKVEKGKSKKLKSVKELLGITIMERSSFEKNPIDFLEAKGYKEVKKDLIIKLPKYSLFELENGRKRMLASAGELQKGNELALPSKYVNFLYLASHYEKLKGSPEDNEQKQLFVEQHKHYLDEIIEQISEFSKRVILADANLDKVLSAYNKHRDKPIREQAENIIHLFTLTNLGAPAAFKYFDTTIDRKRYTSTKEVLDATLIHQSITGLYETRIDLSQLGGDGGPAPGGGGGSGGWVQEISDSRPMLHIYLNGRRFLGLLNTGADKTCIAGRDWPANWPIHQTESSLQGLGMACGVARSSQPLRWQHEDKSGIIHPFVIPTLPFTLWGRDIMKDIKVRLMTDSPDDSQDLMIGAIESNLFADQISWKSDQPVWLNQWPLKQEKLQALQQLVTEQLQLGHLEESNSPWNTPVFVIKKKSGKWRLLQDLRAVNATMHDMGALQPGLPSPVAPPKGWEIIIIDLQDCFFNIKLHPEDCKRFAFSVPSPNFKRPYQRFQWKVLPQGMKNSPTLCQKFVDKAILTVRDKYQDSYIVHYMDDILLAHPSRSIVDEILTSMIQALNKHGLVVSTEKIQKYDNLKYLGTHIQGDSVSYQKLQIRTDKLRTLNDFQKLLGNINWIRPFLKLTTGELKPLFEILNPDSNPISTRKLTPEACKALQLMNERLSTARVKRLDLSQPWSLCILKTEYTPTACLWQDGVVEWIHLPHISPKVITPYDIFCTQLIIKGRHRSKELFSKDPDYIVVPYTKVQFDLLLQEKEDWPISLLGFLGEVHFHLPKDPLLTFTLQTAIIFPHMTSTTPLEKGIVIFTDGSANGRSVTYIQGREPIIKENTQNTAQQAEIVAVITAFEEVSQPFNLYTDSKYVTGLFPEIETATLSPRTKIYTELKHLQRLIHKRQEKFYIGHIRGHTGLPGPLAQGNAYADSLTRILTAGKRTADGSEFEKRTADGSEFESPKKKAKVE

SEQ ID NO: 20 - protein, 2114 aa, synthetic construct
  source 1..2114: note = Description of Artificial Sequence: Synthetic polypeptide
MPAAKRVKLDGGDKKYSIGLDIGTNSVGWAVITDEYKVPSKKFKVLGNTDRHSIKKNLIGALLFDSGETAEATRLKRTARRRYTRRKNRICYLQEIFSNEMAKVDDSFFHRLEESFLVEEDKKHERHPIFGNIVDEVAYHEKYPTIYHLRKKLVDSTDKADLRLIYLALAHMIKFRGHFLIEGDLNPDNSDVDKLFIQLVQTYNQLFEENPINASGVDAKAILSARLSKSRRLENLIAQLPGEKKNGLFGNLIALSLGLTPNFKSNFDLAEDAKLQLSKDTYDDDLDNLLAQIGDQYADLFLAAKNLSDAILLSDILRVNTEITKAPLSASMIKRYDEHHQDLTLLKALVRQQLPEKYKEIFFDQSKNGYAGYIDGGASQEEFYKFIKPILEKMDGTEELLVKLNREDLLRKQRTFDNGSIPHQIHLGELHAILRRQEDFYPFLKDNREKIEKILTFRIPYYVGPLARGNSRFAWMTRKSEETITPWNFEEVVDKGASAQSFIERMTNFDKNLPNEKVLPKHSLLYEYFTVYNELTKVKYVTEGMRKPAFLSGEQKKAIVDLLFKTNRKVTVKQLKEDYFKKIECFDSVEISGVEDRFNASLGTYHDLLKIIKDKDFLDNEENEDILEDIVLTLTLFEDREMIEERLKTYAHLFDDKVMKQLKRRRYTGWGRLSRKLINGIRDKQSGKTILDFLKSDGFANRNFMQLIHDDSLTFKEDIQKAQVSGQGDSLHEHIANLAGSPAIKKGILQTVKVVDELVKVMGRHKPENIVIEMARENQTTQKGQKNSRERMKRIEEGIKELGSQILKEHPVENTQLQNEKLYLYYLQNGRDMYVDQELDINRLSDYDVDHIVPQSFLKDDSIDNKVLTRSDKARGKSDNVPSEEVVKKMKNYWRQLLNAKLITQRKFDNLTKAERGGLSELDKAGFIKRQLVETRQITKHVAQILDSRMNTKYDENDKLIREVKVITLKSKLVSDFRKDFQFYKVREINNYHHAHDAYLNAVVGTALIKKYPKLESEFVYGDYKVYDVRKMIAKSEQEIGKATAKYFFYSNIMNFFKTEITLANGEIRKRPLIETNGETGEIVWDKGRDFATVRKVLSMPQVNIVKKTEVQTGGFSKESILPKRNSDKLIARKKDWDPKKYGGFDSPTVAYSVLVVAKVEKGKSKKLKSVKELLGITIMERSSFEKNPIDFLEAKGYKEVKKDLIIKLPKYSLFELENGRKRMLASAGELQKGNELALPSKYVNFLYLASHYEKLKGSPEDNEQKQLFVEQHKHYLDEIIEQISEFSKRVILADANLDKVLSAYNKHRDKPIREQAENIIHLFTLTNLGAPAAFKYFDTTIDRKRYTSTKEVLDATLIHQSITGLYETRIDLSQLGGDGGGGSGSSGGGGGWVQEISDSRPMLHIYLNGRRFLGLLNTGADKTCIAGRDWPANWPIHQTESSLQGLGMACGVARSSQPLRWQHEDKSGIIHPFVIPTLPFTLWGRDIMKDIKVRLMTDSPDDSQDLMIGAIESNLFADQISWKSDQPVWLNQWPLKQEKLQALQQLVTEQLQLGHLEESNSPWNTPVFVIKKKSGKWRLLQDLRAVNATMHDMGALQPGLPSPVAPPKGWEIIIIDLQDCFFNIKLHPEDCKRFAFSVPSPNFKRPYQRFQWKVLPQGMKNSPTLCQKFVDKAILTVRDKYQDSYIVHYMDDILLAHPSRSIVDEILTSMIQALNKHGLVVSTEKIQKYDNLKYLGTHIQGDSVSYQKLQIRTDKLRTLNDFQKLLGNINWIRPFLKLTTGELKPLFEILNPDSNPISTRKLTPEACKALQLMNERLSTARVKRLDLSQPWSLCILKTEYTPTACLWQDGVVEWIHLPHISPKVITPYDIFCTQLIIKGRHRSKELFSKDPDYIVVPYTKVQFDLLLQEKEDWPISLLGFLGEVHFHLPKDPLLTFTLQTAIIFPHMTSTTPLEKGIVIFTDGSANGRSVTYIQGREPIIKENTQNTAQQAEIVAVITAFEEVSQPFNLYTDSKYVTGLFPEIETATLSPRTKIYTELKHLQRLIHKRQEKFYIGHIRGHTGLPGPLAQGNAYADSLTRILTAGKRTADGSEFEKRTADGSEFESPKKKAKVE

SEQ ID NO: 21 - protein, 2116 aa, synthetic construct
  source 1..2116: note = Description of Artificial Sequence: Synthetic polypeptide
MPAAKRVKLDGGDKKYSIGLDIGTNSVGWAVITDEYKVPSKKFKVLGNTDRHSIKKNLIGALLFDSGETAEATRLKRTARRRYTRRKNRICYLQEIFSNEMAKVDDSFFHRLEESFLVEEDKKHERHPIFGNIVDEVAYHEKYPTIYHLRKKLVDSTDKADLRLIYLALAHMIKFRGHFLIEGDLNPDNSDVDKLFIQLVQTYNQLFEENPINASGVDAKAILSARLSKSRRLENLIAQLPGEKKNGLFGNLIALSLGLTPNFKSNFDLAEDAKLQLSKDTYDDDLDNLLAQIGDQYADLFLAAKNLSDAILLSDILRVNTEITKAPLSASMIKRYDEHHQDLTLLKALVRQQLPEKYKEIFFDQSKNGYAGYIDGGASQEEFYKFIKPILEKMDGTEELLVKLNREDLLRKQRTFDNGSIPHQIHLGELHAILRRQEDFYPFLKDNREKIEKILTFRIPYYVGPLARGNSRFAWMTRKSEETITPWNFEEVVDKGASAQSFIERMTNFDKNLPNEKVLPKHSLLYEYFTVYNELTKVKYVTEGMRKPAFLSGEQKKAIVDLLFKTNRKVTVKQLKEDYFKKIECFDSVEISGVEDRFNASLGTYHDLLKIIKDKDFLDNEENEDILEDIVLTLTLFEDREMIEERLKTYAHLFDDKVMKQLKRRRYTGWGRLSRKLINGIRDKQSGKTILDFLKSDGFANRNFMQLIHDDSLTFKEDIQKAQVSGQGDSLHEHIANLAGSPAIKKGILQTVKVVDELVKVMGRHKPENIVIEMARENQTTQKGQKNSRERMKRIEEGIKELGSQILKEHPVENTQLQNEKLYLYYLQNGRDMYVDQELDINRLSDYDVDHIVPQSFLKDDSIDNKVLTRSDKARGKSDNVPSEEVVKKMKNYWRQLLNAKLITQRKFDNLTKAERGGLSELDKAGFIKRQLVETRQITKHVAQILDSRMNTKYDENDKLIREVKVITLKSKLVSDFRKDFQFYKVREINNYHHAHDAYLNAVVGTALIKKYPKLESEFVYGDYKVYDVRKMIAKSEQEIGKATAKYFFYSNIMNFFKTEITLANGEIRKRPLIETNGETGEIVWDKGRDFATVRKVLSMPQVNIVKKTEVQTGGFSKESILPKRNSDKLIARKKDWDPKKYGGFDSPTVAYSVLVVAKVEKGKSKKLKSVKELLGITIMERSSFEKNPIDFLEAKGYKEVKKDLIIKLPKYSLFELENGRKRMLASAGELQKGNELALPSKYVNFLYLASHYEKLKGSPEDNEQKQLFVEQHKHYLDEIIEQISEFSKRVILADANLDKVLSAYNKHRDKPIREQAENIIHLFTLTNLGAPAAFKYFDTTIDRKRYTSTKEVLDATLIHQSITGLYETRIDLSQLGGDGGPAPGGSEAAAKGGVQEISDSRPMLHIYLNGRRFLGLLDTGADKTCIAGRDWPANWPIHQTESSLQGLGMACGVARSSQPLRWQHEDKSGIIHPFVIPTLPFTLWGRDIMKDIKVRLMTDSPDDSQDLMIGAIESNLFADQISWKSDQPVWLNQWPLKQEKLQALQQLVTEQLQLGHLEESNSPWNTPVFVIKKKSGKWRLLQDLRAVNATMHDMGALQPGLPSPPAVPKGWEIIIIDLQDCFFNIKLHPEDCKRFAFSVPSPNFKRPYQRFQWKVLPQGMKNSPTLCQKFVDKAILTVRDKYQDSYIVHYMDDILLAHPSRSIVDEILTSMIQALNKHGLVVSTEKIQKYDNLKYLGTHIQGDSVSYQKLQIRTDKLRTLNDFQKLLGNINWIRPFLKLTTGELKPLFEILNPDSNPISTRKLTPEACKALQLMNERLSTARVKRLDLSQPWSLCILKTEYTPTACLWQDGVVEWIHLPHISPKVITPYDIFCTQLIIKGRHRSKELFSKDPDYIVVPYTKVQFDLLLQEKEDWPISLLGFLGEVHFHLPKDPLLTFTLQTAIIFPHMTSTTPLEKGIVIFTDGSANGRSVTYIQGREPIIKENTQNTAQQAEIVAVITAFEEVSQPFNLYTDSKYVTGLFPEIETATLSPRTKIYTELKHLQRLIHKRQEKFYIGHIRGHTGLPGPLAQGNAYADSLTRILTAAGKRTADGSEFEKRTADGSEFESPKKKAKVE

SEQ ID NO: 22 - protein, 2116 aa, synthetic construct
  source 1..2116: note = Description of Artificial Sequence: Synthetic polypeptide
MPAAKRVKLDGGDKKYSIGLDIGTNSVGWAVITDEYKVPSKKFKVLGNTDRHSIKKNLIGALLFDSGETAEATRLKRTARRRYTRRKNRICYLQEIFSNEMAKVDDSFFHRLEESFLVEEDKKHERHPIFGNIVDEVAYHEKYPTIYHLRKKLVDSTDKADLRLIYLALAHMIKFRGHFLIEGDLNPDNSDVDKLFIQLVQTYNQLFEENPINASGVDAKAILSARLSKSRRLENLIAQLPGEKKNGLFGNLIALSLGLTPNFKSNFDLAEDAKLQLSKDTYDDDLDNLLAQIGDQYADLFLAAKNLSDAILLSDILRVNTEITKAPLSASMIKRYDEHHQDLTLLKALVRQQLPEKYKEIFFDQSKNGYAGYIDGGASQEEFYKFIKPILEKMDGTEELLVKLNREDLLRKQRTFDNGSIPHQIHLGELHAILRRQEDFYPFLKDNREKIEKILTFRIPYYVGPLARGNSRFAWMTRKSEETITPWNFEEVVDKGASAQSFIERMTNFDKNLPNEKVLPKHSLLYEYFTVYNELTKVKYVTEGMRKPAFLSGEQKKAIVDLLFKTNRKVTVKQLKEDYFKKIECFDSVEISGVEDRFNASLGTYHDLLKIIKDKDFLDNEENEDILEDIVLTLTLFEDREMIEERLKTYAHLFDDKVMKQLKRRRYTGWGRLSRKLINGIRDKQSGKTILDFLKSDGFANRNFMQLIHDDSLTFKEDIQKAQVSGQGDSLHEHIANLAGSPAIKKGILQTVKVVDELVKVMGRHKPENIVIEMARENQTTQKGQKNSRERMKRIEEGIKELGSQILKEHPVENTQLQNEKLYLYYLQNGRDMYVDQELDINRLSDYDVDHIVPQSFLKDDSIDNKVLTRSDKARGKSDNVPSEEVVKKMKNYWRQLLNAKLITQRKFDNLTKAERGGLSELDKAGFIKRQLVETRQITKHVAQILDSRMNTKYDENDKLIREVKVITLKSKLVSDFRKDFQFYKVREINNYHHAHDAYLNAVVGTALIKKYPKLESEFVYGDYKVYDVRKMIAKSEQEIGKATAKYFFYSNIMNFFKTEITLANGEIRKRPLIETNGETGEIVWDKGRDFATVRKVLSMPQVNIVKKTEVQTGGFSKESILPKRNSDKLIARKKDWDPKKYGGFDSPTVAYSVLVVAKVEKGKSKKLKSVKELLGITIMERSSFEKNPIDFLEAKGYKEVKKDLIIKLPKYSLFELENGRKRMLASAGELQKGNELALPSKYVNFLYLASHYEKLKGSPEDNEQKQLFVEQHKHYLDEIIEQISEFSKRVILADANLDKVLSAYNKHRDKPIREQAENIIHLFTLTNLGAPAAFKYFDTTIDRKRYTSTKEVLDATLIHQSITGLYETRIDLSQLGGDGGGGSEAAAKGGGGGVQEISDSRPMLHIYLNGRRFLGLLDTGADKTCIAGRDWPANWPIHQTESSLQGLGMACGVARSSQPLRWQHEDKSGIIHPFVIPTLPFTLWGRDIMKDIKVRLMTDSPDDSQDLMIGAIESNLFADQISWKSDQPVWLNQWPLKQEKLQALQQLVTEQLQLGHLEESNSPWNTPVFVIKKKSGKWRLLQDLRAVNATMHDMGALQPGLPSPPAVPKGWEIIIIDLQDCFFNIKLHPEDCKRFAFSVPSPNFKRPYQRFQWKVLPQGMKNSPTLCQKFVDKAILTVRDKYQDSYIVHYMDDILLAHPSRSIVDEILTSMIQALNKHGLVVSTEKIQKYDNLKYLGTHIQGDSVSYQKLQIRTDKLRTLNDFQKLLGNINWIRPFLKLTTGELKPLFEILNPDSNPISTRKLTPEACKALQLMNERLSTARVKRLDLSQPWSLCILKTEYTPTACLWQDGVVEWIHLPHISPKVITPYDIFCTQLIIKGRHRSKELFSKDPDYIVVPYTKVQFDLLLQEKEDWPISLLGFLGEVHFHLPKDPLLTFTLQTAIIFPHMTSTTPLEKGIVIFTDGSANGRSVTYIQGREPIIKENTQNTAQQAEIVAVITAFEEVSQPFNLYTDSKYVTGLFPEIETATLSPRTKIYTELKHLQRLIHKRQEKFYIGHIRGHTGLPGPLAQGNAYADSLTRILTAAGKRTADGSEFEKRTADGSEFESPKKKAKVE

SEQ ID NO: 23 - protein, 2116 aa, synthetic construct
  source 1..2116: note = Description of Artificial Sequence: Synthetic polypeptide
MPAAKRVKLDGGDKKYSIGLDIGTNSVGWAVITDEYKVPSKKFKVLGNTDRHSIKKNLIGALLFDSGETAEATRLKRTARRRYTRRKNRICYLQEIFSNEMAKVDDSFFHRLEESFLVEEDKKHERHPIFGNIVDEVAYHEKYPTIYHLRKKLVDSTDKADLRLIYLALAHMIKFRGHFLIEGDLNPDNSDVDKLFIQLVQTYNQLFEENPINASGVDAKAILSARLSKSRRLENLIAQLPGEKKNGLFGNLIALSLGLTPNFKSNFDLAEDAKLQLSKDTYDDDLDNLLAQIGDQYADLFLAAKNLSDAILLSDILRVNTEITKAPLSASMIKRYDEHHQDLTLLKALVRQQLPEKYKEIFFDQSKNGYAGYIDGGASQEEFYKFIKPILEKMDGTEELLVKLNREDLLRKQRTFDNGSIPHQIHLGELHAILRRQEDFYPFLKDNREKIEKILTFRIPYYVGPLARGNSRFAWMTRKSEETITPWNFEEVVDKGASAQSFIERMTNFDKNLPNEKVLPKHSLLYEYFTVYNELTKVKYVTEGMRKPAFLSGEQKKAIVDLLFKTNRKVTVKQLKEDYFKKIECFDSVEISGVEDRFNASLGTYHDLLKIIKDKDFLDNEENEDILEDIVLTLTLFEDREMIEERLKTYAHLFDDKVMKQLKRRRYTGWGRLSRKLINGIRDKQSGKTILDFLKSDGFANRNFMQLIHDDSLTFKEDIQKAQVSGQGDSLHEHIANLAGSPAIKKGILQTVKVVDELVKVMGRHKPENIVIEMARENQTTQKGQKNSRERMKRIEEGIKELGSQILKEHPVENTQLQNEKLYLYYLQNGRDMYVDQELDINRLSDYDVDHIVPQSFLKDDSIDNKVLTRSDKARGKSDNVPSEEVVKKMKNYWRQLLNAKLITQRKFDNLTKAERGGLSELDKAGFIKRQLVETRQITKHVAQILDSRMNTKYDENDKLIREVKVITLKSKLVSDFRKDFQFYKVREINNYHHAHDAYLNAVVGTALIKKYPKLESEFVYGDYKVYDVRKMIAKSEQEIGKATAKYFFYSNIMNFFKTEITLANGEIRKRPLIETNGETGEIVWDKGRDFATVRKVLSMPQVNIVKKTEVQTGGFSKESILPKRNSDKLIARKKDWDPKKYGGFDSPTVAYSVLVVAKVEKGKSKKLKSVKELLGITIMERSSFEKNPIDFLEAKGYKEVKKDLIIKLPKYSLFELENGRKRMLASAGELQKGNELALPSKYVNFLYLASHYEKLKGSPEDNEQKQLFVEQHKHYLDEIIEQISEFSKRVILADANLDKVLSAYNKHRDKPIREQAENIIHLFTLTNLGAPAAFKYFDTTIDRKRYTSTKEVLDATLIHQSITGLYETRIDLSQLGGDGGGGGGGSEAAAKGGVQEISDSRPMLHIYLNGRRFLGLLDTGADKTCIAGRDWPANWPIHQTESSLQGLGMACGVARSSQPLRWQHEDKSGIIHPFVIPTLPFTLWGRDIMKDIKVRLMTDSPDDSQDLMIGAIESNLFADQISWKSDQPVWLNQWPLKQEKLQALQQLVTEQLQLGHLEESNSPWNTPVFVIKKKSGKWRLLQDLRAVNATMHDMGALQPGLPSPPAVPKGWEIIIIDLQDCFFNIKLHPEDCKRFAFSVPSPNFKRPYQRFQWKVLPQGMKNSPTLCQKFVDKAILTVRDKYQDSYIVHYMDDILLAHPSRSIVDEILTSMIQALNKHGLVVSTEKIQKYDNLKYLGTHIQGDSVSYQKLQIRTDKLRTLNDFQKLLGNINWIRPFLKLTTGELKPLFEILNPDSNPISTRKLTPEACKALQLMNERLSTARVKRLDLSQPWSLCILKTEYTPTACLWQDGVVEWIHLPHISPKVITPYDIFCTQLIIKGRHRSKELFSKDPDYIVVPYTKVQFDLLLQEKEDWPISLLGFLGEVHFHLPKDPLLTFTLQTAIIFPHMTSTTPLEKGIVIFTDGSANGRSVTYIQGREPIIKENTQNTAQQAEIVAVITAFEEVSQPFNLYTDSKYVTGLFPEIETATLSPRTKIYTELKHLQRLIHKRQEKFYIGHIRGHTGLPGPLAQGNAYADSLTRILTAAGKRTADGSEFEKRTADGSEFESPKKKAKVE

SEQ ID NO: 24 - protein, 2116 aa, synthetic construct
  source 1..2116: note = Description of Artificial Sequence: Synthetic polypeptide
MPAAKRVKLDGGDKKYSIGLDIGTNSVGWAVITDEYKVPSKKFKVLGNTDRHSIKKNLIGALLFDSGETAEATRLKRTARRRYTRRKNRICYLQEIFSNEMAKVDDSFFHRLEESFLVEEDKKHERHPIFGNIVDEVAYHEKYPTIYHLRKKLVDSTDKADLRLIYLALAHMIKFRGHFLIEGDLNPDNSDVDKLFIQLVQTYNQLFEENPINASGVDAKAILSARLSKSRRLENLIAQLPGEKKNGLFGNLIALSLGLTPNFKSNFDLAEDAKLQLSKDTYDDDLDNLLAQIGDQYADLFLAAKNLSDAILLSDILRVNTEITKAPLSASMIKRYDEHHQDLTLLKALVRQQLPEKYKEIFFDQSKNGYAGYIDGGASQEEFYKFIKPILEKMDGTEELLVKLNREDLLRKQRTFDNGSIPHQIHLGELHAILRRQEDFYPFLKDNREKIEKILTFRIPYYVGPLARGNSRFAWMTRKSEETITPWNFEEVVDKGASAQSFIERMTNFDKNLPNEKVLPKHSLLYEYFTVYNELTKVKYVTEGMRKPAFLSGEQKKAIVDLLFKTNRKVTVKQLKEDYFKKIECFDSVEISGVEDRFNASLGTYHDLLKIIKDKDFLDNEENEDILEDIVLTLTLFEDREMIEERLKTYAHLFDDKVMKQLKRRRYTGWGRLSRKLINGIRDKQSGKTILDFLKSDGFANRNFMQLIHDDSLTFKEDIQKAQVSGQGDSLHEHIANLAGSPAIKKGILQTVKVVDELVKVMGRHKPENIVIEMARENQTTQKGQKNSRERMKRIEEGIKELGSQILKEHPVENTQLQNEKLYLYYLQNGRDMYVDQELDINRLSDYDVDHIVPQSFLKDDSIDNKVLTRSDKARGKSDNVPSEEVVKKMKNYWRQLLNAKLITQRKFDNLTKAERGGLSELDKAGFIKRQLVETRQITKHVAQILDSRMNTKYDENDKLIREVKVITLKSKLVSDFRKDFQFYKVREINNYHHAHDAYLNAVVGTALIKKYPKLESEFVYGDYKVYDVRKMIAKSEQEIGKATAKYFFYSNIMNFFKTEITLANGEIRKRPLIETNGETGEIVWDKGRDFATVRKVLSMPQVNIVKKTEVQTGGFSKESILPKRNSDKLIARKKDWDPKKYGGFDSPTVAYSVLVVAKVEKGKSKKLKSVKELLGITIMERSSFEKNPIDFLEAKGYKEVKKDLIIKLPKYSLFELENGRKRMLASAGELQKGNELALPSKYVNFLYLASHYEKLKGSPEDNEQKQLFVEQHKHYLDEIIEQISEFSKRVILADANLDKVLSAYNKHRDKPIREQAENIIHLFTLTNLGAPAAFKYFDTTIDRKRYTSTKEVLDATLIHQSITGLYETRIDLSQLGGDGGPAPEAAAKGSSGGVQEISDSRPMLHIYLNGRRFLGLLDTGADKTCIAGRDWPANWPIHQTESSLQGLGMACGVARSSQPLRWQHEDKSGIIHPFVIPTLPFTLWGRDIMKDIKVRLMTDSPDDSQDLMIGAIESNLFADQISWKSDQPVWLNQWPLKQEKLQALQQLVTEQLQLGHLEESNSPWNTPVFVIKKKSGKWRLLQDLRAVNATMHDMGALQPGLPSPPAVPKGWEIIIIDLQDCFFNIKLHPEDCKRFAFSVPSPNFKRPYQRFQWKVLPQGMKNSPTLCQKFVDKAILTVRDKYQDSYIVHYMDDILLAHPSRSIVDEILTSMIQALNKHGLVVSTEKIQKYDNLKYLGTHIQGDSVSYQKLQIRTDKLRTLNDFQKLLGNINWIRPFLKLTTGELKPLFEILNPDSNPISTRKLTPEACKALQLMNERLSTARVKRLDLSQPWSLCILKTEYTPTACLWQDGVVEWIHLPHISPKVITPYDIFCTQLIIKGRHRSKELFSKDPDYIVVPYTKVQFDLLLQEKEDWPISLLGFLGEVHFHLPKDPLLTFTLQTAIIFPHMTSTTPLEKGIVIFTDGSANGRSVTYIQGREPIIKENTQNTAQQAEIVAVITAFEEVSQPFNLYTDSKYVTGLFPEIETATLSPRTKIYTELKHLQRLIHKRQEKFYIGHIRGHTGLPGPLAQGNAYADSLTRILTAAGKRTADGSEFEKRTADGSEFESPKKKAKVE

SEQ ID NO: 25 - protein, 2116 aa, synthetic construct
  source 1..2116: note = Description of Artificial Sequence: Synthetic polypeptide
MPAAKRVKLDGGDKKYSIGLDIGTNSVGWAVITDEYKVPSKKFKVLGNTDRHSIKKNLIGALLFDSGETAEATRLKRTARRRYTRRKNRICYLQEIFSNEMAKVDDSFFHRLEESFLVEEDKKHERHPIFGNIVDEVAYHEKYPTIYHLRKKLVDSTDKADLRLIYLALAHMIKFRGHFLIEGDLNPDNSDVDKLFIQLVQTYNQLFEENPINASGVDAKAILSARLSKSRRLENLIAQLPGEKKNGLFGNLIALSLGLTPNFKSNFDLAEDAKLQLSKDTYDDDLDNLLAQIGDQYADLFLAAKNLSDAILLSDILRVNTEITKAPLSASMIKRYDEHHQDLTLLKALVRQQLPEKYKEIFFDQSKNGYAGYIDGGASQEEFYKFIKPILEKMDGTEELLVKLNREDLLRKQRTFDNGSIPHQIHLGELHAILRRQEDFYPFLKDNREKIEKILTFRIPYYVGPLARGNSRFAWMTRKSEETITPWNFEEVVDKGASAQSFIERMTNFDKNLPNEKVLPKHSLLYEYFTVYNELTKVKYVTEGMRKPAFLSGEQKKAIVDLLFKTNRKVTVKQLKEDYFKKIECFDSVEISGVEDRFNASLGTYHDLLKIIKDKDFLDNEENEDILEDIVLTLTLFEDREMIEERLKTYAHLFDDKVMKQLKRRRYTGWGRLSRKLINGIRDKQSGKTILDFLKSDGFANRNFMQLIHDDSLTFKEDIQKAQVSGQGDSLHEHIANLAGSPAIKKGILQTVKVVDELVKVMGRHKPENIVIEMARENQTTQKGQKNSRERMKRIEEGIKELGSQILKEHPVENTQLQNEKLYLYYLQNGRDMYVDQELDINRLSDYDVDHIVPQSFLKDDSIDNKVLTRSDKARGKSDNVPSEEVVKKMKNYWRQLLNAKLITQRKFDNLTKAERGGLSELDKAGFIKRQLVETRQITKHVAQILDSRMNTKYDENDKLIREVKVITLKSKLVSDFRKDFQFYKVREINNYHHAHDAYLNAVVGTALIKKYPKLESEFVYGDYKVYDVRKMIAKSEQEIGKATAKYFFYSNIMNFFKTEITLANGEIRKRPLIETNGETGEIVWDKGRDFATVRKVLSMPQVNIVKKTEVQTGGFSKESILPKRNSDKLIARKKDWDPKKYGGFDSPTVAYSVLVVAKVEKGKSKKLKSVKELLGITIMERSSFEKNPIDFLEAKGYKEVKKDLIIKLPKYSLFELENGRKRMLASAGELQKGNELALPSKYVNFLYLASHYEKLKGSPEDNEQKQLFVEQHKHYLDEIIEQISEFSKRVILADANLDKVLSAYNKHRDKPIREQAENIIHLFTLTNLGAPAAFKYFDTTIDRKRYTSTKEVLDATLIHQSITGLYETRIDLSQLGGDGGGGSGSSEAAAKGGVQEISDSRPMLHIYLNGRRFLGLLDTGADKTCIAGRDWPANWPIHQTESSLQGLGMACGVARSSQPLRWQHEDKSGIIHPFVIPTLPFTLWGRDIMKDIKVRLMTDSPDDSQDLMIGAIESNLFADQISWKSDQPVWLNQWPLKQEKLQALQQLVTEQLQLGHLEESNSPWNTPVFVIKKKSGKWRLLQDLRAVNATMHDMGALQPGLPSPPAVPKGWEIIIIDLQDCFFNIKLHPEDCKRFAFSVPSPNFKRPYQRFQWKVLPQGMKNSPTLCQKFVDKAILTVRDKYQDSYIVHYMDDILLAHPSRSIVDEILTSMIQALNKHGLVVSTEKIQKYDNLKYLGTHIQGDSVSYQKLQIRTDKLRTLNDFQKLLGNINWIRPFLKLTTGELKPLFEILNPDSNPISTRKLTPEACKALQLMNERLSTARVKRLDLSQPWSLCILKTEYTPTACLWQDGVVEWIHLPHISPKVITPYDIFCTQLIIKGRHRSKELFSKDPDYIVVPYTKVQFDLLLQEKEDWPISLLGFLGEVHFHLPKDPLLTFTLQTAIIFPHMTSTTPLEKGIVIFTDGSANGRSVTYIQGREPIIKENTQNTAQQAEIVAVITAFEEVSQPFNLYTDSKYVTGLFPEIETATLSPRTKIYTELKHLQRLIHKRQEKFYIGHIRGHTGLPGPLAQGNAYADSLTRILTAAGKRTADGSEFEKRTADGSEFESPKKKAKVE

SEQ ID NO: 26 - protein, 2116 aa, synthetic construct
  source 1..2116: note = Description of Artificial Sequence: Synthetic polypeptide
MPAAKRVKLDGGDKKYSIGLDIGTNSVGWAVITDEYKVPSKKFKVLGNTDRHSIKKNLIGALLFDSGETAEATRLKRTARRRYTRRKNRICYLQEIFSNEMAKVDDSFFHRLEESFLVEEDKKHERHPIFGNIVDEVAYHEKYPTIYHLRKKLVDSTDKADLRLIYLALAHMIKFRGHFLIEGDLNPDNSDVDKLFIQLVQTYNQLFEENPINASGVDAKAILSARLSKSRRLENLIAQLPGEKKNGLFGNLIALSLGLTPNFKSNFDLAEDAKLQLSKDTYDDDLDNLLAQIGDQYADLFLAAKNLSDAILLSDILRVNTEITKAPLSASMIKRYDEHHQDLTLLKALVRQQLPEKYKEIFFDQSKNGYAGYIDGGASQEEFYKFIKPILEKMDGTEELLVKLNREDLLRKQRTFDNGSIPHQIHLGELHAILRRQEDFYPFLKDNREKIEKILTFRIPYYVGPLARGNSRFAWMTRKSEETITPWNFEEVVDKGASAQSFIERMTNFDKNLPNEKVLPKHSLLYEYFTVYNELTKVKYVTEGMRKPAFLSGEQKKAIVDLLFKTNRKVTVKQLKEDYFKKIECFDSVEISGVEDRFNASLGTYHDLLKIIKDKDFLDNEENEDILEDIVLTLTLFEDREMIEERLKTYAHLFDDKVMKQLKRRRYTGWGRLSRKLINGIRDKQSGKTILDFLKSDGFANRNFMQLIHDDSLTFKEDIQKAQVSGQGDSLHEHIANLAGSPAIKKGILQTVKVVDELVKVMGRHKPENIVIEMARENQTTQKGQKNSRERMKRIEEGIKELGSQILKEHPVENTQLQNEKLYLYYLQNGRDMYVDQELDINRLSDYDVDHIVPQSFLKDDSIDNKVLTRSDKARGKSDNVPSEEVVKKMKNYWRQLLNAKLITQRKFDNLTKAERGGLSELDKAGFIKRQLVETRQITKHVAQILDSRMNTKYDENDKLIREVKVITLKSKLVSDFRKDFQFYKVREINNYHHAHDAYLNAVVGTALIKKYPKLESEFVYGDYKVYDVRKMIAKSEQEIGKATAKYFFYSNIMNFFKTEITLANGEIRKRPLIETNGETGEIVWDKGRDFATVRKVLSMPQVNIVKKTEVQTGGFSKESILPKRNSDKLIARKKDWDPKKYGGFDSPTVAYSVLVVAKVEKGKSKKLKSVKELLGITIMERSSFEKNPIDFLEAKGYKEVKKDLIIKLPKYSLFELENGRKRMLASAGELQKGNELALPSKYVNFLYLASHYEKLKGSPEDNEQKQLFVEQHKHYLDEIIEQISEFSKRVILADANLDKVLSAYNKHRDKPIREQAENIIHLFTLTNLGAPAAFKYFDTTIDRKRYTSTKEVLDATLIHQSITGLYETRIDLSQLGGDGGEAAAKGGSGSSGGVQEISDSRPMLHIYLNGRRFLGLLDTGADKTCIAGRDWPANWPIHQTESSLQGLGMACGVARSSQPLRWQHEDKSGIIHPFVIPTLPFTLWGRDIMKDIKVRLMTDSPDDSQDLMIGAIESNLFADQISWKSDQPVWLNQWPLKQEKLQALQQLVTEQLQLGHLEESNSPWNTPVFVIKKKSGKWRLLQDLRAVNATMHDMGALQPGLPSPVAVPKGWEIIIIDLQDCFFNIKLHPEDCKRFAFSVPSPNFKRPYQRFQWKVLPQGMKNSPTLCQKFVDKAILTVRDKYQDSYIVHYMDDILLAHPSRSIVDEILTSMIQALNKHGLVVSTEKIQKYDNLKYLGTHIQGDSVSYQKLQIRTDKLRTLNDFQKLLGNINWIRPFLKLTTGELKPLFEILNPDSNPISTRKLTPEACKALQLMNERLSTARVKRLDLSQPWSLCILKTEYTPTACLWQDGVVEWIHLPHISPKVITPYDIFCTQLIIKGRHRSKELFSKDPDYIVVPYTKVQFDLLLQEKEDWPISLLGFLGEVHFHLPKDPLLTFTLQTAIIFPHMTSTTPLEKGIVIFTDGSANGRSVTYIQGREPIIKENTQNTAQQAEIVAVITAFEEVSQPFNLYTDSKYVTGLFPEIETATLSPRTKIYTELKHLQRLIHKRQEKFYIGHIRGHTGLPGPLAQGNAYADSLTRILTAAGKRTADGSEFEKRTADGSEFESPKKKAKVE

SEQ ID NO: 27 - protein, 2116 aa, synthetic construct
  source 1..2116: note = Description of Artificial Sequence: Synthetic polypeptide
MPAAKRVKLDGGDKKYSIGLDIGTNSVGWAVITDEYKVPSKKFKVLGNTDRHSIKKNLIGALLFDSGETAEATRLKRTARRRYTRRKNRICYLQEIFSNEMAKVDDSFFHRLEESFLVEEDKKHERHPIFGNIVDEVAYHEKYPTIYHLRKKLVDSTDKADLRLIYLALAHMIKFRGHFLIEGDLNPDNSDVDKLFIQLVQTYNQLFEENPINASGVDAKAILSARLSKSRRLENLIAQLPGEKKNGLFGNLIALSLGLTPNFKSNFDLAEDAKLQLSKDTYDDDLDNLLAQIGDQYADLFLAAKNLSDAILLSDILRVNTEITKAPLSASMIKRYDEHHQDLTLLKALVRQQLPEKYKEIFFDQSKNGYAGYIDGGASQEEFYKFIKPILEKMDGTEELLVKLNREDLLRKQRTFDNGSIPHQIHLGELHAILRRQEDFYPFLKDNREKIEKILTFRIPYYVGPLARGNSRFAWMTRKSEETITPWNFEEVVDKGASAQSFIERMTNFDKNLPNEKVLPKHSLLYEYFTVYNELTKVKYVTEGMRKPAFLSGEQKKAIVDLLFKTNRKVTVKQLKEDYFKKIECFDSVEISGVEDRFNASLGTYHDLLKIIKDKDFLDNEENEDILEDIVLTLTLFEDREMIEERLKTYAHLFDDKVMKQLKRRRYTGWGRLSRKLINGIRDKQSGKTILDFLKSDGFANRNFMQLIHDDSLTFKEDIQKAQVSGQGDSLHEHIANLAGSPAIKKGILQTVKVVDELVKVMGRHKPENIVIEMARENQTTQKGQKNSRERMKRIEEGIKELGSQILKEHPVENTQLQNEKLYLYYLQNGRDMYVDQELDINRLSDYDVDHIVPQSFLKDDSIDNKVLTRSDKARGKSDNVPSEEVVKKMKNYWRQLLNAKLITQRKFDNLTKAERGGLSELDKAGFIKRQLVETRQITKHVAQILDSRMNTKYDENDKLIREVKVITLKSKLVSDFRKDFQFYKVREINNYHHAHDAYLNAVVGTALIKKYPKLESEFVYGDYKVYDVRKMIAKSEQEIGKATAKYFFYSNIMNFFKTEITLANGEIRKRPLIETNGETGEIVWDKGRDFATVRKVLSMPQVNIVKKTEVQTGGFSKESILPKRNSDKLIARKKDWDPKKYGGFDSPTVAYSVLVVAKVEKGKSKKLKSVKELLGITIMERSSFEKNPIDFLEAKGYKEVKKDLIIKLPKYSLFELENGRKRMLASAGELQKGNELALPSKYVNFLYLASHYEKLKGSPEDNEQKQLFVEQHKHYLDEIIEQISEFSKRVILADANLDKVLSAYNKHRDKPIREQAENIIHLFTLTNLGAPAAFKYFDTTIDRKRYTSTKEVLDATLIHQSITGLYETRIDLSQLGGDGGEAAAKGGGGGSGGVQEISDSRPMLHIYLNGRRFLGLLDTGADKTCIAGRDWPANWPIHQTESSLQGLGMACGVARSSQPLRWQHEDKSGIIHPFVIPTLPFTLWGRDIMKDIKVRLMTDSPDDSQDLMIGAIESNLFADQISWKSDQPVWLNQWPLKQEKLQALQQLVTEQLQLGHLEESNSPWNTPVFVIKKKSGKWRLLQDLRAVNATMHDMGALQPGLPSPVAVPKGWEIIIIDLQDCFFNIKLHPEDCKRFAFSVPSPNFKRPYQRFQWKVLPQGMKNSPTLCQKFVDKAILTVRDKYQDSYIVHYMDDILLAHPSRSIVDEILTSMIQALNKHGLVVSTEKIQKYDNLKYLGTHIQGDSVSYQKLQIRTDKLRTLNDFQKLLGNINWIRPFLKLTTGELKPLFEILNPDSNPISTRKLTPEACKALQLMNERLSTARVKRLDLSQPWSLCILKTEYTPTACLWQDGVVEWIHLPHISPKVITPYDIFCTQLIIKGRHRSKELFSKDPDYIVVPYTKVQFDLLLQEKEDWPISLLGFLGEVHFHLPKDPLLTFTLQTAIIFPHMTSTTPLEKGIVIFTDGSANGRSVTYIQGREPIIKENTQNTAQQAEIVAVITAFEEVSQPFNLYTDSKYVTGLFPEIETATLSPRTKIYTELKHLQRLIHKRQEKFYIGHIRGHTGLPGPLAQGNAYADSLTRILTAAGKRTADGSEFEKRTADGSEFESPKKKAKVE

SEQ ID NO: 28 - protein, 2116 aa, synthetic construct
  source 1..2116: note = Description of Artificial Sequence: Synthetic polypeptide
MPAAKRVKLDGGDKKYSIGLDIGTNSVGWAVITDEYKVPSKKFKVLGNTDRHSIKKNLIGALLFDSGETAEATRLKRTARRRYTRRKNRICYLQEIFSNEMAKVDDSFFHRLEESFLVEEDKKHERHPIFGNIVDEVAYHEKYPTIYHLRKKLVDSTDKADLRLIYLALAHMIKFRGHFLIEGDLNPDNSDVDKLFIQLVQTYNQLFEENPINASGVDAKAILSARLSKSRRLENLIAQLPGEKKNGLFGNLIALSLGLTPNFKSNFDLAEDAKLQLSKDTYDDDLDNLLAQIGDQYADLFLAAKNLSDAILLSDILRVNTEITKAPLSASMIKRYDEHHQDLTLLKALVRQQLPEKYKEIFFDQSKNGYAGYIDGGASQEEFYKFIKPILEKMDGTEELLVKLNREDLLRKQRTFDNGSIPHQIHLGELHAILRRQEDFYPFLKDNREKIEKILTFRIPYYVGPLARGNSRFAWMTRKSEETITPWNFEEVVDKGASAQSFIERMTNFDKNLPNEKVLPKHSLLYEYFTVYNELTKVKYVTEGMRKPAFLSGEQKKAIVDLLFKTNRKVTVKQLKEDYFKKIECFDSVEISGVEDRFNASLGTYHDLLKIIKDKDFLDNEENEDILEDIVLTLTLFEDREMIEERLKTYAHLFDDKVMKQLKRRRYTGWGRLSRKLINGIRDKQSGKTILDFLKSDGFANRNFMQLIHDDSLTFKEDIQKAQVSGQGDSLHEHIANLAGSPAIKKGILQTVKVVDELVKVMGRHKPENIVIEMARENQTTQKGQKNSRERMKRIEEGIKELGSQILKEHPVENTQLQNEKLYLYYLQNGRDMYVDQELDINRLSDYDVDHIVPQSFLKDDSIDNKVLTRSDKARGKSDNVPSEEVVKKMKNYWRQLLNAKLITQRKFDNLTKAERGGLSELDKAGFIKRQLVETRQITKHVAQILDSRMNTKYDENDKLIREVKVITLKSKLVSDFRKDFQFYKVREINNYHHAHDAYLNAVVGTALIKKYPKLESEFVYGDYKVYDVRKMIAKSEQEIGKATAKYFFYSNIMNFFKTEITLANGEIRKRPLIETNGETGEIVWDKGRDFATVRKVLSMPQVNIVKKTEVQTGGFSKESILPKRNSDKLIARKKDWDPKKYGGFDSPTVAYSVLVVAKVEKGKSKKLKSVKELLGITIMERSSFEKNPIDFLEAKGYKEVKKDLIIKLPKYSLFELENGRKRMLASAGELQKGNELALPSKYVNFLYLASHYEKLKGSPEDNEQKQLFVEQHKHYLDEIIEQISEFSKRVILADANLDKVLSAYNKHRDKPIREQAENIIHLFTLTNLGAPAAFKYFDTTIDRKRYTSTKEVLDATLIHQSITGLYETRIDLSQLGGDGGEAAAKPAPGGSGGVQEISDSRPMLHIYLNGRRFLGLLDTGADKTCIAGRDWPANWPIHQTESSLQGLGMACGVARSSQPLRWQHEDKSGIIHPFVIPTLPFTLWGRDIMKDIKVRLMTDSPDDSQDLMIGAIESNLFADQISWKSDQPVWLNQWPLKQEKLQALQQLVTEQLQLGHLEESNSPWNTPVFVIKKKSGKWRLLQDLRAVNATMHDMGALQPGLPSPVAVPKGWEIIIIDLQDCFFNIKLHPEDCKRFAFSVPSPNFKRPYQRFQWKVLPQGMKNSPTLCQKFVDKAILTVRDKYQDSYIVHYMDDILLAHPSRSIVDEILTSMIQALNKHGLVVSTEKIQKYDNLKYLGTHIQGDSVSYQKLQIRTDKLRTLNDFQKLLGNINWIRPFLKLTTGELKPLFEILNPDSNPISTRKLTPEACKALQLMNERLSTARVKRLDLSQPWSLCILKTEYTPTACLWQDGVVEWIHLPHISPKVITPYDIFCTQLIIKGRHRSKELFSKDPDYIVVPYTKVQFDLLLQEKEDWPISLLGFLGEVHFHLPKDPLLTFTLQTAIIFPHMTSTTPLEKGIVIFTDGSANGRSVTYIQGREPIIKENTQNTAQQAEIVAVITAFEEVSQPFNLYTDSKYVTGLFPEIETATLSPRTKIYTELKHLQRLIHKRQEKFYIGHIRGHTGLPGPLAQGNAYADSLTRILTAAGKRTADGSEFEKRTADGSEFESPKKKAKVE

SEQ ID NO: 29 - protein, 2113 aa, synthetic construct
  source 1..2113: note = Description of Artificial Sequence: Synthetic polypeptide
MPAAKRVKLDGGDKKYSIGLDIGTNSVGWAVITDEYKVPSKKFKVLGNTDRHSIKKNLIGALLFDSGETAEATRLKRTARRRYTRRKNRICYLQEIFSNEMAKVDDSFFHRLEESFLVEEDKKHERHPIFGNIVDEVAYHEKYPTIYHLRKKLVDSTDKADLRLIYLALAHMIKFRGHFLIEGDLNPDNSDVDKLFIQLVQTYNQLFEENPINASGVDAKAILSARLSKSRRLENLIAQLPGEKKNGLFGNLIALSLGLTPNFKSNFDLAEDAKLQLSKDTYDDDLDNLLAQIGDQYADLFLAAKNLSDAILLSDILRVNTEITKAPLSASMIKRYDEHHQDLTLLKALVRQQLPEKYKEIFFDQSKNGYAGYIDGGASQEEFYKFIKPILEKMDGTEELLVKLNREDLLRKQRTFDNGSIPHQIHLGELHAILRRQEDFYPFLKDNREKIEKILTFRIPYYVGPLARGNSRFAWMTRKSEETITPWNFEEVVDKGASAQSFIERMTNFDKNLPNEKVLPKHSLLYEYFTVYNELTKVKYVTEGMRKPAFLSGEQKKAIVDLLFKTNRKVTVKQLKEDYFKKIECFDSVEISGVEDRFNASLGTYHDLLKIIKDKDFLDNEENEDILEDIVLTLTLFEDREMIEERLKTYAHLFDDKVMKQLKRRRYTGWGRLSRKLINGIRDKQSGKTILDFLKSDGFANRNFMQLIHDDSLTFKEDIQKAQVSGQGDSLHEHIANLAGSPAIKKGILQTVKVVDELVKVMGRHKPENIVIEMARENQTTQKGQKNSRERMKRIEEGIKELGSQILKEHPVENTQLQNEKLYLYYLQNGRDMYVDQELDINRLSDYDVDHIVPQSFLKDDSIDNKVLTRSDKARGKSDNVPSEEVVKKMKNYWRQLLNAKLITQRKFDNLTKAERGGLSELDKAGFIKRQLVETRQITKHVAQILDSRMNTKYDENDKLIREVKVITLKSKLVSDFRKDFQFYKVREINNYHHAHDAYLNAVVGTALIKKYPKLESEFVYGDYKVYDVRKMIAKSEQEIGKATAKYFFYSNIMNFFKTEITLANGEIRKRPLIETNGETGEIVWDKGRDFATVRKVLSMPQVNIVKKTEVQTGGFSKESILPKRNSDKLIARKKDWDPKKYGGFDSPTVAYSVLVVAKVEKGKSKKLKSVKELLGITIMERSSFEKNPIDFLEAKGYKEVKKDLIIKLPKYSLFELENGRKRMLASAGELQKGNELALPSKYVNFLYLASHYEKLKGSPEDNEQKQLFVEQHKHYLDEIIEQISEFSKRVILADANLDKVLSAYNKHRDKPIREQAENIIHLFTLTNLGAPAAFKYFDTTIDRKRYTSTKEVLDATLIHQSITGLYETRIDLSQLGGDGGGGSEAAAKGGVQEISDSRPMLHIYLNGRRFLGLLDTGADKTCIAGRDWPANWPIHQTESSLQGLGMACGVARSSQPLRWQHEDKSGIIHPFVIPTLPFTLWGRDIMKDIKVRLMTDSPDDSQDLMIGAIESNLFADQISWKSDQPVWLNQWPLKQEKLQALQQLVTEQLQLGHLEESNSPWNTPVFVIKKKSGKWRLLQDLRAVNATMHDMGALQPGLPSPVAVPKGWEIIIIDLQDCFFNIKLHPEDCKRFAFSVPSPNFKRPYQRFQWKVLPQGMKNSPTLCQKFVDKAILTVRDKYQDSYIVHYMDDILLAHPSRSIVDEILTSMIQALNKHGLVVSTEKIQKYDNLKYLGTHIQGDSVSYQKLQIRTDKLRTLNDFQKLLGNINWIRPFLKLTTGELKPLFEILNPDSNPISTRKLTPEACKALQLMNERLSTARVKRLDLSQPWSLCILKTEYTPTACLWQDGVVEWIHLPHISPKVITPYDIFCTQLIIKGRHRSKELFSKDPDYIVVPYTKVQFDLLLQEKEDWPISLLGFLGEVHFHLPKDPLLTFTLQTAIIFPHMTSTTPLEKGIVIFTDGSANGRSVTYIQGREPIIKENTQNTAQQAEIVAVITAFEEVSQPFNLYTDSKYVTGLFPEIETATLSPRTKIYTELKHLQRLIHKRQEKFYIGHIRGHTGLPGPLAQGNAYADSLTRILTAAGKRTADGSEFEKRTADGSEFESPKKKAKVE

SEQ ID NO: 30 - protein, 2111 aa, synthetic construct
  source 1..2111: note = Description of Artificial Sequence: Synthetic polypeptide
MPAAKRVKLDGGDKKYSIGLDIGTNSVGWAVITDEYKVPSKKFKVLGNTDRHSIKKNLIGALLFDSGETAEATRLKRTARRRYTRRKNRICYLQEIFSNEMAKVDDSFFHRLEESFLVEEDKKHERHPIFGNIVDEVAYHEKYPTIYHLRKKLVDSTDKADLRLIYLALAHMIKFRGHFLIEGDLNPDNSDVDKLFIQLVQTYNQLFEENPINASGVDAKAILSARLSKSRRLENLIAQLPGEKKNGLFGNLIALSLGLTPNFKSNFDLAEDAKLQLSKDTYDDDLDNLLAQIGDQYADLFLAAKNLSDAILLSDILRVNTEITKAPLSASMIKRYDEHHQDLTLLKALVRQQLPEKYKEIFFDQSKNGYAGYIDGGASQEEFYKFIKPILEKMDGTEELLVKLNREDLLRKQRTFDNGSIPHQIHLGELHAILRRQEDFYPFLKDNREKIEKILTFRIPYYVGPLARGNSRFAWMTRKSEETITPWNFEEVVDKGASAQSFIERMTNFDKNLPNEKVLPKHSLLYEYFTVYNELTKVKYVTEGMRKPAFLSGEQKKAIVDLLFKTNRKVTVKQLKEDYFKKIECFDSVEISGVEDRFNASLGTYHDLLKIIKDKDFLDNEENEDILEDIVLTLTLFEDREMIEERLKTYAHLFDDKVMKQLKRRRYTGWGRLSRKLINGIRDKQSGKTILDFLKSDGFANRNFMQLIHDDSLTFKEDIQKAQVSGQGDSLHEHIANLAGSPAIKKGILQTVKVVDELVKVMGRHKPENIVIEMARENQTTQKGQKNSRERMKRIEEGIKELGSQILKEHPVENTQLQNEKLYLYYLQNGRDMYVDQELDINRLSDYDVDHIVPQSFLKDDSIDNKVLTRSDKARGKSDNVPSEEVVKKMKNYWRQLLNAKLITQRKFDNLTKAERGGLSELDKAGFIKRQLVETRQITKHVAQILDSRMNTKYDENDKLIREVKVITLKSKLVSDFRKDFQFYKVREINNYHHAHDAYLNAVVGTALIKKYPKLESEFVYGDYKVYDVRKMIAKSEQEIGKATAKYFFYSNIMNFFKTEITLANGEIRKRPLIETNGETGEIVWDKGRDFATVRKVLSMPQVNIVKKTEVQTGGFSKESILPKRNSDKLIARKKDWDPKKYGGFDSPTVAYSVLVVAKVEKGKSKKLKSVKELLGITIMERSSFEKNPIDFLEAKGYKEVKKDLIIKLPKYSLFELENGRKRMLASAGELQKGNELALPSKYVNFLYLASHYEKLKGSPEDNEQKQLFVEQHKHYLDEIIEQISEFSKRVILADANLDKVLSAYNKHRDKPIREQAENIIHLFTLTNLGAPAAFKYFDTTIDRKRYTSTKEVLDATLIHQSITGLYETRIDLSQLGGDGGGSSGGGGGVQEISDSRPMLHIYLNGRRFLGLLDTGADKTCIAGRDWPANWPIHQTESSLQGLGMACGVARSSQPLRWQHEDKSGIIHPFVIPTLPFTLWGRDIMKDIKVRLMTDSPDDSQDLMIGAIESNLFADQISWKSDQPVWLNQWPLKQEKLQALQQLVTEQLQLGHLEESNSPWNTPVFVIKKKSGKWRLLQDLRAVNATMHDMGALQPGLPSPVAVPKGWEIIIIDLQDCFFNIKLHPEDCKRFAFSVPSPNFKRPYQRFQWKVLPQGMKNSPTLCQKFVDKAILTVRDKYQDSYIVHYMDDILLAHPSRSIVDEILTSMIQALNKHGLVVSTEKIQKYDNLKYLGTHIQGDSVSYQKLQIRTDKLRTLNDFQKLLGNINWIRPFLKLTTGELKPLFEILNPDSNPISTRKLTPEACKALQLMNERLSTARVKRLDLSQPWSLCILKTEYTPTACLWQDGVVEWIHLPHISPKVITPYDIFCTQLIIKGRHRSKELFSKDPDYIVVPYTKVQFDLLLQEKEDWPISLLGFLGEVHFHLPKDPLLTFTLQTAIIFPHMTSTTPLEKGIVIFTDGSANGRSVTYIQGREPIIKENTQNTAQQAEIVAVITAFEEVSQPFNLYTDSKYVTGLFPEIETATLSPRTKIYTELKHLQRLIHKRQEKFYIGHIRGHTGLPGPLAQGNAYADSLTRILTAAGKRTADGSEFEKRTADGSEFESPKKKAKVE

SEQ ID NO: 31 - protein, 2114 aa, synthetic construct
  source 1..2114: note = Description of Artificial Sequence: Synthetic polypeptide
MPAAKRVKLDGGDKKYSIGLDIGTNSVGWAVITDEYKVPSKKFKVLGNTDRHSIKKNLIGALLFDSGETAEATRLKRTARRRYTRRKNRICYLQEIFSNEMAKVDDSFFHRLEESFLVEEDKKHERHPIFGNIVDEVAYHEKYPTIYHLRKKLVDSTDKADLRLIYLALAHMIKFRGHFLIEGDLNPDNSDVDKLFIQLVQTYNQLFEENPINASGVDAKAILSARLSKSRRLENLIAQLPGEKKNGLFGNLIALSLGLTPNFKSNFDLAEDAKLQLSKDTYDDDLDNLLAQIGDQYADLFLAAKNLSDAILLSDILRVNTEITKAPLSASMIKRYDEHHQDLTLLKALVRQQLPEKYKEIFFDQSKNGYAGYIDGGASQEEFYKFIKPILEKMDGTEELLVKLNREDLLRKQRTFDNGSIPHQIHLGELHAILRRQEDFYPFLKDNREKIEKILTFRIPYYVGPLARGNSRFAWMTRKSEETITPWNFEEVVDKGASAQSFIERMTNFDKNLPNEKVLPKHSLLYEYFTVYNELTKVKYVTEGMRKPAFLSGEQKKAIVDLLFKTNRKVTVKQLKEDYFKKIECFDSVEISGVEDRFNASLGTYHDLLKIIKDKDFLDNEENEDILEDIVLTLTLFEDREMIEERLKTYAHLFDDKVMKQLKRRRYTGWGRLSRKLINGIRDKQSGKTILDFLKSDGFANRNFMQLIHDDSLTFKEDIQKAQVSGQGDSLHEHIANLAGSPAIKKGILQTVKVVDELVKVMGRHKPENIVIEMARENQTTQKGQKNSRERMKRIEEGIKELGSQILKEHPVENTQLQNEKLYLYYLQNGRDMYVDQELDINRLSDYDVDHIVPQSFLKDDSIDNKVLTRSDKARGKSDNVPSEEVVKKMKNYWRQLLNAKLITQRKFDNLTKAERGGLSELDKAGFIKRQLVETRQITKHVAQILDSRMNTKYDENDKLIREVKVITLKSKLVSDFRKDFQFYKVREINNYHHAHDAYLNAVVGTALIKKYPKLESEFVYGDYKVYDVRKMIAKSEQEIGKATAKYFFYSNIMNFFKTEITLANGEIRKRPLIETNGETGEIVWDKGRDFATVRKVLSMPQVNIVKKTEVQTGGFSKESILPKRNSDKLIARKKDWDPKKYGGFDSPTVAYSVLVVAKVEKGKSKKLKSVKELLGITIMERSSFEKNPIDFLEAKGYKEVKKDLIIKLPKYSLFELENGRKRMLASAGELQKGNELALPSKYVNFLYLASHYEKLKGSPEDNEQKQLFVEQHKHYLDEIIEQISEFSKRVILADANLDKVLSAYNKHRDKPIREQAENIIHLFTLTNLGAPAAFKYFDTTIDRKRYTSTKEVLDATLIHQSITGLYETRIDLSQLGGDGGGGGPAPGSSGGVQEISDSRPMLHIYLNGRRFLGLLDTGADKTCIAGRDWPANWPIHQTESSLQGLGMACGVARSSQPLRWQHEDKSGIIHPFVIPTLPFTLWGRDIMKDIKVRLMTDSPDDSQDLMIGAIESNLFADQISWKSDQPVWLNQWPLKQEKLQALQQLVTEQLQLGHLEESNSPWNTPVFVIKKKSGKWRLLQDLRAVNATMHDMGALQPGLPSPVAVPKGWEIIIIDLQDCFFNIKLHPEDCKRFAFSVPSPNFKRPYQRFQWKVLPQGMKNSPTLCQKFVDKAILTVRDKYQDSYIVHYMDDILLAHPSRSIVDEILTSMIQALNKHGLVVSTEKIQKYDNLKYLGTHIQGDSVSYQKLQIRTDKLRTLNDFQKLLGNINWIRPFLKLTTGELKPLFEILNPDSNPISTRKLTPEACKALQLMNERLSTARVKRLDLSQPWSLCILKTEYTPTACLWQDGVVEWIHLPHISPKVITPYDIFCTQLIIKGRHRSKELFSKDPDYIVVPYTKVQFDLLLQEKEDWPISLLGFLGEVHFHLPKDPLLTFTLQTAIIFPHMTSTTPLEKGIVIFTDGSANGRSVTYIQGREPIIKENTQNTAQQAEIVAVITAFEEVSQPFNLYTDSKYVTGLFPEIETATLSPRTKIYTELKHLQRLIHKRQEKFYIGHIRGHTGLPGPLAQGNAYADSLTRILTAAGKRTADGSEFEKRTADGSEFESPKKKAKVE

SEQ ID NO: 32 - protein, 2010 aa, synthetic construct
  source 1..2010: note = Description of Artificial Sequence: Synthetic polypeptide
MPAAKRVKLDGGDKKYSIGLDIGTNSVGWAVITDEYKVPSKKFKVLGNTDRHSIKKNLIGALLFDSGETAEATRLKRTARRRYTRRKNRICYLQEIFSNEMAKVDDSFFHRLEESFLVEEDKKHERHPIFGNIVDEVAYHEKYPTIYHLRKKLVDSTDKADLRLIYLALAHMIKFRGHFLIEGDLNPDNSDVDKLFIQLVQTYNQLFEENPINASGVDAKAILSARLSKSRRLENLIAQLPGEKKNGLFGNLIALSLGLTPNFKSNFDLAEDAKLQLSKDTYDDDLDNLLAQIGDQYADLFLAAKNLSDAILLSDILRVNTEITKAPLSASMIKRYDEHHQDLTLLKALVRQQLPEKYKEIFFDQSKNGYAGYIDGGASQEEFYKFIKPILEKMDGTEELLVKLNREDLLRKQRTFDNGSIPHQIHLGELHAILRRQEDFYPFLKDNREKIEKILTFRIPYYVGPLARGNSRFAWMTRKSEETITPWNFEEVVDKGASAQSFIERMTNFDKNLPNEKVLPKHSLLYEYFTVYNELTKVKYVTEGMRKPAFLSGEQKKAIVDLLFKTNRKVTVKQLKEDYFKKIECFDSVEISGVEDRFNASLGTYHDLLKIIKDKDFLDNEENEDILEDIVLTLTLFEDREMIEERLKTYAHLFDDKVMKQLKRRRYTGWGRLSRKLINGIRDKQSGKTILDFLKSDGFANRNFMQLIHDDSLTFKEDIQKAQVSGQGDSLHEHIANLAGSPAIKKGILQTVKVVDELVKVMGRHKPENIVIEMARENQTTQKGQKNSRERMKRIEEGIKELGSQILKEHPVENTQLQNEKLYLYYLQNGRDMYVDQELDINRLSDYDVDHIVPQSFLKDDSIDNKVLTRSDKARGKSDNVPSEEVVKKMKNYWRQLLNAKLITQRKFDNLTKAERGGLSELDKAGFIKRQLVETRQITKHVAQILDSRMNTKYDENDKLIREVKVITLKSKLVSDFRKDFQFYKVREINNYHHAHDAYLNAVVGTALIKKYPKLESEFVYGDYKVYDVRKMIAKSEQEIGKATAKYFFYSNIMNFFKTEITLANGEIRKRPLIETNGETGEIVWDKGRDFATVRKVLSMPQVNIVKKTEVQTGGFSKESILPKRNSDKLIARKKDWDPKKYGGFDSPTVAYSVLVVAKVEKGKSKKLKSVKELLGITIMERSSFEKNPIDFLEAKGYKEVKKDLIIKLPKYSLFELENGRKRMLASAGELQKGNELALPSKYVNFLYLASHYEKLKGSPEDNEQKQLFVEQHKHYLDEIIEQISEFSKRVILADANLDKVLSAYNKHRDKPIREQAENIIHLFTLTNLGAPAAFKYFDTTIDRKRYTSTKEVLDATLIHQSITGLYETRIDLSQLGGDGGGGGEAAAKGSSGGLTAAIDILAPQQCAEPITWKSDEPVWVDQWPLTNDKLAAAQQLVQEQLEAGHITESSSPWNTPIFVIKKKSGKWRLLQDLRAVNATMVLMGALQPGLPSPVAIPQGYLKIIIDLKDCFFSIPLHPSDQKRFAFSLPSTNFKEPMQRFQWKVLPQGMANSPTLCQKYVATAIHKVRHAWKQMYIIHYMDDILIAGKDGQQVLQCFDQLKQELTAAGLHIAPEKVQLQDPYTYLGFELNGPKITNQKAVIRKDKLQTLNDFQKLLGDINWLRPYLKLTTGDLKPLFDTLKGDSDPNSHRSLSKEALASLEKVETAIAEQFVTHINYSLPLIFLIFNTALTPTGLFWQDNPIMWIHLPASPKKVLLPYYDAIADLIILGRDHSKKYFGIEPSTIIQPYSKSQIDWLMQNTEMWPIACASFVGILDNHYPPNKLIQFCKLHTFVFPQIISKTPLNNALLVFTDGSSTGMAAYTLTDTTIKFQTNLNSAQLVELQALIAVLSAFPNQPLNIYTDSAYLAHSIPLLETVAQIKHISETAKLFLQCQQLIYNRSIPFYIGHVRAHSGLPGPIAQGNQRADLATKIVASNINTAGKRTADGSEFEKRTADGSEFESPKKKAKVE

SEQ ID NO: 33 - protein, 2008 aa, synthetic construct
  source 1..2008: note = Description of Artificial Sequence: Synthetic polypeptide
MPAAKRVKLDGGDKKYSIGLDIGTNSVGWAVITDEYKVPSKKFKVLGNTDRHSIKKNLIGALLFDSGETAEATRLKRTARRRYTRRKNRICYLQEIFSNEMAKVDDSFFHRLEESFLVEEDKKHERHPIFGNIVDEVAYHEKYPTIYHLRKKLVDSTDKADLRLIYLALAHMIKFRGHFLIEGDLNPDNSDVDKLFIQLVQTYNQLFEENPINASGVDAKAILSARLSKSRRLENLIAQLPGEKKNGLFGNLIALSLGLTPNFKSNFDLAEDAKLQLSKDTYDDDLDNLLAQIGDQYADLFLAAKNLSDAILLSDILRVNTEITKAPLSASMIKRYDEHHQDLTLLKALVRQQLPEKYKEIFFDQSKNGYAGYIDGGASQEEFYKFIKPILEKMDGTEELLVKLNREDLLRKQRTFDNGSIPHQIHLGELHAILRRQEDFYPFLKDNREKIEKILTFRIPYYVGPLARGNSRFAWMTRKSEETITPWNFEEVVDKGASAQSFIERMTNFDKNLPNEKVLPKHSLLYEYFTVYNELTKVKYVTEGMRKPAFLSGEQKKAIVDLLFKTNRKVTVKQLKEDYFKKIECFDSVEISGVEDRFNASLGTYHDLLKIIKDKDFLDNEENEDILEDIVLTLTLFEDREMIEERLKTYAHLFDDKVMKQLKRRRYTGWGRLSRKLINGIRDKQSGKTILDFLKSDGFANRNFMQLIHDDSLTFKEDIQKAQVSGQGDSLHEHIANLAGSPAIKKGILQTVKVVDELVKVMGRHKPENIVIEMARENQTTQKGQKNSRERMKRIEEGIKELGSQILKEHPVENTQLQNEKLYLYYLQNGRDMYVDQELDINRLSDYDVDHIVPQSFLKDDSIDNKVLTRSDKARGKSDNVPSEEVVKKMKNYWRQLLNAKLITQRKFDNLTKAERGGLSELDKAGFIKRQLVETRQITKHVAQILDSRMNTKYDENDKLIREVKVITLKSKLVSDFRKDFQFYKVREINNYHHAHDAYLNAVVGTALIKKYPKLESEFVYGDYKVYDVRKMIAKSEQEIGKATAKYFFYSNIMNFFKTEITLANGEIRKRPLIETNGETGEIVWDKGRDFATVRKVLSMPQVNIVKKTEVQTGGFSKESILPKRNSDKLIARKKDWDPKKYGGFDSPTVAYSVLVVAKVEKGKSKKLKSVKELLGITIMERSSFEKNPIDFLEAKGYKEVKKDLIIKLPKYSLFELENGRKRMLASAGELQKGNELALPSKYVNFLYLASHYEKLKGSPEDNEQKQLFVEQHKHYLDEIIEQISEFSKRVILADANLDKVLSAYNKHRDKPIREQAENIIHLFTLTNLGAPAAFKYFDTTIDRKRYTSTKEVLDATLIHQSITGLYETRIDLSQLGGDGGGSSPAPGGGGGLTAAIDILAPQQCAEPITWKSDEPVWVDQWPLTNDKLAAAQQLVQEQLEAGHITESSSPWNTPIFVIKKKSGKWRLLQDLRAVNATMVLMGALQPGLPSPVAPPQGYLKIIIDLKDCFFSIPLHPSDQKRFAFSLPSTNFKEPMQRFQWKVLPQGMANSPTLCQKYVATAIHKVRHAWKQMYIIHYMDDILIAGKDGQQVLQCFDQLKQELTAAGLHIAPEKVQLQDPYTYLGFELNGPKITNQKAVIRKDKLQTLNDFQKLLGDINWLRPYLKLTTGDLKPLFDTLKPDSDPNSHRSLSKEALASLEKVETAIAEQFVTHINYSLPLIFLIFNTALTPTGLFWQDNPIMWIHLPASPKKVLLPYYDAIADLIILGRDHSKKYFGIEPSTIIQPYSKSQIDWLMQNTEMWPIACASFVGILDNHYPPNKLIQFCKLHTFVFPQIISKTPLNNALLVFTDGSSTGMAAYTLTDTTIKFQTNLNSAQLVELQALIAVLSAFPNQPLNIYTDSAYLAHSIPLLETVAQIKHISETAKLFLQCQQLIYNRSIPFYIGHVRAHSGLPGPIAQGNQRADLATKIVASNINTAGKRTADGSEFEKRTADGSEFESPKKKAKVE

SEQ ID NO: 34 - protein, 2085 aa, synthetic construct
  source 1..2085: note = Description of Artificial Sequence: Synthetic polypeptide
MPAAKRVKLDGGDKKYSIGLDIGTNSVGWAVITDEYKVPSKKFKVLGNTDRHSIKKNLIGALLFDSGETAEATRLKRTARRRYTRRKNRICYLQEIFSNEMAKVDDSFFHRLEESFLVEEDKKHERHPIFGNIVDEVAYHEKYPTIYHLRKKLVDSTDKADLRLIYLALAHMIKFRGHFLIEGDLNPDNSDVDKLFIQLVQTYNQLFEENPINASGVDAKAILSARLSKSRRLENLIAQLPGEKKNGLFGNLIALSLGLTPNFKSNFDLAEDAKLQLSKDTYDDDLDNLLAQIGDQYADLFLAAKNLSDAILLSDILRVNTEITKAPLSASMIKRYDEHHQDLTLLKALVRQQLPEKYKEIFFDQSKNGYAGYIDGGASQEEFYKFIKPILEKMDGTEELLVKLNREDLLRKQRTFDNGSIPHQIHLGELHAILRRQEDFYPFLKDNREKIEKILTFRIPYYVGPLARGNSRFAWMTRKSEETITPWNFEEVVDKGASAQSFIERMTNFDKNLPNEKVLPKHSLLYEYFTVYNELTKVKYVTEGMRKPAFLSGEQKKAIVDLLFKTNRKVTVKQLKEDYFKKIECFDSVEISGVEDRFNASLGTYHDLLKIIKDKDFLDNEENEDILEDIVLTLTLFEDREMIEERLKTYAHLFDDKVMKQLKRRRYTGWGRLSRKLINGIRDKQSGKTILDFLKSDGFANRNFMQLIHDDSLTFKEDIQKAQVSGQGDSLHEHIANLAGSPAIKKGILQTVKVVDELVKVMGRHKPENIVIEMARENQTTQKGQKNSRERMKRIEEGIKELGSQILKEHPVENTQLQNEKLYLYYLQNGRDMYVDQELDINRLSDYDVDHIVPQSFLKDDSIDNKVLTRSDKARGKSDNVPSEEVVKKMKNYWRQLLNAKLITQRKFDNLTKAERGGLSELDKAGFIKRQLVETRQITKHVAQILDSRMNTKYDENDKLIREVKVITLKSKLVSDFRKDFQFYKVREINNYHHAHDAYLNAVVGTALIKKYPKLESEFVYGDYKVYDVRKMIAKSEQEIGKATAKYFFYSNIMNFFKTEITLANGEIRKRPLIETNGETGEIVWDKGRDFATVRKVLSMPQVNIVKKTEVQTGGFSKESILPKRNSDKLIARKKDWDPKKYGGFDSPTVAYSVLVVAKVEKGKSKKLKSVKELLGITIMERSSFEKNPIDFLEAKGYKEVKKDLIIKLPKYSLFELENGRKRMLASAGELQKGNELALPSKYVNFLYLASHYEKLKGSPEDNEQKQLFVEQHKHYLDEIIEQISEFSKRVILADANLDKVLSAYNKHRDKPIREQAENIIHLFTLTNLGAPAAFKYFDTTIDRKRYTSTKEVLDATLIHQSITGLYETRIDLSQLGGDGGEAAAKGSSGGLDDEYRLYSPLVKPDQNIQFWLEQFPQAWAETAGMGLAKQVPPQVIQLKASATPVSVRQYPLSKEAQEGIRPHVQRLIQQGILVPVQSPWNTPLLPVRKPGTNDYRPVQDLREVNKRVQDIHPTVPNPYNLLCALPPQRSWYTVLDLKDAFFCLRLHPTSQPLFAFEWRDPGTGRTGQLTWTRLPQGFKNSPTIFNEALHRDLANFRIQHPQVTLLQYVDDLLLAGATKQDCLEGTKALLLELSDLGYRASAKKAQICRREVTYLGYSLRDGQRWLTEARKKTVVQIPAPTTAKQVREFLGKAGFCRLFIPGFATLAAPLYPLTKPKGEFSWAPEHQKAFDAIKKALLSAPALALPDVTKPFTLYVDERKGVARGVLTQTLGPWRRPVAYLSKKLDPVASGWPVCLKAIAAVAILVKDADKLTLGQNITVIAPHALENIVRQPPDRWMTNARMTHYQSLLLTERVTFAPPAALNPATLLPEETDEPVTHDCHQLLIEETGVRKDLTDIPLTGEVLTWFTDGSSYVVEGKRMAGAAVVDGTRTIWASSLPEGTSAQKAELMALTQALRLAEGKSINIYTDSRYAFATAHVHGAIYKQRGWLTSAGREIKNKEEILSLLEALHLPKRLAIIHCPGHQKAKDPISRGNQMADRVAKQAAQGVNLLPAGKRTADGSEFEKRTADGSEFESPKKKAKVE

SEQ ID NO: 35 - protein, 2088 aa, synthetic construct
  source 1..2088: note = Description of Artificial Sequence: Synthetic polypeptide
MPAAKRVKLDGGDKKYSIGLDIGTNSVGWAVITDEYKVPSKKFKVLGNTDRHSIKKNLIGALLFDSGETAEATRLKRTARRRYTRRKNRICYLQEIFSNEMAKVDDSFFHRLEESFLVEEDKKHERHPIFGNIVDEVAYHEKYPTIYHLRKKLVDSTDKADLRLIYLALAHMIKFRGHFLIEGDLNPDNSDVDKLFIQLVQTYNQLFEENPINASGVDAKAILSARLSKSRRLENLIAQLPGEKKNGLFGNLIALSLGLTPNFKSNFDLAEDAKLQLSKDTYDDDLDNLLAQIGDQYADLFLAAKNLSDAILLSDILRVNTEITKAPLSASMIKRYDEHHQDLTLLKALVRQQLPEKYKEIFFDQSKNGYAGYIDGGASQEEFYKFIKPILEKMDGTEELLVKLNREDLLRKQRTFDNGSIPHQIHLGELHAILRRQEDFYPFLKDNREKIEKILTFRIPYYVGPLARGNSRFAWMTRKSEETITPWNFEEVVDKGASAQSFIERMTNFDKNLPNEKVLPKHSLLYEYFTVYNELTKVKYVTEGMRKPAFLSGEQKKAIVDLLFKTNRKVTVKQLKEDYFKKIECFDSVEISGVEDRFNASLGTYHDLLKIIKDKDFLDNEENEDILEDIVLTLTLFEDREMIEERLKTYAHLFDDKVMKQLKRRRYTGWGRLSRKLINGIRDKQSGKTILDFLKSDGFANRNFMQLIHDDSLTFKEDIQKAQVSGQGDSLHEHIANLAGSPAIKKGILQTVKVVDELVKVMGRHKPENIVIEMARENQTTQKGQKNSRERMKRIEEGIKELGSQILKEHPVENTQLQNEKLYLYYLQNGRDMYVDQELDINRLSDYDVDHIVPQSFLKDDSIDNKVLTRSDKARGKSDNVPSEEVVKKMKNYWRQLLNAKLITQRKFDNLTKAERGGLSELDKAGFIKRQLVETRQITKHVAQILDSRMNTKYDENDKLIREVKVITLKSKLVSDFRKDFQFYKVREINNYHHAHDAYLNAVVGTALIKKYPKLESEFVYGDYKVYDVRKMIAKSEQEIGKATAKYFFYSNIMNFFKTEITLANGEIRKRPLIETNGETGEIVWDKGRDFATVRKVLSMPQVNIVKKTEVQTGGFSKESILPKRNSDKLIARKKDWDPKKYGGFDSPTVAYSVLVVAKVEKGKSKKLKSVKELLGITIMERSSFEKNPIDFLEAKGYKEVKKDLIIKLPKYSLFELENGRKRMLASAGELQKGNELALPSKYVNFLYLASHYEKLKGSPEDNEQKQLFVEQHKHYLDEIIEQISEFSKRVILADANLDKVLSAYNKHRDKPIREQAENIIHLFTLTNLGAPAAFKYFDTTIDRKRYTSTKEVLDATLIHQSITGLYETRIDLSQLGGDGGEAAAKGGSPAPGGLDDEYRLYSPLVKPDQNIQFWLEQFPQAWAETAGMGLAKQVPPQVIQLKASATPVSVRQYPLSKEAQEGIRPHVQRLIQQGILVPVQSPWNTPLLPVRKPGTNDYRPVQDLREVNKRVQDIHPTVPNPYNLLCALPPQRSWYTVLDLKDAFFCLRLHPTSQPLFAFEWRDPGTGRTGQLTWTRLPQGFKNSPTIFNEALHRDLANFRIQHPQVTLLQYVDDLLLAGATKQDCLEGTKALLLELSDLGYRASAKKAQICRREVTYLGYSLRDGQRWLTEARKKTVVQIPAPTTAKQVREFLGKAGFCRLFIPGFATLAAPLYPLTKPKGEFSWAPEHQKAFDAIKKALLSAPALALPDVTKPFTLYVDERKGVARGVLTQTLGPWRRPVAYLSKKLDPVASGWPVCLKAIAAVAILVKDADKLTLGQNITVIAPHALENIVRQPPDRWMTNARMTHYQSLLLTERVTFAPPAALNPATLLPEETDEPVTHDCHQLLIEETGVRKDLTDIPLTGEVLTWFTDGSSYVVEGKRMAGAAVVDGTRTIWASSLPEGTSAQKAELMALTQALRLAEGKSINIYTDSRYAFATAHVHGAIYKQRGWLTSAGREIKNKEEILSLLEALHLPKRLAIIHCPGHQKAKDPISRGNQMADRVAKQAAQGVNLLPAGKRTADGSEFEKRTADGSEFESPKKKAKVE

SEQ ID NO: 36 - protein, 2123 aa, synthetic construct
  source 1..2123: note = Description of Artificial Sequence: Synthetic polypeptide
MPAAKRVKLDGGDKKYSIGLDIGTNSVGWAVITDEYKVPSKKFKVLGNTDRHSIKKNLIGALLFDSGETAEATRLKRTARRRYTRRKNRICYLQEIFSNEMAKVDDSFFHRLEESFLVEEDKKHERHPIFGNIVDEVAYHEKYPTIYHLRKKLVDSTDKADLRLIYLALAHMIKFRGHFLIEGDLNPDNSDVDKLFIQLVQTYNQLFEENPINASGVDAKAILSARLSKSRRLENLIAQLPGEKKNGLFGNLIALSLGLTPNFKSNFDLAEDAKLQLSKDTYDDDLDNLLAQIGDQYADLFLAAKNLSDAILLSDILRVNTEITKAPLSASMIKRYDEHHQDLTLLKALVRQQLPEKYKEIFFDQSKNGYAGYIDGGASQEEFYKFIKPILEKMDGTEELLVKLNREDLLRKQRTFDNGSIPHQIHLGELHAILRRQEDFYPFLKDNREKIEKILTFRIPYYVGPLARGNSRFAWMTRKSEETITPWNFEEVVDKGASAQSFIERMTNFDKNLPNEKVLPKHSLLYEYFTVYNELTKVKYVTEGMRKPAFLSGEQKKAIVDLLFKTNRKVTVKQLKEDYFKKIECFDSVEISGVEDRFNASLGTYHDLLKIIKDKDFLDNEENEDILEDIVLTLTLFEDREMIEERLKTYAHLFDDKVMKQLKRRRYTGWGRLSRKLINGIRDKQSGKTILDFLKSDGFANRNFMQLIHDDSLTFKEDIQKAQVSGQGDSLHEHIANLAGSPAIKKGILQTVKVVDELVKVMGRHKPENIVIEMARENQTTQKGQKNSRERMKRIEEGIKELGSQILKEHPVENTQLQNEKLYLYYLQNGRDMYVDQELDINRLSDYDVDHIVPQSFLKDDSIDNKVLTRSDKARGKSDNVPSEEVVKKMKNYWRQLLNAKLITQRKFDNLTKAERGGLSELDKAGFIKRQLVETRQITKHVAQILDSRMNTKYDENDKLIREVKVITLKSKLVSDFRKDFQFYKVREINNYHHAHDAYLNAVVGTALIKKYPKLESEFVYGDYKVYDVRKMIAKSEQEIGKATAKYFFYSNIMNFFKTEITLANGEIRKRPLIETNGETGEIVWDKGRDFATVRKVLSMPQVNIVKKTEVQTGGFSKESILPKRNSDKLIARKKDWDPKKYGGFDSPTVAYSVLVVAKVEKGKSKKLKSVKELLGITIMERSSFEKNPIDFLEAKGYKEVKKDLIIKLPKYSLFELENGRKRMLASAGELQKGNELALPSKYVNFLYLASHYEKLKGSPEDNEQKQLFVEQHKHYLDEIIEQISEFSKRVILADANLDKVLSAYNKHRDKPIREQAENIIHLFTLTNLGAPAAFKYFDTTIDRKRYTSTKEVLDATLIHQSITGLYETRIDLSQLGGDGGAEAAAKEAAAKEAAAKEAAAKALEAEAAAKEAAAKEAAAKEAAAKAGGLDDEYRLYSPLVKPDQNIQFWLEQFPQAWAETAGMGLAKQVPPQVIQLKASATPVSVRQYPLSKEAQEGIRPHVQRLIQQGILVPVQSPWNTPLLPVRKPGTNDYRPVQDLREVNKRVQDIHPTVPNPYNLLCALPPQRSWYTVLDLKDAFFCLRLHPTSQPLFAFEWRDPGTGRTGQLTWTRLPQGFKNSPTIFNEALHRDLANFRIQHPQVTLLQYVDDLLLAGATKQDCLEGTKALLLELSDLGYRASAKKAQICRREVTYLGYSLRDGQRWLTEARKKTVVQIPAPTTAKQVREFLGKAGFCRLFIPGFATLAAPLYPLTKPKGEFSWAPEHQKAFDAIKKALLSAPALALPDVTKPFTLYVDERKGVARGVLTQTLGPWRRPVAYLSKKLDPVASGWPVCLKAIAAVAILVKDADKLTLGQNITVIAPHALENIVRQPPDRWMTNARMTHYQSLLLTERVTFAPPAALNPATLLPEETDEPVTHDCHQLLIEETGVRKDLTDIPLTGEVLTWFTDGSSYVVEGKRMAGAAVVDGTRTIWASSLPEGTSAQKAELMALTQALRLAEGKSINIYTDSRYAFATAHVHGAIYKQRGWLTSAGREIKNKEEILSLLEALHLPKRLAIIHCPGHQKAKDPISRGNQMADRVAKQAAQGVNLLPAGKRTADGSEFEKRTADGSEFESPKKKAKVE

SEQ ID NO: 37 - protein, 2092 aa, synthetic construct
  source 1..2092: note = Description of Artificial Sequence: Synthetic polypeptide
MPAAKRVKLDGGDKKYSIGLDIGTNSVGWAVITDEYKVPSKKFKVLGNTDRHSIKKNLIGALLFDSGETAEATRLKRTARRRYTRRKNRICYLQEIFSNEMAKVDDSFFHRLEESFLVEEDKKHERHPIFGNIVDEVAYHEKYPTIYHLRKKLVDSTDKADLRLIYLALAHMIKFRGHFLIEGDLNPDNSDVDKLFIQLVQTYNQLFEENPINASGVDAKAILSARLSKSRRLENLIAQLPGEKKNGLFGNLIALSLGLTPNFKSNFDLAEDAKLQLSKDTYDDDLDNLLAQIGDQYADLFLAAKNLSDAILLSDILRVNTEITKAPLSASMIKRYDEHHQDLTLLKALVRQQLPEKYKEIFFDQSKNGYAGYIDGGASQEEFYKFIKPILEKMDGTEELLVKLNREDLLRKQRTFDNGSIPHQIHLGELHAILRRQEDFYPFLKDNREKIEKILTFRIPYYVGPLARGNSRFAWMTRKSEETITPWNFEEVVDKGASAQSFIERMTNFDKNLPNEKVLPKHSLLYEYFTVYNELTKVKYVTEGMRKPAFLSGEQKKAIVDLLFKTNRKVTVKQLKEDYFKKIECFDSVEISGVEDRFNASLGTYHDLLKIIKDKDFLDNEENEDILEDIVLTLTLFEDREMIEERLKTYAHLFDDKVMKQLKRRRYTGWGRLSRKLINGIRDKQSGKTILDFLKSDGFANRNFMQLIHDDSLTFKEDIQKAQVSGQGDSLHEHIANLAGSPAIKKGILQTVKVVDELVKVMGRHKPENIVIEMARENQTTQKGQKNSRERMKRIEEGIKELGSQILKEHPVENTQLQNEKLYLYYLQNGRDMYVDQELDINRLSDYDVDHIVPQSFLKDDSIDNKVLTRSDKARGKSDNVPSEEVVKKMKNYWRQLLNAKLITQRKFDNLTKAERGGLSELDKAGFIKRQLVETRQITKHVAQILDSRMNTKYDENDKLIREVKVITLKSKLVSDFRKDFQFYKVREINNYHHAHDAYLNAVVGTALIKKYPKLESEFVYGDYKVYDVRKMIAKSEQEIGKATAKYFFYSNIMNFFKTEITLANGEIRKRPLIETNGETGEIVWDKGRDFATVRKVLSMPQVNIVKKTEVQTGGFSKESILPKRNSDKLIARKKDWDPKKYGGFDSPTVAYSVLVVAKVEKGKSKKLKSVKELLGITIMERSSFEKNPIDFLEAKGYKEVKKDLIIKLPKYSLFELENGRKRMLASAGELQKGNELALPSKYVNFLYLASHYEKLKGSPEDNEQKQLFVEQHKHYLDEIIEQISEFSKRVILADANLDKVLSAYNKHRDKPIREQAENIIHLFTLTNLGAPAAFKYFDTTIDRKRYTSTKEVLDATLIHQSITGLYETRIDLSQLGGDGGEAAAKEAAAKEAAAKGGLDDEYRLYSPLVKPDQNIQFWLEQFPQAWAETAGMGLAKQVPPQVIQLKASATPVSVRQYPLSKEAQEGIRPHVQRLIQQGILVPVQSPWNTPLLPVRKPGTNDYRPVQDLREVNKRVQDIHPTVPNPYNLLCALPPQRSWYTVLDLKDAFFCLRLHPTSQPLFAFEWRDPGTGRTGQLTWTRLPQGFKNSPTIFNEALHRDLANFRIQHPQVTLLQYVDDLLLAGATKQDCLEGTKALLLELSDLGYRASAKKAQICRREVTYLGYSLRDGQRWLTEARKKTVVQIPAPTTAKQVREFLGKAGFCRLFIPGFATLAAPLYPLTKPKGEFSWAPEHQKAFDAIKKALLSAPALALPDVTKPFTLYVDERKGVARGVLTQTLGPWRRPVAYLSKKLDPVASGWPVCLKAIAAVAILVKDADKLTLGQNITVIAPHALENIVRQPPDRWMTNARMTHYQSLLLTERVTFAPPAALNPATLLPEETDEPVTHDCHQLLIEETGVRKDLTDIPLTGEVLTWFTDGSSYVVEGKRMAGAAVVDGTRTIWASSLPEGTSAQKAELMALTQALRLAEGKSINIYTDSRYAFATAHVHGAIYKQRGWLTSAGREIKNKEEILSLLEALHLPKRLAIIHCPGHQKAKDPISRGNQMADRVAKQAAQGVNLLPAGKRTADGSEFEKRTADGSEFESPKKKAKVE

SEQ ID NO: 38 - protein, 2086 aa, synthetic construct
  source 1..2086: note = Description of Artificial Sequence: Synthetic polypeptide
MPAAKRVKLDGGDKKYSIGLDIGTNSVGWAVITDEYKVPSKKFKVLGNTDRHSIKKNLIGALLFDSGETAEATRLKRTARRRYTRRKNRICYLQEIFSNEMAKVDDSFFHRLEESFLVEEDKKHERHPIFGNIVDEVAYHEKYPTIYHLRKKLVDSTDKADLRLIYLALAHMIKFRGHFLIEGDLNPDNSDVDKLFIQLVQTYNQLFEENPINASGVDAKAILSARLSKSRRLENLIAQLPGEKKNGLFGNLIALSLGLTPNFKSNFDLAEDAKLQLSKDTYDDDLDNLLAQIGDQYADLFLAAKNLSDAILLSDILRVNTEITKAPLSASMIKRYDEHHQDLTLLKALVRQQLPEKYKEIFFDQSKNGYAGYIDGGASQEEFYKFIKPILEKMDGTEELLVKLNREDLLRKQRTFDNGSIPHQIHLGELHAILRRQEDFYPFLKDNREKIEKILTFRIPYYVGPLARGNSRFAWMTRKSEETITPWNFEEVVDKGASAQSFIERMTNFDKNLPNEKVLPKHSLLYEYFTVYNELTKVKYVTEGMRKPAFLSGEQKKAIVDLLFKTNRKVTVKQLKEDYFKKIECFDSVEISGVEDRFNASLGTYHDLLKIIKDKDFLDNEENEDILEDIVLTLTLFEDREMIEERLKTYAHLFDDKVMKQLKRRRYTGWGRLSRKLINGIRDKQSGKTILDFLKSDGFANRNFMQLIHDDSLTFKEDIQKAQVSGQGDSLHEHIANLAGSPAIKKGILQTVKVVDELVKVMGRHKPENIVIEMARENQTTQKGQKNSRERMKRIEEGIKELGSQILKEHPVENTQLQNEKLYLYYLQNGRDMYVDQELDINRLSDYDVDHIVPQSFLKDDSIDNKVLTRSDKARGKSDNVPSEEVVKKMKNYWRQLLNAKLITQRKFDNLTKAERGGLSELDKAGFIKRQLVETRQITKHVAQILDSRMNTKYDENDKLIREVKVITLKSKLVSDFRKDFQFYKVREINNYHHAHDAYLNAVVGTALIKKYPKLESEFVYGDYKVYDVRKMIAKSEQEIGKATAKYFFYSNIMNFFKTEITLANGEIRKRPLIETNGETGEIVWDKGRDFATVRKVLSMPQVNIVKKTEVQTGGFSKESILPKRNSDKLIARKKDWDPKKYGGFDSPTVAYSVLVVAKVEKGKSKKLKSVKELLGITIMERSSFEKNPIDFLEAKGYKEVKKDLIIKLPKYSLFELENGRKRMLASAGELQKGNELALPSKYVNFLYLASHYEKLKGSPEDNEQKQLFVEQHKHYLDEIIEQISEFSKRVILADANLDKVLSAYNKHRDKPIREQAENIIHLFTLTNLGAPAAFKYFDTTIDRKRYTSTKEVLDATLIHQSITGLYETRIDLSQLGGDGGGGSGSSPAPGGLDDEYRLYSPLVKPDQNIQFWLEQFPQAWAETAGMGLAKQVPPQVIQLKASATPVSVRQYPLSKEAQEGIRPHVQRLIQQGILVPVQSPWNTPLLPVRKPGTNDYRPVQDLREVNKRVQDIHPTVPNPYNLLCALPPQRSWYTVLDLKDAFFCLRLHPTSQPLFAFEWRDPGTGRTGQLTWTRLPQGFKNSPTIFNEALHRDLANFRIQHPQVTLLQYVDDLLLAGATKQDCLEGTKALLLELSDLGYRASAKKAQICRREVTYLGYSLRDGQRWLTEARKKTVVQIPAPTTAKQVREFLGKAGFCRLFIPGFATLAAPLYPLTKPKGEFSWAPEHQKAFDAIKKALLSAPALALPDVTKPFTLYVDERKGVARGVLTQTLGPWRRPVAYLSKKLDPVASGWPVCLKAIAAVAILVKDADKLTLGQNITVIAPHALENIVRQPPDRWMTNARMTHYQSLLLTERVTFAPPAALNPATLLPEETDEPVTHDCHQLLIEETGVRKDLTDIPLTGEVLTWFTDGSSYVVEGKRMAGAAVVDGTRTIWASSLPEGTSAQKAELMALTQALRLAEGKSINIYTDSRYAFATAHVHGAIYKQRGWLTSAGREIKNKEEILSLLEALHLPKRLAIIHCPGHQKAKDPISRGNQMADRVAKQAAQGVNLLPAGKRTADGSEFEKRTADGSEFESPKKKAKVE

SEQ ID NO: 39 - protein, 2102 aa, synthetic construct
  source 1..2102: note = Description of Artificial Sequence: Synthetic polypeptide
MPAAKRVKLDGGDKKYSIGLDIGTNSVGWAVITDEYKVPSKKFKVLGNTDRHSIKKNLIGALLFDSGETAEATRLKRTARRRYTRRKNRICYLQEIFSNEMAKVDDSFFHRLEESFLVEEDKKHERHPIFGNIVDEVAYHEKYPTIYHLRKKLVDSTDKADLRLIYLALAHMIKFRGHFLIEGDLNPDNSDVDKLFIQLVQTYNQLFEENPINASGVDAKAILSARLSKSRRLENLIAQLPGEKKNGLFGNLIALSLGLTPNFKSNFDLAEDAKLQLSKDTYDDDLDNLLAQIGDQYADLFLAAKNLSDAILLSDILRVNTEITKAPLSASMIKRYDEHHQDLTLLKALVRQQLPEKYKEIFFDQSKNGYAGYIDGGASQEEFYKFIKPILEKMDGTEELLVKLNREDLLRKQRTFDNGSIPHQIHLGELHAILRRQEDFYPFLKDNREKIEKILTFRIPYYVGPLARGNSRFAWMTRKSEETITPWNFEEVVDKGASAQSFIERMTNFDKNLPNEKVLPKHSLLYEYFTVYNELTKVKYVTEGMRKPAFLSGEQKKAIVDLLFKTNRKVTVKQLKEDYFKKIECFDSVEISGVEDRFNASLGTYHDLLKIIKDKDFLDNEENEDILEDIVLTLTLFEDREMIEERLKTYAHLFDDKVMKQLKRRRYTGWGRLSRKLINGIRDKQSGKTILDFLKSDGFANRNFMQLIHDDSLTFKEDIQKAQVSGQGDSLHEHIANLAGSPAIKKGILQTVKVVDELVKVMGRHKPENIVIEMARENQTTQKGQKNSRERMKRIEEGIKELGSQILKEHPVENTQLQNEKLYLYYLQNGRDMYVDQELDINRLSDYDVDHIVPQSFLKDDSIDNKVLTRSDKARGKSDNVPSEEVVKKMKNYWRQLLNAKLITQRKFDNLTKAERGGLSELDKAGFIKRQLVETRQITKHVAQILDSRMNTKYDENDKLIREVKVITLKSKLVSDFRKDFQFYKVREINNYHHAHDAYLNAVVGTALIKKYPKLESEFVYGDYKVYDVRKMIAKSEQEIGKATAKYFFYSNIMNFFKTEITLANGEIRKRPLIETNGETGEIVWDKGRDFATVRKVLSMPQVNIVKKTEVQTGGFSKESILPKRNSDKLIARKKDWDPKKYGGFDSPTVAYSVLVVAKVEKGKSKKLKSVKELLGITIMERSSFEKNPIDFLEAKGYKEVKKDLIIKLPKYSLFELENGRKRMLASAGELQKGNELALPSKYVNFLYLASHYEKLKGSPEDNEQKQLFVEQHKHYLDEIIEQISEFSKRVILADANLDKVLSAYNKHRDKPIREQAENIIHLFTLTNLGAPAAFKYFDTTIDRKRYTSTKEVLDATLIHQSITGLYETRIDLSQLGGDGGEAAAKEAAAKEAAAKEAAAKEAAAKGGLDDEYRLYSPLVKPDQNIQFWLEQFPQAWAETAGMGLAKQVPPQVIQLKASATPVSVRQYPLSKEAQEGIRPHVQRLIQQGILVPVQSPWNTPLLPVRKPGTNDYRPVQDLREVNKRVQDIHPTVPNPYNLLCALPPQRSWYTVLDLKDAFFCLRLHPTSQPLFAFEWRDPGTGRTGQLTWTRLPQGFKNSPTIFNEALHRDLANFRIQHPQVTLLQYVDDLLLAGATKQDCLEGTKALLLELSDLGYRASAKKAQICRREVTYLGYSLRDGQRWLTEARKKTVVQIPAPTTAKQVREFLGKAGFCRLFIPGFATLAAPLYPLTKPKGEFSWAPEHQKAFDAIKKALLSAPALALPDVTKPFTLYVDERKGVARGVLTQTLGPWRRPVAYLSKKLDPVASGWPVCLKAIAAVAILVKDADKLTLGQNITVIAPHALENIVRQPPDRWMTNARMTHYQSLLLTERVTFAPPAALNPATLLPEETDEPVTHDCHQLLIEETGVRKDLTDIPLTGEVLTWFTDGSSYVVEGKRMAGAAVVDGTRTIWASSLPEGTSAQKAELMALTQALRLAEGKSINIYTDSRYAFATAHVHGAIYKQRGWLTSAGREIKNKEEILSLLEALHLPKRLAIIHCPGHQKAKDPISRGNQMADRVAKQAAQGVNLLPAGKRTADGSEFEKRTADGSEFESPKKKAKVE

SEQ ID NO: 40 - protein, 2088 aa, synthetic construct
  source 1..2088: note = Description of Artificial Sequence: Synthetic polypeptide
MPAAKRVKLDGGDKKYSIGLDIGTNSVGWAVITDEYKVPSKKFKVLGNTDRHSIKKNLIGALLFDSGETAEATRLKRTARRRYTRRKNRICYLQEIFSNEMAKVDDSFFHRLEESFLVEEDKKHERHPIFGNIVDEVAYHEKYPTIYHLRKKLVDSTDKADLRLIYLALAHMIKFRGHFLIEGDLNPDNSDVDKLFIQLVQTYNQLFEENPINASGVDAKAILSARLSKSRRLENLIAQLPGEKKNGLFGNLIALSLGLTPNFKSNFDLAEDAKLQLSKDTYDDDLDNLLAQIGDQYADLFLAAKNLSDAILLSDILRVNTEITKAPLSASMIKRYDEHHQDLTLLKALVRQQLPEKYKEIFFDQSKNGYAGYIDGGASQEEFYKFIKPILEKMDGTEELLVKLNREDLLRKQRTFDNGSIPHQIHLGELHAILRRQEDFYPFLKDNREKIEKILTFRIPYYVGPLARGNSRFAWMTRKSEETITPWNFEEVVDKGASAQSFIERMTNFDKNLPNEKVLPKHSLLYEYFTVYNELTKVKYVTEGMRKPAFLSGEQKKAIVDLLFKTNRKVTVKQLKEDYFKKIECFDSVEISGVEDRFNASLGTYHDLLKIIKDKDFLDNEENEDILEDIVLTLTLFEDREMIEERLKTYAHLFDDKVMKQLKRRRYTGWGRLSRKLINGIRDKQSGKTILDFLKSDGFANRNFMQLIHDDSLTFKEDIQKAQVSGQGDSLHEHIANLAGSPAIKKGILQTVKVVDELVKVMGRHKPENIVIEMARENQTTQKGQKNSRERMKRIEEGIKELGSQILKEHPVENTQLQNEKLYLYYLQNGRDMYVDQELDINRLSDYDVDHIVPQSFLKDDSIDNKVLTRSDKARGKSDNVPSEEVVKKMKNYWRQLLNAKLITQRKFDNLTKAERGGLSELDKAGFIKRQLVETRQITKHVAQILDSRMNTKYDENDKLIREVKVITLKSKLVSDFRKDFQFYKVREINNYHHAHDAYLNAVVGTALIKKYPKLESEFVYGDYKVYDVRKMIAKSEQEIGKATAKYFFYSNIMNFFKTEITLANGEIRKRPLIETNGETGEIVWDKGRDFATVRKVLSMPQVNIVKKTEVQTGGFSKESILPKRNSDKLIARKKDWDPKKYGGFDSPTVAYSVLVVAKVEKGKSKKLKSVKELLGITIMERSSFEKNPIDFLEAKGYKEVKKDLIIKLPKYSLFELENGRKRMLASAGELQKGNELALPSKYVNFLYLASHYEKLKGSPEDNEQKQLFVEQHKHYLDEIIEQISEFSKRVILADANLDKVLSAYNKHRDKPIREQAENIIHLFTLTNLGAPAAFKYFDTTIDRKRYTSTKEVLDATLIHQSITGLYETRIDLSQLGGDGGGSSGGGEAAAKGGLDDEYRLYSPLVKPDQNIQFWLEQFPQAWAETAGMGLAKQVPPQVIQLKASATPVSVRQYPLSKEAQEGIRPHVQRLIQQGILVPVQSPWNTPLLPVRKPGTNDYRPVQDLREVNKRVQDIHPTVPNPYNLLCALPPQRSWYTVLDLKDAFFCLRLHPTSQPLFAFEWRDPGTGRTGQLTWTRLPQGFKNSPTIFNEALHRDLANFRIQHPQVTLLQYVDDLLLAGATKQDCLEGTKALLLELSDLGYRASAKKAQICRREVTYLGYSLRDGQRWLTEARKKTVVQIPAPTTAKQVREFLGKAGFCRLFIPGFATLAAPLYPLTKPKGEFSWAPEHQKAFDAIKKALLSAPALALPDVTKPFTLYVDERKGVARGVLTQTLGPWRRPVAYLSKKLDPVASGWPVCLKAIAAVAILVKDADKLTLGQNITVIAPHALENIVRQPPDRWMTNARMTHYQSLLLTERVTFAPPAALNPATLLPEETDEPVTHDCHQLLIEETGVRKDLTDIPLTGEVLTWFTDGSSYVVEGKRMAGAAVVDGTRTIWASSLPEGTSAQKAELMALTQALRLAEGKSINIYTDSRYAFATAHVHGAIYKQRGWLTSAGREIKNKEEILSLLEALHLPKRLAIIHCPGHQKAKDPISRGNQMADRVAKQAAQGVNLLPAGKRTADGSEFEKRTADGSEFESPKKKAKVE

SEQ ID NO: 41 - protein, 2089 aa, synthetic construct
  source 1..2089: note = Description of Artificial Sequence: Synthetic polypeptide
MPAAKRVKLDGGDKKYSIGLDIGTNSVGWAVITDEYKVPSKKFKVLGNTDRHSIKKNLIGALLFDSGETAEATRLKRTARRRYTRRKNRICYLQEIFSNEMAKVDDSFFHRLEESFLVEEDKKHERHPIFGNIVDEVAYHEKYPTIYHLRKKLVDSTDKADLRLIYLALAHMIKFRGHFLIEGDLNPDNSDVDKLFIQLVQTYNQLFEENPINASGVDAKAILSARLSKSRRLENLIAQLPGEKKNGLFGNLIALSLGLTPNFKSNFDLAEDAKLQLSKDTYDDDLDNLLAQIGDQYADLFLAAKNLSDAILLSDILRVNTEITKAPLSASMIKRYDEHHQDLTLLKALVRQQLPEKYKEIFFDQSKNGYAGYIDGGASQEEFYKFIKPILEKMDGTEELLVKLNREDLLRKQRTFDNGSIPHQIHLGELHAILRRQEDFYPFLKDNREKIEKILTFRIPYYVGPLARGNSRFAWMTRKSEETITPWNFEEVVDKGASAQSFIERMTNFDKNLPNEKVLPKHSLLYEYFTVYNELTKVKYVTEGMRKPAFLSGEQKKAIVDLLFKTNRKVTVKQLKEDYFKKIECFDSVEISGVEDRFNASLGTYHDLLKIIKDKDFLDNEENEDILEDIVLTLTLFEDREMIEERLKTYAHLFDDKVMKQLKRRRYTGWGRLSRKLINGIRDKQSGKTILDFLKSDGFANRNFMQLIHDDSLTFKEDIQKAQVSGQGDSLHEHIANLAGSPAIKKGILQTVKVVDELVKVMGRHKPENIVIEMARENQTTQKGQKNSRERMKRIEEGIKELGSQILKEHPVENTQLQNEKLYLYYLQNGRDMYVDQELDINRLSDYDVDHIVPQSFLKDDSIDNKVLTRSDKARGKSDNVPSEEVVKKMKNYWRQLLNAKLITQRKFDNLTKAERGGLSELDKAGFIKRQLVETRQITKHVAQILDSRMNTKYDENDKLIREVKVITLKSKLVSDFRKDFQFYKVREINNYHHAHDAYLNAVVGTALIKKYPKLESEFVYGDYKVYDVRKMIAKSEQEIGKATAKYFFYSNIMNFFKTEITLANGEIRKRPLIETNGETGEIVWDKGRDFATVRKVLSMPQVNIVKKTEVQTGGFSKESILPKRNSDKLIARKKDWDPKKYGGFDSPTVAYSVLVVAKVEKGKSKKLKSVKELLGITIMERSSFEKNPIDFLEAKGYKEVKKDLIIKLPKYSLFELENGRKRMLASAGELQKGNELALPSKYVNFLYLASHYEKLKGSPEDNEQKQLFVEQHKHYLDEIIEQISEFSKRVILADANLDKVLSAYNKHRDKPIREQAENIIHLFTLTNLGAPAAFKYFDTTIDRKRYTSTKEVLDATLIHQSITGLYETRIDLSQLGGDGGGSSGSSGSSGSSGGLDDEYRLYSPLVKPDQNIQFWLEQFPQAWAETAGMGLAKQVPPQVIQLKASATPVSVRQYPLSKEAQEGIRPHVQRLIQQGILVPVQSPWNTPLLPVRKPGTNDYRPVQDLREVNKRVQDIHPTVPNPYNLLCALPPQRSWYTVLDLKDAFFCLRLHPTSQPLFAFEWRDPGTGRTGQLTWTRLPQGFKNSPTIFNEALHRDLANFRIQHPQVTLLQYVDDLLLAGATKQDCLEGTKALLLELSDLGYRASAKKAQICRREVTYLGYSLRDGQRWLTEARKKTVVQIPAPTTAKQVREFLGKAGFCRLFIPGFATLAAPLYPLTKPKGEFSWAPEHQKAFDAIKKALLSAPALALPDVTKPFTLYVDERKGVARGVLTQTLGPWRRPVAYLSKKLDPVASGWPVCLKAIAAVAILVKDADKLTLGQNITVIAPHALENIVRQPPDRWMTNARMTHYQSLLLTERVTFAPPAALNPATLLPEETDEPVTHDCHQLLIEETGVRKDLTDIPLTGEVLTWFTDGSSYVVEGKRMAGAAVVDGTRTIWASSLPEGTSAQKAELMALTQALRLAEGKSINIYTDSRYAFATAHVHGAIYKQRGWLTSAGREIKNKEEILSLLEALHLPKRLAIIHCPGHQKAKDPISRGNQMADRVAKQAAQGVNLLPAGKRTADGSEFEKRTADGSEFESPKKKAKVE

SEQ ID NO: 42 - protein, 2088 aa, synthetic construct
  source 1..2088: note = Description of Artificial Sequence: Synthetic polypeptide
MPAAKRVKLDGGDKKYSIGLDIGTNSVGWAVITDEYKVPSKKFKVLGNTDRHSIKKNLIGALLFDSGETAEATRLKRTARRRYTRRKNRICYLQEIFSNEMAKVDDSFFHRLEESFLVEEDKKHERHPIFGNIVDEVAYHEKYPTIYHLRKKLVDSTDKADLRLIYLALAHMIKFRGHFLIEGDLNPDNSDVDKLFIQLVQTYNQLFEENPINASGVDAKAILSARLSKSRRLENLIAQLPGEKKNGLFGNLIALSLGLTPNFKSNFDLAEDAKLQLSKDTYDDDLDNLLAQIGDQYADLFLAAKNLSDAILLSDILRVNTEITKAPLSASMIKRYDEHHQDLTLLKALVRQQLPEKYKEIFFDQSKNGYAGYIDGGASQEEFYKFIKPILEKMDGTEELLVKLNREDLLRKQRTFDNGSIPHQIHLGELHAILRRQEDFYPFLKDNREKIEKILTFRIPYYVGPLARGNSRFAWMTRKSEETITPWNFEEVVDKGASAQSFIERMTNFDKNLPNEKVLPKHSLLYEYFTVYNELTKVKYVTEGMRKPAFLSGEQKKAIVDLLFKTNRKVTVKQLKEDYFKKIECFDSVEISGVEDRFNASLGTYHDLLKIIKDKDFLDNEENEDILEDIVLTLTLFEDREMIEERLKTYAHLFDDKVMKQLKRRRYTGWGRLSRKLINGIRDKQSGKTILDFLKSDGFANRNFMQLIHDDSLTFKEDIQKAQVSGQGDSLHEHIANLAGSPAIKKGILQTVKVVDELVKVMGRHKPENIVIEMARENQTTQKGQKNSRERMKRIEEGIKELGSQILKEHPVENTQLQNEKLYLYYLQNGRDMYVDQELDINRLSDYDVDHIVPQSFLKDDSIDNKVLTRSDKARGKSDNVPSEEVVKKMKNYWRQLLNAKLITQRKFDNLTKAERGGLSELDKAGFIKRQLVETRQITKHVAQILDSRMNTKYDENDKLIREVKVITLKSKLVSDFRKDFQFYKVREINNYHHAHDAYLNAVVGTALIKKYPKLESEFVYGDYKVYDVRKMIAKSEQEIGKATAKYFFYSNIMNFFKTEITLANGEIRKRPLIETNGETGEIVWDKGRDFATVRKVLSMPQVNIVKKTEVQTGGFSKESILPKRNSDKLIARKKDWDPKKYGGFDSPTVAYSVLVVAKVEKGKSKKLKSVKELLGITIMERSSFEKNPIDFLEAKGYKEVKKDLIIKLPKYSLFELENGRKRMLASAGELQKGNELALPSKYVNFLYLASHYEKLKGSPEDNEQKQLFVEQHKHYLDEIIEQISEFSKRVILADANLDKVLSAYNKHRDKPIREQAENIIHLFTLTNLGAPAAFKYFDTTIDRKRYTSTKEVLDATLIHQSITGLYETRIDLSQLGGDGGGSSEAAAKGGGGGLDDEYRLYSPLVKPDQNIQFWLEQFPQAWAETAGMGLAKQVPPQVIQLKASATPVSVRQYPLSKEAQEGIRPHVQRLIQQGILVPVQSPWNTPLLPVRKPGTNDYRPVQDLREVNKRVQDIHPTVPNPYNLLCALPPQRSWYTVLDLKDAFFCLRLHPTSQPLFAFEWRDPGTGRTGQLTWTRLPQGFKNSPTIFNEALHRDLANFRIQHPQVTLLQYVDDLLLAGATKQDCLEGTKALLLELSDLGYRASAKKAQICRREVTYLGYSLRDGQRWLTEARKKTVVQIPAPTTAKQVREFLGKAGFCRLFIPGFATLAAPLYPLTKPKGEFSWAPEHQKAFDAIKKALLSAPALALPDVTKPFTLYVDERKGVARGVLTQTLGPWRRPVAYLSKKLDPVASGWPVCLKAIAAVAILVKDADKLTLGQNITVIAPHALENIVRQPPDRWMTNARMTHYQSLLLTERVTFAPPAALNPATLLPEETDEPVTHDCHQLLIEETGVRKDLTDIPLTGEVLTWFTDGSSYVVEGKRMAGAAVVDGTRTIWASSLPEGTSAQKAELMALTQALRLAEGKSINIYTDSRYAFATAHVHGAIYKQRGWLTSAGREIKNKEEILSLLEALHLPKRLAIIHCPGHQKAKDPISRGNQMADRVAKQAAQGVNLLPAGKRTADGSEFEKRTADGSEFESPKKKAKVE

SEQ ID NO: 43 - protein, 2086 aa, synthetic construct
  source 1..2086: note = Description of Artificial Sequence: Synthetic polypeptide
MPAAKRVKLDGGDKKYSIGLDIGTNSVGWAVITDEYKVPSKKFKVLGNTDRHSIKKNLIGALLFDSGETAEATRLKRTARRRYTRRKNRICYLQEIFSNEMAKVDDSFFHRLEESFLVEEDKKHERHPIFGNIVDEVAYHEKYPTIYHLRKKLVDSTDKADLRLIYLALAHMIKFRGHFLIEGDLNPDNSDVDKLFIQLVQTYNQLFEENPINASGVDAKAILSARLSKSRRLENLIAQLPGEKKNGLFGNLIALSLGLTPNFKSNFDLAEDAKLQLSKDTYDDDLDNLLAQIGDQYADLFLAAKNLSDAILLSDILRVNTEITKAPLSASMIKRYDEHHQDLTLLKALVRQQLPEKYKEIFFDQSKNGYAGYIDGGASQEEFYKFIKPILEKMDGTEELLVKLNREDLLRKQRTFDNGSIPHQIHLGELHAILRRQEDFYPFLKDNREKIEKILTFRIPYYVGPLARGNSRFAWMTRKSEETITPWNFEEVVDKGASAQSFIERMTNFDKNLPNEKVLPKHSLLYEYFTVYNELTKVKYVTEGMRKPAFLSGEQKKAIVDLLFKTNRKVTVKQLKEDYFKKIECFDSVEISGVEDRFNASLGTYHDLLKIIKDKDFLDNEENEDILEDIVLTLTLFEDREMIEERLKTYAHLFDDKVMKQLKRRRYTGWGRLSRKLINGIRDKQSGKTILDFLKSDGFANRNFMQLIHDDSLTFKEDIQKAQVSGQGDSLHEHIANLAGSPAIKKGILQTVKVVDELVKVMGRHKPENIVIEMARENQTTQKGQKNSRERMKRIEEGIKELGSQILKEHPVENTQLQNEKLYLYYLQNGRDMYVDQELDINRLSDYDVDHIVPQSFLKDDSIDNKVLTRSDKARGKSDNVPSEEVVKKMKNYWRQLLNAKLITQRKFDNLTKAERGGLSELDKAGFIKRQLVETRQITKHVAQILDSRMNTKYDENDKLIREVKVITLKSKLVSDFRKDFQFYKVREINNYHHAHDAYLNAVVGTALIKKYPKLESEFVYGDYKVYDVRKMIAKSEQEIGKATAKYFFYSNIMNFFKTEITLANGEIRKRPLIETNGETGEIVWDKGRDFATVRKVLSMPQVNIVKKTEVQTGGFSKESILPKRNSDKLIARKKDWDPKKYGGFDSPTVAYSVLVVAKVEKGKSKKLKSVKELLGITIMERSSFEKNPIDFLEAKGYKEVKKDLIIKLPKYSLFELENGRKRMLASAGELQKGNELALPSKYVNFLYLASHYEKLKGSPEDNEQKQLFVEQHKHYLDEIIEQISEFSKRVILADANLDKVLSAYNKHRDKPIREQAENIIHLFTLTNLGAPAAFKYFDTTIDRKRYTSTKEVLDATLIHQSITGLYETRIDLSQLGGDGGGGGGSSPAPGGLDDEYRLYSPLVKPDQNIQFWLEQFPQAWAETAGMGLAKQVPPQVIQLKASATPVSVRQYPLSKEAQEGIRPHVQRLIQQGILVPVQSPWNTPLLPVRKPGTNDYRPVQDLREVNKRVQDIHPTVPNPYNLLCALPPQRSWYTVLDLKDAFFCLRLHPTSQPLFAFEWRDPGTGRTGQLTWTRLPQGFKNSPTIFNEALHRDLANFRIQHPQVTLLQYVDDLLLAGATKQDCLEGTKALLLELSDLGYRASAKKAQICRREVTYLGYSLRDGQRWLTEARKKTVVQIPAPTTAKQVREFLGKAGFCRLFIPGFATLAAPLYPLTKPKGEFSWAPEHQKAFDAIKKALLSAPALALPDVTKPFTLYVDERKGVARGVLTQTLGPWRRPVAYLSKKLDPVASGWPVCLKAIAAVAILVKDADKLTLGQNITVIAPHALENIVRQPPDRWMTNARMTHYQSLLLTERVTFAPPAALNPATLLPEETDEPVTHDCHQLLIEETGVRKDLTDIPLTGEVLTWFTDGSSYVVEGKRMAGAAVVDGTRTIWASSLPEGTSAQKAELMALTQALRLAEGKSINIYTDSRYAFATAHVHGAIYKQRGWLTSAGREIKNKEEILSLLEALHLPKRLAIIHCPGHQKAKDPISRGNQMADRVAKQAAQGVNLLPAGKRTADGSEFEKRTADGSEFESPKKKAKVE

SEQ ID NO: 44 - protein, 2086 aa, synthetic construct
  source 1..2086: note = Description of Artificial Sequence: Synthetic polypeptide
MPAAKRVKLDGGDKKYSIGLDIGTNSVGWAVITDEYKVPSKKFKVLGNTDRHSIKKNLIGALLFDSGETAEATRLKRTARRRYTRRKNRICYLQEIFSNEMAKVDDSFFHRLEESFLVEEDKKHERHPIFGNIVDEVAYHEKYPTIYHLRKKLVDSTDKADLRLIYLALAHMIKFRGHFLIEGDLNPDNSDVDKLFIQLVQTYNQLFEENPINASGVDAKAILSARLSKSRRLENLIAQLPGEKKNGLFGNLIALSLGLTPNFKSNFDLAEDAKLQLSKDTYDDDLDNLLAQIGDQYADLFLAAKNLSDAILLSDILRVNTEITKAPLSASMIKRYDEHHQDLTLLKALVRQQLPEKYKEIFFDQSKNGYAGYIDGGASQEEFYKFIKPILEKMDGTEELLVKLNREDLLRKQRTFDNGSIPHQIHLGELHAILRRQEDFYPFLKDNREKIEKILTFRIPYYVGPLARGNSRFAWMTRKSEETITPWNFEEVVDKGASAQSFIERMTNFDKNLPNEKVLPKHSLLYEYFTVYNELTKVKYVTEGMRKPAFLSGEQKKAIVDLLFKTNRKVTVKQLKEDYFKKIECFDSVEISGVEDRFNASLGTYHDLLKIIKDKDFLDNEENEDILEDIVLTLTLFEDREMIEERLKTYAHLFDDKVMKQLKRRRYTGWGRLSRKLINGIRDKQSGKTILDFLKSDGFANRNFMQLIHDDSLTFKEDIQKAQVSGQGDSLHEHIANLAGSPAIKKGILQTVKVVDELVKVMGRHKPENIVIEMARENQTTQKGQKNSRERMKRIEEGIKELGSQILKEHPVENTQLQNEKLYLYYLQNGRDMYVDQELDINRLSDYDVDHIVPQSFLKDDSIDNKVLTRSDKARGKSDNVPSEEVVKKMKNYWRQLLNAKLITQRKFDNLTKAERGGLSELDKAGFIKRQLVETRQITKHVAQILDSRMNTKYDENDKLIREVKVITLKSKLVSDFRKDFQFYKVREINNYHHAHDAYLNAVVGTALIKKYPKLESEFVYGDYKVYDVRKMIAKSEQEIGKATAKYFFYSNIMNFFKTEITLANGEIRKRPLIETNGETGEIVWDKGRDFATVRKVLSMPQVNIVKKTEVQTGGFSKESILPKRNSDKLIARKKDWDPKKYGGFDSPTVAYSVLVVAKVEKGKSKKLKSVKELLGITIMERSSFEKNPIDFLEAKGYKEVKKDLIIKLPKYSLFELENGRKRMLASAGELQKGNELALPSKYVNFLYLASHYEKLKGSPEDNEQKQLFVEQHKHYLDEIIEQISEFSKRVILADANLDKVLSAYNKHRDKPIREQAENIIHLFTLTNLGAPAAFKYFDTTIDRKRYTSTKEVLDATLIHQSITGLYETRIDLSQLGGDGGPAPGGSGGGGGLDDEYRLYSPLVKPDQNIQFWLEQFPQAWAETAGMGLAKQVPPQVIQLKASATPVSVRQYPLSKEAQEGIRPHVQRLIQQGILVPVQSPWNTPLLPVRKPGTNDYRPVQDLREVNKRVQDIHPTVPNPYNLLCALPPQRSWYTVLDLKDAFFCLRLHPTSQPLFAFEWRDPGTGRTGQLTWTRLPQGFKNSPTIFNEALHRDLANFRIQHPQVTLLQYVDDLLLAGATKQDCLEGTKALLLELSDLGYRASAKKAQICRREVTYLGYSLRDGQRWLTEARKKTVVQIPAPTTAKQVREFLGKAGFCRLFIPGFATLAAPLYPLTKPKGEFSWAPEHQKAFDAIKKALLSAPALALPDVTKPFTLYVDERKGVARGVLTQTLGPWRRPVAYLSKKLDPVASGWPVCLKAIAAVAILVKDADKLTLGQNITVIAPHALENIVRQPPDRWMTNARMTHYQSLLLTERVTFAPPAALNPATLLPEETDEPVTHDCHQLLIEETGVRKDLTDIPLTGEVLTWFTDGSSYVVEGKRMAGAAVVDGTRTIWASSLPEGTSAQKAELMALTQALRLAEGKSINIYTDSRYAFATAHVHGAIYKQRGWLTSAGREIKNKEEILSLLEALHLPKRLAIIHCPGHQKAKDPISRGNQMADRVAKQAAQGVNLLPAGKRTADGSEFEKRTADGSEFESPKKKAKVE

SEQ ID NO: 45 - protein, 2084 aa, synthetic construct
  source 1..2084: note = Description of Artificial Sequence: Synthetic polypeptide
MPAAKRVKLDGGDKKYSIGLDIGTNSVGWAVITDEYKVPSKKFKVLGNTDRHSIKKNLIGALLFDSGETAEATRLKRTARRRYTRRKNRICYLQEIFSNEMAKVDDSFFHRLEESFLVEEDKKHERHPIFGNIVDEVAYHEKYPTIYHLRKKLVDSTDKADLRLIYLALAHMIKFRGHFLIEGDLNPDNSDVDKLFIQLVQTYNQLFEENPINASGVDAKAILSARLSKSRRLENLIAQLPGEKKNGLFGNLIALSLGLTPNFKSNFDLAEDAKLQLSKDTYDDDLDNLLAQIGDQYADLFLAAKNLSDAILLSDILRVNTEITKAPLSASMIKRYDEHHQDLTLLKALVRQQLPEKYKEIFFDQSKNGYAGYIDGGASQEEFYKFIKPILEKMDGTEELLVKLNREDLLRKQRTFDNGSIPHQIHLGELHAILRRQEDFYPFLKDNREKIEKILTFRIPYYVGPLARGNSRFAWMTRKSEETITPWNFEEVVDKGASAQSFIERMTNFDKNLPNEKVLPKHSLLYEYFTVYNELTKVKYVTEGMRKPAFLSGEQKKAIVDLLFKTNRKVTVKQLKEDYFKKIECFDSVEISGVEDRFNASLGTYHDLLKIIKDKDFLDNEENEDILEDIVLTLTLFEDREMIEERLKTYAHLFDDKVMKQLKRRRYTGWGRLSRKLINGIRDKQSGKTILDFLKSDGFANRNFMQLIHDDSLTFKEDIQKAQVSGQGDSLHEHIANLAGSPAIKKGILQTVKVVDELVKVMGRHKPENIVIEMARENQTTQKGQKNSRERMKRIEEGIKELGSQILKEHPVENTQLQNEKLYLYYLQNGRDMYVDQELDINRLSDYDVDHIVPQSFLKDDSIDNKVLTRSDKARGKSDNVPSEEVVKKMKNYWRQLLNAKLITQRKFDNLTKAERGGLSELDKAGFIKRQLVETRQITKHVAQILDSRMNTKYDENDKLIREVKVITLKSKLVSDFRKDFQFYKVREINNYHHAHDAYLNAVVGTALIKKYPKLESEFVYGDYKVYDVRKMIAKSEQEIGKATAKYFFYSNIMNFFKTEITLANGEIRKRPLIETNGETGEIVWDKGRDFATVRKVLSMPQVNIVKKTEVQTGGFSKESILPKRNSDKLIARKKDWDPKKYGGFDSPTVAYSVLVVAKVEKGKSKKLKSVKELLGITIMERSSFEKNPIDFLEAKGYKEVKKDLIIKLPKYSLFELENGRKRMLASAGELQKGNELALPSKYVNFLYLASHYEKLKGSPEDNEQKQLFVEQHKHYLDEIIEQISEFSKRVILADANLDKVLSAYNKHRDKPIREQAENIIHLFTLTNLGAPAAFKYFDTTIDRKRYTSTKEVLDATLIHQSITGLYETRIDLSQLGGDGGPAPAPAPGGLDDEYRLYSPLVKPDQNIQFWLEQFPQAWAETAGMGLAKQVPPQVIQLKASATPVSVRQYPLSKEAQEGIRPHVQRLIQQGILVPVQSPWNTPLLPVRKPGTNDYRPVQDLREVNKRVQDIHPTVPNPYNLLCALPPQRSWYTVLDLKDAFFCLRLHPTSQPLFAFEWRDPGTGRTGQLTWTRLPQGFKNSPTIFNEALHRDLANFRIQHPQVTLLQYVDDLLLAGATKQDCLEGTKALLLELSDLGYRASAKKAQICRREVTYLGYSLRDGQRWLTEARKKTVVQIPAPTTAKQVREFLGKAGFCRLFIPGFATLAAPLYPLTKPKGEFSWAPEHQKAFDAIKKALLSAPALALPDVTKPFTLYVDERKGVARGVLTQTLGPWRRPVAYLSKKLDPVASGWPVCLKAIAAVAILVKDADKLTLGQNITVIAPHALENIVRQPPDRWMTNARMTHYQSLLLTERVTFAPPAALNPATLLPEETDEPVTHDCHQLLIEETGVRKDLTDIPLTGEVLTWFTDGSSYVVEGKRMAGAAVVDGTRTIWASSLPEGTSAQKAELMALTQALRLAEGKSINIYTDSRYAFATAHVHGAIYKQRGWLTSAGREIKNKEEILSLLEALHLPKRLAIIHCPGHQKAKDPISRGNQMADRVAKQAAQGVNLLPAGKRTADGSEFEKRTADGSEFESPKKKAKVE

SEQ ID NO: 46 - protein, 2097 aa, synthetic construct
  source 1..2097: note = Description of Artificial Sequence: Synthetic polypeptide
MPAAKRVKLDGGDKKYSIGLDIGTNSVGWAVITDEYKVPSKKFKVLGNTDRHSIKKNLIGALLFDSGETAEATRLKRTARRRYTRRKNRICYLQEIFSNEMAKVDDSFFHRLEESFLVEEDKKHERHPIFGNIVDEVAYHEKYPTIYHLRKKLVDSTDKADLRLIYLALAHMIKFRGHFLIEGDLNPDNSDVDKLFIQLVQTYNQLFEENPINASGVDAKAILSARLSKSRRLENLIAQLPGEKKNGLFGNLIALSLGLTPNFKSNFDLAEDAKLQLSKDTYDDDLDNLLAQIGDQYADLFLAAKNLSDAILLSDILRVNTEITKAPLSASMIKRYDEHHQDLTLLKALVRQQLPEKYKEIFFDQSKNGYAGYIDGGASQEEFYKFIKPILEKMDGTEELLVKLNREDLLRKQRTFDNGSIPHQIHLGELHAILRRQEDFYPFLKDNREKIEKILTFRIPYYVGPLARGNSRFAWMTRKSEETITPWNFEEVVDKGASAQSFIERMTNFDKNLPNEKVLPKHSLLYEYFTVYNELTKVKYVTEGMRKPAFLSGEQKKAIVDLLFKTNRKVTVKQLKEDYFKKIECFDSVEISGVEDRFNASLGTYHDLLKIIKDKDFLDNEENEDILEDIVLTLTLFEDREMIEERLKTYAHLFDDKVMKQLKRRRYTGWGRLSRKLINGIRDKQSGKTILDFLKSDGFANRNFMQLIHDDSLTFKEDIQKAQVSGQGDSLHEHIANLAGSPAIKKGILQTVKVVDELVKVMGRHKPENIVIEMARENQTTQKGQKNSRERMKRIEEGIKELGSQILKEHPVENTQLQNEKLYLYYLQNGRDMYVDQELDINRLSDYDVDHIVPQSFLKDDSIDNKVLTRSDKARGKSDNVPSEEVVKKMKNYWRQLLNAKLITQRKFDNLTKAERGGLSELDKAGFIKRQLVETRQITKHVAQILDSRMNTKYDENDKLIREVKVITLKSKLVSDFRKDFQFYKVREINNYHHAHDAYLNAVVGTALIKKYPKLESEFVYGDYKVYDVRKMIAKSEQEIGKATAKYFFYSNIMNFFKTEITLANGEIRKRPLIETNGETGEIVWDKGRDFATVRKVLSMPQVNIVKKTEVQTGGFSKESILPKRNSDKLIARKKDWDPKKYGGFDSPTVAYSVLVVAKVEKGKSKKLKSVKELLGITIMERSSFEKNPIDFLEAKGYKEVKKDLIIKLPKYSLFELENGRKRMLASAGELQKGNELALPSKYVNFLYLASHYEKLKGSPEDNEQKQLFVEQHKHYLDEIIEQISEFSKRVILADANLDKVLSAYNKHRDKPIREQAENIIHLFTLTNLGAPAAFKYFDTTIDRKRYTSTKEVLDATLIHQSITGLYETRIDLSQLGGDGGEAAAKEAAAKEAAAKEAAAKGGLDDEYRLYSPLVKPDQNIQFWLEQFPQAWAETAGMGLAKQVPPQVIQLKASATPVSVRQYPLSKEAQEGIRPHVQRLIQQGILVPVQSPWNTPLLPVRKPGTNDYRPVQDLREVNKRVQDIHPTVPNPYNLLCALPPQRSWYTVLDLKDAFFCLRLHPTSQPLFAFEWRDPGTGRTGQLTWTRLPQGFKNSPTIFNEALHRDLANFRIQHPQVTLLQYVDDLLLAGATKQDCLEGTKALLLELSDLGYRASAKKAQICRREVTYLGYSLRDGQRWLTEARKKTVVQIPAPTTAKQVREFLGKAGFCRLFIPGFATLAAPLYPLTKPKGEFSWAPEHQKAFDAIKKALLSAPALALPDVTKPFTLYVDERKGVARGVLTQTLGPWRRPVAYLSKKLDPVASGWPVCLKAIAAVAILVKDADKLTLGQNITVIAPHALENIVRQPPDRWMTNARMTHYQSLLLTERVTFAPPAALNPATLLPEETDEPVTHDCHQLLIEETGVRKDLTDIPLTGEVLTWFTDGSSYVVEGKRMAGAAVVDGTRTIWASSLPEGTSAQKAELMALTQALRLAEGKSINIYTDSRYAFATAHVHGAIYKQRGWLTSAGREIKNKEEILSLLEALHLPKRLAIIHCPGHQKAKDPISRGNQMADRVAKQAAQGVNLLPAGKRTADGSEFEKRTADGSEFESPKKKAKVE

SEQ ID NO: 47 - protein, 2083 aa, synthetic construct
  source 1..2083: note = Description of Artificial Sequence: Synthetic polypeptide
MPAAKRVKLDGGDKKYSIGLDIGTNSVGWAVITDEYKVPSKKFKVLGNTDRHSIKKNLIGALLFDSGETAEATRLKRTARRRYTRRKNRICYLQEIFSNEMAKVDDSFFHRLEESFLVEEDKKHERHPIFGNIVDEVAYHEKYPTIYHLRKKLVDSTDKADLRLIYLALAHMIKFRGHFLIEGDLNPDNSDVDKLFIQLVQTYNQLFEENPINASGVDAKAILSARLSKSRRLENLIAQLPGEKKNGLFGNLIALSLGLTPNFKSNFDLAEDAKLQLSKDTYDDDLDNLLAQIGDQYADLFLAAKNLSDAILLSDILRVNTEITKAPLSASMIKRYDEHHQDLTLLKALVRQQLPEKYKEIFFDQSKNGYAGYIDGGASQEEFYKFIKPILEKMDGTEELLVKLNREDLLRKQRTFDNGSIPHQIHLGELHAILRRQEDFYPFLKDNREKIEKILTFRIPYYVGPLARGNSRFAWMTRKSEETITPWNFEEVVDKGASAQSFIERMTNFDKNLPNEKVLPKHSLLYEYFTVYNELTKVKYVTEGMRKPAFLSGEQKKAIVDLLFKTNRKVTVKQLKEDYFKKIECFDSVEISGVEDRFNASLGTYHDLLKIIKDKDFLDNEENEDILEDIVLTLTLFEDREMIEERLKTYAHLFDDKVMKQLKRRRYTGWGRLSRKLINGIRDKQSGKTILDFLKSDGFANRNFMQLIHDDSLTFKEDIQKAQVSGQGDSLHEHIANLAGSPAIKKGILQTVKVVDELVKVMGRHKPENIVIEMARENQTTQKGQKNSRERMKRIEEGIKELGSQILKEHPVENTQLQNEKLYLYYLQNGRDMYVDQELDINRLSDYDVDHIVPQSFLKDDSIDNKVLTRSDKARGKSDNVPSEEVVKKMKNYWRQLLNAKLITQRKFDNLTKAERGGLSELDKAGFIKRQLVETRQITKHVAQILDSRMNTKYDENDKLIREVKVITLKSKLVSDFRKDFQFYKVREINNYHHAHDAYLNAVVGTALIKKYPKLESEFVYGDYKVYDVRKMIAKSEQEIGKATAKYFFYSNIMNFFKTEITLANGEIRKRPLIETNGETGEIVWDKGRDFATVRKVLSMPQVNIVKKTEVQTGGFSKESILPKRNSDKLIARKKDWDPKKYGGFDSPTVAYSVLVVAKVEKGKSKKLKSVKELLGITIMERSSFEKNPIDFLEAKGYKEVKKDLIIKLPKYSLFELENGRKRMLASAGELQKGNELALPSKYVNFLYLASHYEKLKGSPEDNEQKQLFVEQHKHYLDEIIEQISEFSKRVILADANLDKVLSAYNKHRDKPIREQAENIIHLFTLTNLGAPAAFKYFDTTIDRKRYTSTKEVLDATLIHQSITGLYETRIDLSQLGGDGGGSSPAPGGLDDEYRLYSPLVKPDQNIQFWLEQFPQAWAETAGMGLAKQVPPQVIQLKASATPVSVRQYPLSKEAQEGIRPHVQRLIQQGILVPVQSPWNTPLLPVRKPGTNDYRPVQDLREVNKRVQDIHPTVPNPYNLLCALPPQRSWYTVLDLKDAFFCLRLHPTSQPLFAFEWRDPGTGRTGQLTWTRLPQGFKNSPTIFNEALHRDLANFRIQHPQVTLLQYVDDLLLAGATKQDCLEGTKALLLELSDLGYRASAKKAQICRREVTYLGYSLRDGQRWLTEARKKTVVQIPAPTTAKQVREFLGKAGFCRLFIPGFATLAAPLYPLTKPKGEFSWAPEHQKAFDAIKKALLSAPALALPDVTKPFTLYVDERKGVARGVLTQTLGPWRRPVAYLSKKLDPVASGWPVCLKAIAAVAILVKDADKLTLGQNITVIAPHALENIVRQPPDRWMTNARMTHYQSLLLTERVTFAPPAALNPATLLPEETDEPVTHDCHQLLIEETGVRKDLTDIPLTGEVLTWFTDGSSYVVEGKRMAGAAVVDGTRTIWASSLPEGTSAQKAELMALTQALRLAEGKSINIYTDSRYAFATAHVHGAIYKQRGWLTSAGREIKNKEEILSLLEALHLPKRLAIIHCPGHQKAKDPISRGNQMADRVAKQAAQGVNLLPAGKRTADGSEFEKRTADGSEFESPKKKAKVE

SEQ ID NO: 48 - protein, 2085 aa, synthetic construct
  source 1..2085: note = Description of Artificial Sequence: Synthetic polypeptide
MPAAKRVKLDGGDKKYSIGLDIGTNSVGWAVITDEYKVPSKKFKVLGNTDRHSIKKNLIGALLFDSGETAEATRLKRTARRRYTRRKNRICYLQEIFSNEMAKVDDSFFHRLEESFLVEEDKKHERHPIFGNIVDEVAYHEKYPTIYHLRKKLVDSTDKADLRLIYLALAHMIKFRGHFLIEGDLNPDNSDVDKLFIQLVQTYNQLFEENPINASGVDAKAILSARLSKSRRLENLIAQLPGEKKNGLFGNLIALSLGLTPNFKSNFDLAEDAKLQLSKDTYDDDLDNLLAQIGDQYADLFLAAKNLSDAILLSDILRVNTEITKAPLSASMIKRYDEHHQDLTLLKALVRQQLPEKYKEIFFDQSKNGYAGYIDGGASQEEFYKFIKPILEKMDGTEELLVKLNREDLLRKQRTFDNGSIPHQIHLGELHAILRRQEDFYPFLKDNREKIEKILTFRIPYYVGPLARGNSRFAWMTRKSEETITPWNFEEVVDKGASAQSFIERMTNFDKNLPNEKVLPKHSLLYEYFTVYNELTKVKYVTEGMRKPAFLSGEQKKAIVDLLFKTNRKVTVKQLKEDYFKKIECFDSVEISGVEDRFNASLGTYHDLLKIIKDKDFLDNEENEDILEDIVLTLTLFEDREMIEERLKTYAHLFDDKVMKQLKRRRYTGWGRLSRKLINGIRDKQSGKTILDFLKSDGFANRNFMQLIHDDSLTFKEDIQKAQVSGQGDSLHEHIANLAGSPAIKKGILQTVKVVDELVKVMGRHKPENIVIEMARENQTTQKGQKNSRERMKRIEEGIKELGSQILKEHPVENTQLQNEKLYLYYLQNGRDMYVDQELDINRLSDYDVDHIVPQSFLKDDSIDNKVLTRSDKARGKSDNVPSEEVVKKMKNYWRQLLNAKLITQRKFDNLTKAERGGLSELDKAGFIKRQLVETRQITKHVAQILDSRMNTKYDENDKLIREVKVITLKSKLVSDFRKDFQFYKVREINNYHHAHDAYLNAVVGTALIKKYPKLESEFVYGDYKVYDVRKMIAKSEQEIGKATAKYFFYSNIMNFFKTEITLANGEIRKRPLIETNGETGEIVWDKGRDFATVRKVLSMPQVNIVKKTEVQTGGFSKESILPKRNSDKLIARKKDWDPKKYGGFDSPTVAYSVLVVAKVEKGKSKKLKSVKELLGITIMERSSFEKNPIDFLEAKGYKEVKKDLIIKLPKYSLFELENGRKRMLASAGELQKGNELALPSKYVNFLYLASHYEKLKGSPEDNEQKQLFVEQHKHYLDEIIEQISEFSKRVILADANLDKVLSAYNKHRDKPIREQAENIIHLFTLTNLGAPAAFKYFDTTIDRKRYTSTKEVLDATLIHQSITGLYETRIDLSQLGGDGGEAAAKGGGGGLDDEYRLYSPLVKPDQNIQFWLEQFPQAWAETAGMGLAKQVPPQVIQLKASATPVSVRQYPLSKEAQEGIRPHVQRLIQQGILVPVQSPWNTPLLPVRKPGTNDYRPVQDLREVNKRVQDIHPTVPNPYNLLCALPPQRSWYTVLDLKDAFFCLRLHPTSQPLFAFEWRDPGTGRTGQLTWTRLPQGFKNSPTIFNEALHRDLANFRIQHPQVTLLQYVDDLLLAGATKQDCLEGTKALLLELSDLGYRASAKKAQICRREVTYLGYSLRDGQRWLTEARKKTVVQIPAPTTAKQVREFLGKAGFCRLFIPGFATLAAPLYPLTKPKGEFSWAPEHQKAFDAIKKALLSAPALALPDVTKPFTLYVDERKGVARGVLTQTLGPWRRPVAYLSKKLDPVASGWPVCLKAIAAVAILVKDADKLTLGQNITVIAPHALENIVRQPPDRWMTNARMTHYQSLLLTERVTFAPPAALNPATLLPEETDEPVTHDCHQLLIEETGVRKDLTDIPLTGEVLTWFTDGSSYVVEGKRMAGAAVVDGTRTIWASSLPEGTSAQKAELMALTQALRLAEGKSINIYTDSRYAFATAHVHGAIYKQRGWLTSAGREIKNKEEILSLLEALHLPKRLAIIHCPGHQKAKDPISRGNQMADRVAKQAAQGVNLLPAGKRTADGSEFEKRTADGSEFESPKKKAKVE

SEQ ID NO: 49 - protein, 2088 aa, synthetic construct
  source 1..2088: note = Description of Artificial Sequence: Synthetic polypeptide
MPAAKRVKLDGGDKKYSIGLDIGTNSVGWAVITDEYKVPSKKFKVLGNTDRHSIKKNLIGALLFDSGETAEATRLKRTARRRYTRRKNRICYLQEIFSNEMAKVDDSFFHRLEESFLVEEDKKHERHPIFGNIVDEVAYHEKYPTIYHLRKKLVDSTDKADLRLIYLALAHMIKFRGHFLIEGDLNPDNSDVDKLFIQLVQTYNQLFEENPINASGVDAKAILSARLSKSRRLENLIAQLPGEKKNGLFGNLIALSLGLTPNFKSNFDLAEDAKLQLSKDTYDDDLDNLLAQIGDQYADLFLAAKNLSDAILLSDILRVNTEITKAPLSASMIKRYDEHHQDLTLLKALVRQQLPEKYKEIFFDQSKNGYAGYIDGGASQEEFYKFIKPILEKMDGTEELLVKLNREDLLRKQRTFDNGSIPHQIHLGELHAILRRQEDFYPFLKDNREKIEKILTFRIPYYVGPLARGNSRFAWMTRKSEETITPWNFEEVVDKGASAQSFIERMTNFDKNLPNEKVLPKHSLLYEYFTVYNELTKVKYVTEGMRKPAFLSGEQKKAIVDLLFKTNRKVTVKQLKEDYFKKIECFDSVEISGVEDRFNASLGTYHDLLKIIKDKDFLDNEENEDILEDIVLTLTLFEDREMIEERLKTYAHLFDDKVMKQLKRRRYTGWGRLSRKLINGIRDKQSGKTILDFLKSDGFANRNFMQLIHDDSLTFKEDIQKAQVSGQGDSLHEHIANLAGSPAIKKGILQTVKVVDELVKVMGRHKPENIVIEMARENQTTQKGQKNSRERMKRIEEGIKELGSQILKEHPVENTQLQNEKLYLYYLQNGRDMYVDQELDINRLSDYDVDHIVPQSFLKDDSIDNKVLTRSDKARGKSDNVPSEEVVKKMKNYWRQLLNAKLITQRKFDNLTKAERGGLSELDKAGFIKRQLVETRQITKHVAQILDSRMNTKYDENDKLIREVKVITLKSKLVSDFRKDFQFYKVREINNYHHAHDAYLNAVVGTALIKKYPKLESEFVYGDYKVYDVRKMIAKSEQEIGKATAKYFFYSNIMNFFKTEITLANGEIRKRPLIETNGETGEIVWDKGRDFATVRKVLSMPQVNIVKKTEVQTGGFSKESILPKRNSDKLIARKKDWDPKKYGGFDSPTVAYSVLVVAKVEKGKSKKLKSVKELLGITIMERSSFEKNPIDFLEAKGYKEVKKDLIIKLPKYSLFELENGRKRMLASAGELQKGNELALPSKYVNFLYLASHYEKLKGSPEDNEQKQLFVEQHKHYLDEIIEQISEFSKRVILADANLDKVLSAYNKHRDKPIREQAENIIHLFTLTNLGAPAAFKYFDTTIDRKRYTSTKEVLDATLIHQSITGLYETRIDLSQLGGDGGGGSEAAAKPAPGGLDDEYRLYSPLVKPDQNIQFWLEQFPQAWAETAGMGLAKQVPPQVIQLKASATPVSVRQYPLSKEAQEGIRPHVQRLIQQGILVPVQSPWNTPLLPVRKPGTNDYRPVQDLREVNKRVQDIHPTVPNPYNLLCALPPQRSWYTVLDLKDAFFCLRLHPTSQPLFAFEWRDPGTGRTGQLTWTRLPQGFKNSPTIFNEALHRDLANFRIQHPQVTLLQYVDDLLLAGATKQDCLEGTKALLLELSDLGYRASAKKAQICRREVTYLGYSLRDGQRWLTEARKKTVVQIPAPTTAKQVREFLGKAGFCRLFIPGFATLAAPLYPLTKPKGEFSWAPEHQKAFDAIKKALLSAPALALPDVTKPFTLYVDERKGVARGVLTQTLGPWRRPVAYLSKKLDPVASGWPVCLKAIAAVAILVKDADKLTLGQNITVIAPHALENIVRQPPDRWMTNARMTHYQSLLLTERVTFAPPAALNPATLLPEETDEPVTHDCHQLLIEETGVRKDLTDIPLTGEVLTWFTDGSSYVVEGKRMAGAAVVDGTRTIWASSLPEGTSAQKAELMALTQALRLAEGKSINIYTDSRYAFATAHVHGAIYKQRGWLTSAGREIKNKEEILSLLEALHLPKRLAIIHCPGHQKAKDPISRGNQMADRVAKQAAQGVNLLPAGKRTADGSEFEKRTADGSEFESPKKKAKVE

SEQ ID NO: 50 - protein, 2088 aa, synthetic construct
  source 1..2088: note = Description of Artificial Sequence: Synthetic polypeptide
MPAAKRVKLDGGDKKYSIGLDIGTNSVGWAVITDEYKVPSKKFKVLGNTDRHSIKKNLIGALLFDSGETAEATRLKRTARRRYTRRKNRICYLQEIFSNEMAKVDDSFFHRLEESFLVEEDKKHERHPIFGNIVDEVAYHEKYPTIYHLRKKLVDSTDKADLRLIYLALAHMIKFRGHFLIEGDLNPDNSDVDKLFIQLVQTYNQLFEENPINASGVDAKAILSARLSKSRRLENLIAQLPGEKKNGLFGNLIALSLGLTPNFKSNFDLAEDAKLQLSKDTYDDDLDNLLAQIGDQYADLFLAAKNLSDAILLSDILRVNTEITKAPLSASMIKRYDEHHQDLTLLKALVRQQLPEKYKEIFFDQSKNGYAGYIDGGASQEEFYKFIKPILEKMDGTEELLVKLNREDLLRKQRTFDNGSIPHQIHLGELHAILRRQEDFYPFLKDNREKIEKILTFRIPYYVGPLARGNSRFAWMTRKSEETITPWNFEEVVDKGASAQSFIERMTNFDKNLPNEKVLPKHSLLYEYFTVYNELTKVKYVTEGMRKPAFLSGEQKKAIVDLLFKTNRKVTVKQLKEDYFKKIECFDSVEISGVEDRFNASLGTYHDLLKIIKDKDFLDNEENEDILEDIVLTLTLFEDREMIEERLKTYAHLFDDKVMKQLKRRRYTGWGRLSRKLINGIRDKQSGKTILDFLKSDGFANRNFMQLIHDDSLTFKEDIQKAQVSGQGDSLHEHIANLAGSPAIKKGILQTVKVVDELVKVMGRHKPENIVIEMARENQTTQKGQKNSRERMKRIEEGIKELGSQILKEHPVENTQLQNEKLYLYYLQNGRDMYVDQELDINRLSDYDVDHIVPQSFLKDDSIDNKVLTRSDKARGKSDNVPSEEVVKKMKNYWRQLLNAKLITQRKFDNLTKAERGGLSELDKAGFIKRQLVETRQITKHVAQILDSRMNTKYDENDKLIREVKVITLKSKLVSDFRKDFQFYKVREINNYHHAHDAYLNAVVGTALIKKYPKLESEFVYGDYKVYDVRKMIAKSEQEIGKATAKYFFYSNIMNFFKTEITLANGEIRKRPLIETNGETGEIVWDKGRDFATVRKVLSMPQVNIVKKTEVQTGGFSKESILPKRNSDKLIARKKDWDPKKYGGFDSPTVAYSVLVVAKVEKGKSKKLKSVKELLGITIMERSSFEKNPIDFLEAKGYKEVKKDLIIKLPKYSLFELENGRKRMLASAGELQKGNELALPSKYVNFLYLASHYEKLKGSPEDNEQKQLFVEQHKHYLDEIIEQISEFSKRVILADANLDKVLSAYNKHRDKPIREQAENIIHLFTLTNLGAPAAFKYFDTTIDRKRYTSTKEVLDATLIHQSITGLYETRIDLSQLGGDGGPAPGGGEAAAKGGLDDEYRLYSPLVKPDQNIQFWLEQFPQAWAETAGMGLAKQVPPQVIQLKASATPVSVRQYPLSKEAQEGIRPHVQRLIQQGILVPVQSPWNTPLLPVRKPGTNDYRPVQDLREVNKRVQDIHPTVPNPYNLLCALPPQRSWYTVLDLKDAFFCLRLHPTSQPLFAFEWRDPGTGRTGQLTWTRLPQGFKNSPTIFNEALHRDLANFRIQHPQVTLLQYVDDLLLAGATKQDCLEGTKALLLELSDLGYRASAKKAQICRREVTYLGYSLRDGQRWLTEARKKTVVQIPAPTTAKQVREFLGKAGFCRLFIPGFATLAAPLYPLTKPKGEFSWAPEHQKAFDAIKKALLSAPALALPDVTKPFTLYVDERKGVARGVLTQTLGPWRRPVAYLSKKLDPVASGWPVCLKAIAAVAILVKDADKLTLGQNITVIAPHALENIVRQPPDRWMTNARMTHYQSLLLTERVTFAPPAALNPATLLPEETDEPVTHDCHQLLIEETGVRKDLTDIPLTGEVLTWFTDGSSYVVEGKRMAGAAVVDGTRTIWASSLPEGTSAQKAELMALTQALRLAEGKSINIYTDSRYAFATAHVHGAIYKQRGWLTSAGREIKNKEEILSLLEALHLPKRLAIIHCPGHQKAKDPISRGNQMADRVAKQAAQGVNLLPAGKRTADGSEFEKRTADGSEFESPKKKAKVE

SEQ ID NO: 51 - protein, 2092 aa, synthetic construct
  source 1..2092: note = Description of Artificial Sequence: Synthetic polypeptide
MPAAKRVKLDGGDKKYSIGLDIGTNSVGWAVITDEYKVPSKKFKVLGNTDRHSIKKNLIGALLFDSGETAEATRLKRTARRRYTRRKNRICYLQEIFSNEMAKVDDSFFHRLEESFLVEEDKKHERHPIFGNIVDEVAYHEKYPTIYHLRKKLVDSTDKADLRLIYLALAHMIKFRGHFLIEGDLNPDNSDVDKLFIQLVQTYNQLFEENPINASGVDAKAILSARLSKSRRLENLIAQLPGEKKNGLFGNLIALSLGLTPNFKSNFDLAEDAKLQLSKDTYDDDLDNLLAQIGDQYADLFLAAKNLSDAILLSDILRVNTEITKAPLSASMIKRYDEHHQDLTLLKALVRQQLPEKYKEIFFDQSKNGYAGYIDGGASQEEFYKFIKPILEKMDGTEELLVKLNREDLLRKQRTFDNGSIPHQIHLGELHAILRRQEDFYPFLKDNREKIEKILTFRIPYYVGPLARGNSRFAWMTRKSEETITPWNFEEVVDKGASAQSFIERMTNFDKNLPNEKVLPKHSLLYEYFTVYNELTKVKYVTEGMRKPAFLSGEQKKAIVDLLFKTNRKVTVKQLKEDYFKKIECFDSVEISGVEDRFNASLGTYHDLLKIIKDKDFLDNEENEDILEDIVLTLTLFEDREMIEERLKTYAHLFDDKVMKQLKRRRYTGWGRLSRKLINGIRDKQSGKTILDFLKSDGFANRNFMQLIHDDSLTFKEDIQKAQVSGQGDSLHEHIANLAGSPAIKKGILQTVKVVDELVKVMGRHKPENIVIEMARENQTTQKGQKNSRERMKRIEEGIKELGSQILKEHPVENTQLQNEKLYLYYLQNGRDMYVDQELDINRLSDYDVDHIVPQSFLKDDSIDNKVLTRSDKARGKSDNVPSEEVVKKMKNYWRQLLNAKLITQRKFDNLTKAERGGLSELDKAGFIKRQLVETRQITKHVAQILDSRMNTKYDENDKLIREVKVITLKSKLVSDFRKDFQFYKVREINNYHHAHDAYLNAVVGTALIKKYPKLESEFVYGDYKVYDVRKMIAKSEQEIGKATAKYFFYSNIMNFFKTEITLANGEIRKRPLIETNGETGEIVWDKGRDFATVRKVLSMPQVNIVKKTEVQTGGFSKESILPKRNSDKLIARKKDWDPKKYGGFDSPTVAYSVLVVAKVEKGKSKKLKSVKELLGITIMERSSFEKNPIDFLEAKGYKEVKKDLIIKLPKYSLFELENGRKRMLASAGELQKGNELALPSKYVNFLYLASHYEKLKGSPEDNEQKQLFVEQHKHYLDEIIEQISEFSKRVILADANLDKVLSAYNKHRDKPIREQAENIIHLFTLTNLGAPAAFKYFDTTIDRKRYTSTKEVLDATLIHQSITGLYETRIDLSQLGGDGGGGGGSGGGGSGGGGSGGLDDEYRLYSPLVKPDQNIQFWLEQFPQAWAETAGMGLAKQVPPQVIQLKASATPVSVRQYPLSKEAQEGIRPHVQRLIQQGILVPVQSPWNTPLLPVRKPGTNDYRPVQDLREVNKRVQDIHPTVPNPYNLLCALPPQRSWYTVLDLKDAFFCLRLHPTSQPLFAFEWRDPGTGRTGQLTWTRLPQGFKNSPTIFNEALHRDLANFRIQHPQVTLLQYVDDLLLAGATKQDCLEGTKALLLELSDLGYRASAKKAQICRREVTYLGYSLRDGQRWLTEARKKTVVQIPAPTTAKQVREFLGKAGFCRLFIPGFATLAAPLYPLTKPKGEFSWAPEHQKAFDAIKKALLSAPALALPDVTKPFTLYVDERKGVARGVLTQTLGPWRRPVAYLSKKLDPVASGWPVCLKAIAAVAILVKDADKLTLGQNITVIAPHALENIVRQPPDRWMTNARMTHYQSLLLTERVTFAPPAALNPATLLPEETDEPVTHDCHQLLIEETGVRKDLTDIPLTGEVLTWFTDGSSYVVEGKRMAGAAVVDGTRTIWASSLPEGTSAQKAELMALTQALRLAEGKSINIYTDSRYAFATAHVHGAIYKQRGWLTSAGREIKNKEEILSLLEALHLPKRLAIIHCPGHQKAKDPISRGNQMADRVAKQAAQGVNLLPAGKRTADGSEFEKRTADGSEFESPKKKAKVE

SEQ ID NO: 52 - protein, 2092 aa, synthetic construct
  source 1..2092: note = Description of Artificial Sequence: Synthetic polypeptide
MPAAKRVKLDGGDKKYSIGLDIGTNSVGWAVITDEYKVPSKKFKVLGNTDRHSIKKNLIGALLFDSGETAEATRLKRTARRRYTRRKNRICYLQEIFSNEMAKVDDSFFHRLEESFLVEEDKKHERHPIFGNIVDEVAYHEKYPTIYHLRKKLVDSTDKADLRLIYLALAHMIKFRGHFLIEGDLNPDNSDVDKLFIQLVQTYNQLFEENPINASGVDAKAILSARLSKSRRLENLIAQLPGEKKNGLFGNLIALSLGLTPNFKSNFDLAEDAKLQLSKDTYDDDLDNLLAQIGDQYADLFLAAKNLSDAILLSDILRVNTEITKAPLSASMIKRYDEHHQDLTLLKALVRQQLPEKYKEIFFDQSKNGYAGYIDGGASQEEFYKFIKPILEKMDGTEELLVKLNREDLLRKQRTFDNGSIPHQIHLGELHAILRRQEDFYPFLKDNREKIEKILTFRIPYYVGPLARGNSRFAWMTRKSEETITPWNFEEVVDKGASAQSFIERMTNFDKNLPNEKVLPKHSLLYEYFTVYNELTKVKYVTEGMRKPAFLSGEQKKAIVDLLFKTNRKVTVKQLKEDYFKKIECFDSVEISGVEDRFNASLGTYHDLLKIIKDKDFLDNEENEDILEDIVLTLTLFEDREMIEERLKTYAHLFDDKVMKQLKRRRYTGWGRLSRKLINGIRDKQSGKTILDFLKSDGFANRNFMQLIHDDSLTFKEDIQKAQVSGQGDSLHEHIANLAGSPAIKKGILQTVKVVDELVKVMGRHKPENIVIEMARENQTTQKGQKNSRERMKRIEEGIKELGSQILKEHPVENTQLQNEKLYLYYLQNGRDMYVDQELDINRLSDYDVDHIVPQSFLKDDSIDNKVLTRSDKARGKSDNVPSEEVVKKMKNYWRQLLNAKLITQRKFDNLTKAERGGLSELDKAGFIKRQLVETRQITKHVAQILDSRMNTKYDENDKLIREVKVITLKSKLVSDFRKDFQFYKVREINNYHHAHDAYLNAVVGTALIKKYPKLESEFVYGDYKVYDVRKMIAKSEQEIGKATAKYFFYSNIMNFFKTEITLANGEIRKRPLIETNGETGEIVWDKGRDFATVRKVLSMPQVNIVKKTEVQTGGFSKESILPKRNSDKLIARKKDWDPKKYGGFDSPTVAYSVLVVAKVEKGKSKKLKSVKELLGITIMERSSFEKNPIDFLEAKGYKEVKKDLIIKLPKYSLFELENGRKRMLASAGELQKGNELALPSKYVNFLYLASHYEKLKGSPEDNEQKQLFVEQHKHYLDEIIEQISEFSKRVILADANLDKVLSAYNKHRDKPIREQAENIIHLFTLTNLGAPAAFKYFDTTIDRKRYTSTKEVLDATLIHQSITGLYETRIDLSQLGGDGGGGSGGSGGSGGSGGSGGLDDEYRLYSPLVKPDQNIQFWLEQFPQAWAETAGMGLAKQVPPQVIQLKASATPVSVRQYPLSKEAQEGIRPHVQRLIQQGILVPVQSPWNTPLLPVRKPGTNDYRPVQDLREVNKRVQDIHPTVPNPYNLLCALPPQRSWYTVLDLKDAFFCLRLHPTSQPLFAFEWRDPGTGRTGQLTWTRLPQGFKNSPTIFNEALHRDLANFRIQHPQVTLLQYVDDLLLAGATKQDCLEGTKALLLELSDLGYRASAKKAQICRREVTYLGYSLRDGQRWLTEARKKTVVQIPAPTTAKQVREFLGKAGFCRLFIPGFATLAAPLYPLTKPKGEFSWAPEHQKAFDAIKKALLSAPALALPDVTKPFTLYVDERKGVARGVLTQTLGPWRRPVAYLSKKLDPVASGWPVCLKAIAAVAILVKDADKLTLGQNITVIAPHALENIVRQPPDRWMTNARMTHYQSLLLTERVTFAPPAALNPATLLPEETDEPVTHDCHQLLIEETGVRKDLTDIPLTGEVLTWFTDGSSYVVEGKRMAGAAVVDGTRTIWASSLPEGTSAQKAELMALTQALRLAEGKSINIYTDSRYAFATAHVHGAIYKQRGWLTSAGREIKNKEEILSLLEALHLPKRLAIIHCPGHQKAKDPISRGNQMADRVAKQAAQGVNLLPAGKRTADGSEFEKRTADGSEFESPKKKAKVE

SEQ ID NO: 53 - protein, 2088 aa, synthetic construct
  source 1..2088: note = Description of Artificial Sequence: Synthetic polypeptide
MPAAKRVKLDGGDKKYSIGLDIGTNSVGWAVITDEYKVPSKKFKVLGNTDRHSIKKNLIGALLFDSGETAEATRLKRTARRRYTRRKNRICYLQEIFSNEMAKVDDSFFHRLEESFLVEEDKKHERHPIFGNIVDEVAYHEKYPTIYHLRKKLVDSTDKADLRLIYLALAHMIKFRGHFLIEGDLNPDNSDVDKLFIQLVQTYNQLFEENPINASGVDAKAILSARLSKSRRLENLIAQLPGEKKNGLFGNLIALSLGLTPNFKSNFDLAEDAKLQLSKDTYDDDLDNLLAQIGDQYADLFLAAKNLSDAILLSDILRVNTEITKAPLSASMIKRYDEHHQDLTLLKALVRQQLPEKYKEIFFDQSKNGYAGYIDGGASQEEFYKFIKPILEKMDGTEELLVKLNREDLLRKQRTFDNGSIPHQIHLGELHAILRRQEDFYPFLKDNREKIEKILTFRIPYYVGPLARGNSRFAWMTRKSEETITPWNFEEVVDKGASAQSFIERMTNFDKNLPNEKVLPKHSLLYEYFTVYNELTKVKYVTEGMRKPAFLSGEQKKAIVDLLFKTNRKVTVKQLKEDYFKKIECFDSVEISGVEDRFNASLGTYHDLLKIIKDKDFLDNEENEDILEDIVLTLTLFEDREMIEERLKTYAHLFDDKVMKQLKRRRYTGWGRLSRKLINGIRDKQSGKTILDFLKSDGFANRNFMQLIHDDSLTFKEDIQKAQVSGQGDSLHEHIANLAGSPAIKKGILQTVKVVDELVKVMGRHKPENIVIEMARENQTTQKGQKNSRERMKRIEEGIKELGSQILKEHPVENTQLQNEKLYLYYLQNGRDMYVDQELDINRLSDYDVDHIVPQSFLKDDSIDNKVLTRSDKARGKSDNVPSEEVVKKMKNYWRQLLNAKLITQRKFDNLTKAERGGLSELDKAGFIKRQLVETRQITKHVAQILDSRMNTKYDENDKLIREVKVITLKSKLVSDFRKDFQFYKVREINNYHHAHDAYLNAVVGTALIKKYPKLESEFVYGDYKVYDVRKMIAKSEQEIGKATAKYFFYSNIMNFFKTEITLANGEIRKRPLIETNGETGEIVWDKGRDFATVRKVLSMPQVNIVKKTEVQTGGFSKESILPKRNSDKLIARKKDWDPKKYGGFDSPTVAYSVLVVAKVEKGKSKKLKSVKELLGITIMERSSFEKNPIDFLEAKGYKEVKKDLIIKLPKYSLFELENGRKRMLASAGELQKGNELALPSKYVNFLYLASHYEKLKGSPEDNEQKQLFVEQHKHYLDEIIEQISEFSKRVILADANLDKVLSAYNKHRDKPIREQAENIIHLFTLTNLGAPAAFKYFDTTIDRKRYTSTKEVLDATLIHQSITGLYETRIDLSQLGGDGGEAAAKGGGGSSGGLDDEYRLYSPLVKPDQNIQFWLEQFPQAWAETAGMGLAKQVPPQVIQLKASATPVSVRQYPLSKEAQEGIRPHVQRLIQQGILVPVQSPWNTPLLPVRKPGTNDYRPVQDLREVNKRVQDIHPTVPNPYNLLCALPPQRSWYTVLDLKDAFFCLRLHPTSQPLFAFEWRDPGTGRTGQLTWTRLPQGFKNSPTIFNEALHRDLANFRIQHPQVTLLQYVDDLLLAGATKQDCLEGTKALLLELSDLGYRASAKKAQICRREVTYLGYSLRDGQRWLTEARKKTVVQIPAPTTAKQVREFLGKAGFCRLFIPGFATLAAPLYPLTKPKGEFSWAPEHQKAFDAIKKALLSAPALALPDVTKPFTLYVDERKGVARGVLTQTLGPWRRPVAYLSKKLDPVASGWPVCLKAIAAVAILVKDADKLTLGQNITVIAPHALENIVRQPPDRWMTNARMTHYQSLLLTERVTFAPPAALNPATLLPEETDEPVTHDCHQLLIEETGVRKDLTDIPLTGEVLTWFTDGSSYVVEGKRMAGAAVVDGTRTIWASSLPEGTSAQKAELMALTQALRLAEGKSINIYTDSRYAFATAHVHGAIYKQRGWLTSAGREIKNKEEILSLLEALHLPKRLAIIHCPGHQKAKDPISRGNQMADRVAKQAAQGVNLLPAGKRTADGSEFEKRTADGSEFESPKKKAKVE

SEQ ID NO: 54 - protein, 2090 aa, synthetic construct
  source 1..2090: note = Description of Artificial Sequence: Synthetic polypeptide
MPAAKRVKLDGGDKKYSIGLDIGTNSVGWAVITDEYKVPSKKFKVLGNTDRHSIKKNLIGALLFDSGETAEATRLKRTARRRYTRRKNRICYLQEIFSNEMAKVDDSFFHRLEESFLVEEDKKHERHPIFGNIVDEVAYHEKYPTIYHLRKKLVDSTDKADLRLIYLALAHMIKFRGHFLIEGDLNPDNSDVDKLFIQLVQTYNQLFEENPINASGVDAKAILSARLSKSRRLENLIAQLPGEKKNGLFGNLIALSLGLTPNFKSNFDLAEDAKLQLSKDTYDDDLDNLLAQIGDQYADLFLAAKNLSDAILLSDILRVNTEITKAPLSASMIKRYDEHHQDLTLLKALVRQQLPEKYKEIFFDQSKNGYAGYIDGGASQEEFYKFIKPILEKMDGTEELLVKLNREDLLRKQRTFDNGSIPHQIHLGELHAILRRQEDFYPFLKDNREKIEKILTFRIPYYVGPLARGNSRFAWMTRKSEETITPWNFEEVVDKGASAQSFIERMTNFDKNLPNEKVLPKHSLLYEYFTVYNELTKVKYVTEGMRKPAFLSGEQKKAIVDLLFKTNRKVTVKQLKEDYFKKIECFDSVEISGVEDRFNASLGTYHDLLKIIKDKDFLDNEENEDILEDIVLTLTLFEDREMIEERLKTYAHLFDDKVMKQLKRRRYTGWGRLSRKLINGIRDKQSGKTILDFLKSDGFANRNFMQLIHDDSLTFKEDIQKAQVSGQGDSLHEHIANLAGSPAIKKGILQTVKVVDELVKVMGRHKPENIVIEMARENQTTQKGQKNSRERMKRIEEGIKELGSQILKEHPVENTQLQNEKLYLYYLQNGRDMYVDQELDINRLSDYDVDHIVPQSFLKDDSIDNKVLTRSDKARGKSDNVPSEEVVKKMKNYWRQLLNAKLITQRKFDNLTKAERGGLSELDKAGFIKRQLVETRQITKHVAQILDSRMNTKYDENDKLIREVKVITLKSKLVSDFRKDFQFYKVREINNYHHAHDAYLNAVVGTALIKKYPKLESEFVYGDYKVYDVRKMIAKSEQEIGKATAKYFFYSNIMNFFKTEITLANGEIRKRPLIETNGETGEIVWDKGRDFATVRKVLSMPQVNIVKKTEVQTGGFSKESILPKRNSDKLIARKKDWDPKKYGGFDSPTVAYSVLVVAKVEKGKSKKLKSVKELLGITIMERSSFEKNPIDFLEAKGYKEVKKDLIIKLPKYSLFELENGRKRMLASAGELQKGNELALPSKYVNFLYLASHYEKLKGSPEDNEQKQLFVEQHKHYLDEIIEQISEFSKRVILADANLDKVLSAYNKHRDKPIREQAENIIHLFTLTNLGAPAAFKYFDTTIDRKRYTSTKEVLDATLIHQSITGLYETRIDLSQLGGDGGPAPAPAPAPAPAPGGLDDEYRLYSPLVKPDQNIQFWLEQFPQAWAETAGMGLAKQVPPQVIQLKASATPVSVRQYPLSKEAQEGIRPHVQRLIQQGILVPVQSPWNTPLLPVRKPGTNDYRPVQDLREVNKRVQDIHPTVPNPYNLLCALPPQRSWYTVLDLKDAFFCLRLHPTSQPLFAFEWRDPGTGRTGQLTWTRLPQGFKNSPTIFNEALHRDLANFRIQHPQVTLLQYVDDLLLAGATKQDCLEGTKALLLELSDLGYRASAKKAQICRREVTYLGYSLRDGQRWLTEARKKTVVQIPAPTTAKQVREFLGKAGFCRLFIPGFATLAAPLYPLTKPKGEFSWAPEHQKAFDAIKKALLSAPALALPDVTKPFTLYVDERKGVARGVLTQTLGPWRRPVAYLSKKLDPVASGWPVCLKAIAAVAILVKDADKLTLGQNITVIAPHALENIVRQPPDRWMTNARMTHYQSLLLTERVTFAPPAALNPATLLPEETDEPVTHDCHQLLIEETGVRKDLTDIPLTGEVLTWFTDGSSYVVEGKRMAGAAVVDGTRTIWASSLPEGTSAQKAELMALTQALRLAEGKSINIYTDSRYAFATAHVHGAIYKQRGWLTSAGREIKNKEEILSLLEALHLPKRLAIIHCPGHQKAKDPISRGNQMADRVAKQAAQGVNLLPAGKRTADGSEFEKRTADGSEFESPKKKAKVE

SEQ ID NO: 55 - protein, 2087 aa, synthetic construct
  source 1..2087: note = Description of Artificial Sequence: Synthetic polypeptide
MPAAKRVKLDGGDKKYSIGLDIGTNSVGWAVITDEYKVPSKKFKVLGNTDRHSIKKNLIGALLFDSGETAEATRLKRTARRRYTRRKNRICYLQEIFSNEMAKVDDSFFHRLEESFLVEEDKKHERHPIFGNIVDEVAYHEKYPTIYHLRKKLVDSTDKADLRLIYLALAHMIKFRGHFLIEGDLNPDNSDVDKLFIQLVQTYNQLFEENPINASGVDAKAILSARLSKSRRLENLIAQLPGEKKNGLFGNLIALSLGLTPNFKSNFDLAEDAKLQLSKDTYDDDLDNLLAQIGDQYADLFLAAKNLSDAILLSDILRVNTEITKAPLSASMIKRYDEHHQDLTLLKALVRQQLPEKYKEIFFDQSKNGYAGYIDGGASQEEFYKFIKPILEKMDGTEELLVKLNREDLLRKQRTFDNGSIPHQIHLGELHAILRRQEDFYPFLKDNREKIEKILTFRIPYYVGPLARGNSRFAWMTRKSEETITPWNFEEVVDKGASAQSFIERMTNFDKNLPNEKVLPKHSLLYEYFTVYNELTKVKYVTEGMRKPAFLSGEQKKAIVDLLFKTNRKVTVKQLKEDYFKKIECFDSVEISGVEDRFNASLGTYHDLLKIIKDKDFLDNEENEDILEDIVLTLTLFEDREMIEERLKTYAHLFDDKVMKQLKRRRYTGWGRLSRKLINGIRDKQSGKTILDFLKSDGFANRNFMQLIHDDSLTFKEDIQKAQVSGQGDSLHEHIANLAGSPAIKKGILQTVKVVDELVKVMGRHKPENIVIEMARENQTTQKGQKNSRERMKRIEEGIKELGSQILKEHPVENTQLQNEKLYLYYLQNGRDMYVDQELDINRLSDYDVDHIVPQSFLKDDSIDNKVLTRSDKARGKSDNVPSEEVVKKMKNYWRQLLNAKLITQRKFDNLTKAERGGLSELDKAGFIKRQLVETRQITKHVAQILDSRMNTKYDENDKLIREVKVITLKSKLVSDFRKDFQFYKVREINNYHHAHDAYLNAVVGTALIKKYPKLESEFVYGDYKVYDVRKMIAKSEQEIGKATAKYFFYSNIMNFFKTEITLANGEIRKRPLIETNGETGEIVWDKGRDFATVRKVLSMPQVNIVKKTEVQTGGFSKESILPKRNSDKLIARKKDWDPKKYGGFDSPTVAYSVLVVAKVEKGKSKKLKSVKELLGITIMERSSFEKNPIDFLEAKGYKEVKKDLIIKLPKYSLFELENGRKRMLASAGELQKGNELALPSKYVNFLYLASHYEKLKGSPEDNEQKQLFVEQHKHYLDEIIEQISEFSKRVILADANLDKVLSAYNKHRDKPIREQAENIIHLFTLTNLGAPAAFKYFDTTIDRKRYTSTKEVLDATLIHQSITGLYETRIDLSQLGGDGGGGGGSGGGGSGGLDDEYRLYSPLVKPDQNIQFWLEQFPQAWAETAGMGLAKQVPPQVIQLKASATPVSVRQYPLSKEAQEGIRPHVQRLIQQGILVPVQSPWNTPLLPVRKPGTNDYRPVQDLREVNKRVQDIHPTVPNPYNLLCALPPQRSWYTVLDLKDAFFCLRLHPTSQPLFAFEWRDPGTGRTGQLTWTRLPQGFKNSPTIFNEALHRDLANFRIQHPQVTLLQYVDDLLLAGATKQDCLEGTKALLLELSDLGYRASAKKAQICRREVTYLGYSLRDGQRWLTEARKKTVVQIPAPTTAKQVREFLGKAGFCRLFIPGFATLAAPLYPLTKPKGEFSWAPEHQKAFDAIKKALLSAPALALPDVTKPFTLYVDERKGVARGVLTQTLGPWRRPVAYLSKKLDPVASGWPVCLKAIAAVAILVKDADKLTLGQNITVIAPHALENIVRQPPDRWMTNARMTHYQSLLLTERVTFAPPAALNPATLLPEETDEPVTHDCHQLLIEETGVRKDLTDIPLTGEVLTWFTDGSSYVVEGKRMAGAAVVDGTRTIWASSLPEGTSAQKAELMALTQALRLAEGKSINIYTDSRYAFATAHVHGAIYKQRGWLTSAGREIKNKEEILSLLEALHLPKRLAIIHCPGHQKAKDPISRGNQMADRVAKQAAQGVNLLPAGKRTADGSEFEKRTADGSEFESPKKKAKVE

SEQ ID NO: 56 - protein, 2092 aa, synthetic construct
  source 1..2092: note = Description of Artificial Sequence: Synthetic polypeptide
MPAAKRVKLDGGDKKYSIGLDIGTNSVGWAVITDEYKVPSKKFKVLGNTDRHSIKKNLIGALLFDSGETAEATRLKRTARRRYTRRKNRICYLQEIFSNEMAKVDDSFFHRLEESFLVEEDKKHERHPIFGNIVDEVAYHEKYPTIYHLRKKLVDSTDKADLRLIYLALAHMIKFRGHFLIEGDLNPDNSDVDKLFIQLVQTYNQLFEENPINASGVDAKAILSARLSKSRRLENLIAQLPGEKKNGLFGNLIALSLGLTPNFKSNFDLAEDAKLQLSKDTYDDDLDNLLAQIGDQYADLFLAAKNLSDAILLSDILRVNTEITKAPLSASMIKRYDEHHQDLTLLKALVRQQLPEKYKEIFFDQSKNGYAGYIDGGASQEEFYKFIKPILEKMDGTEELLVKLNREDLLRKQRTFDNGSIPHQIHLGELHAILRRQEDFYPFLKDNREKIEKILTFRIPYYVGPLARGNSRFAWMTRKSEETITPWNFEEVVDKGASAQSFIERMTNFDKNLPNEKVLPKHSLLYEYFTVYNELTKVKYVTEGMRKPAFLSGEQKKAIVDLLFKTNRKVTVKQLKEDYFKKIECFDSVEISGVEDRFNASLGTYHDLLKIIKDKDFLDNEENEDILEDIVLTLTLFEDREMIEERLKTYAHLFDDKVMKQLKRRRYTGWGRLSRKLINGIRDKQSGKTILDFLKSDGFANRNFMQLIHDDSLTFKEDIQKAQVSGQGDSLHEHIANLAGSPAIKKGILQTVKVVDELVKVMGRHKPENIVIEMARENQTTQKGQKNSRERMKRIEEGIKELGSQILKEHPVENTQLQNEKLYLYYLQNGRDMYVDQELDINRLSDYDVDHIVPQSFLKDDSIDNKVLTRSDKARGKSDNVPSEEVVKKMKNYWRQLLNAKLITQRKFDNLTKAERGGLSELDKAGFIKRQLVETRQITKHVAQILDSRMNTKYDENDKLIREVKVITLKSKLVSDFRKDFQFYKVREINNYHHAHDAYLNAVVGTALIKKYPKLESEFVYGDYKVYDVRKMIAKSEQEIGKATAKYFFYSNIMNFFKTEITLANGEIRKRPLIETNGETGEIVWDKGRDFATVRKVLSMPQVNIVKKTEVQTGGFSKESILPKRNSDKLIARKKDWDPKKYGGFDSPTVAYSVLVVAKVEKGKSKKLKSVKELLGITIMERSSFEKNPIDFLEAKGYKEVKKDLIIKLPKYSLFELENGRKRMLASAGELQKGNELALPSKYVNFLYLASHYEKLKGSPEDNEQKQLFVEQHKHYLDEIIEQISEFSKRVILADANLDKVLSAYNKHRDKPIREQAENIIHLFTLTNLGAPAAFKYFDTTIDRKRYTSTKEVLDATLIHQSITGLYETRIDLSQLGGDGGEAAAKGGGGSEAAAKGGLDDEYRLYSPLVKPDQNIQFWLEQFPQAWAETAGMGLAKQVPPQVIQLKASATPVSVRQYPLSKEAQEGIRPHVQRLIQQGILVPVQSPWNTPLLPVRKPGTNDYRPVQDLREVNKRVQDIHPTVPNPYNLLCALPPQRSWYTVLDLKDAFFCLRLHPTSQPLFAFEWRDPGTGRTGQLTWTRLPQGFKNSPTIFNEALHRDLANFRIQHPQVTLLQYVDDLLLAGATKQDCLEGTKALLLELSDLGYRASAKKAQICRREVTYLGYSLRDGQRWLTEARKKTVVQIPAPTTAKQVREFLGKAGFCRLFIPGFATLAAPLYPLTKPKGEFSWAPEHQKAFDAIKKALLSAPALALPDVTKPFTLYVDERKGVARGVLTQTLGPWRRPVAYLSKKLDPVASGWPVCLKAIAAVAILVKDADKLTLGQNITVIAPHALENIVRQPPDRWMTNARMTHYQSLLLTERVTFAPPAALNPATLLPEETDEPVTHDCHQLLIEETGVRKDLTDIPLTGEVLTWFTDGSSYVVEGKRMAGAAVVDGTRTIWASSLPEGTSAQKAELMALTQALRLAEGKSINIYTDSRYAFATAHVHGAIYKQRGWLTSAGREIKNKEEILSLLEALHLPKRLAIIHCPGHQKAKDPISRGNQMADRVAKQAAQGVNLLPAGKRTADGSEFEKRTADGSEFESPKKKAKVE

SEQ ID NO: 57 - protein, 2085 aa, synthetic construct
  source 1..2085: note = Description of Artificial Sequence: Synthetic polypeptide
MPAAKRVKLDGGDKKYSIGLDIGTNSVGWAVITDEYKVPSKKFKVLGNTDRHSIKKNLIGALLFDSGETAEATRLKRTARRRYTRRKNRICYLQEIFSNEMAKVDDSFFHRLEESFLVEEDKKHERHPIFGNIVDEVAYHEKYPTIYHLRKKLVDSTDKADLRLIYLALAHMIKFRGHFLIEGDLNPDNSDVDKLFIQLVQTYNQLFEENPINASGVDAKAILSARLSKSRRLENLIAQLPGEKKNGLFGNLIALSLGLTPNFKSNFDLAEDAKLQLSKDTYDDDLDNLLAQIGDQYADLFLAAKNLSDAILLSDILRVNTEITKAPLSASMIKRYDEHHQDLTLLKALVRQQLPEKYKEIFFDQSKNGYAGYIDGGASQEEFYKFIKPILEKMDGTEELLVKLNREDLLRKQRTFDNGSIPHQIHLGELHAILRRQEDFYPFLKDNREKIEKILTFRIPYYVGPLARGNSRFAWMTRKSEETITPWNFEEVVDKGASAQSFIERMTNFDKNLPNEKVLPKHSLLYEYFTVYNELTKVKYVTEGMRKPAFLSGEQKKAIVDLLFKTNRKVTVKQLKEDYFKKIECFDSVEISGVEDRFNASLGTYHDLLKIIKDKDFLDNEENEDILEDIVLTLTLFEDREMIEERLKTYAHLFDDKVMKQLKRRRYTGWGRLSRKLINGIRDKQSGKTILDFLKSDGFANRNFMQLIHDDSLTFKEDIQKAQVSGQGDSLHEHIANLAGSPAIKKGILQTVKVVDELVKVMGRHKPENIVIEMARENQTTQKGQKNSRERMKRIEEGIKELGSQILKEHPVENTQLQNEKLYLYYLQNGRDMYVDQELDINRLSDYDVDHIVPQSFLKDDSIDNKVLTRSDKARGKSDNVPSEEVVKKMKNYWRQLLNAKLITQRKFDNLTKAERGGLSELDKAGFIKRQLVETRQITKHVAQILDSRMNTKYDENDKLIREVKVITLKSKLVSDFRKDFQFYKVREINNYHHAHDAYLNAVVGTALIKKYPKLESEFVYGDYKVYDVRKMIAKSEQEIGKATAKYFFYSNIMNFFKTEITLANGEIRKRPLIETNGETGEIVWDKGRDFATVRKVLSMPQVNIVKKTEVQTGGFSKESILPKRNSDKLIARKKDWDPKKYGGFDSPTVAYSVLVVAKVEKGKSKKLKSVKELLGITIMERSSFEKNPIDFLEAKGYKEVKKDLIIKLPKYSLFELENGRKRMLASAGELQKGNELALPSKYVNFLYLASHYEKLKGSPEDNEQKQLFVEQHKHYLDEIIEQISEFSKRVILADANLDKVLSAYNKHRDKPIREQAENIIHLFTLTNLGAPAAFKYFDTTIDRKRYTSTKEVLDATLIHQSITGLYETRIDLSQLGGDGGGGGGGGGGGGLDDEYRLYSPLVKPDQNIQFWLEQFPQAWAETAGMGLAKQVPPQVIQLKASATPVSVRQYPLSKEAQEGIRPHVQRLIQQGILVPVQSPWNTPLLPVRKPGTNDYRPVQDLREVNKRVQDIHPTVPNPYNLLCALPPQRSWYTVLDLKDAFFCLRLHPTSQPLFAFEWRDPGTGRTGQLTWTRLPQGFKNSPTIFNEALHRDLANFRIQHPQVTLLQYVDDLLLAGATKQDCLEGTKALLLELSDLGYRASAKKAQICRREVTYLGYSLRDGQRWLTEARKKTVVQIPAPTTAKQVREFLGKAGFCRLFIPGFATLAAPLYPLTKPKGEFSWAPEHQKAFDAIKKALLSAPALALPDVTKPFTLYVDERKGVARGVLTQTLGPWRRPVAYLSKKLDPVASGWPVCLKAIAAVAILVKDADKLTLGQNITVIAPHALENIVRQPPDRWMTNARMTHYQSLLLTERVTFAPPAALNPATLLPEETDEPVTHDCHQLLIEETGVRKDLTDIPLTGEVLTWFTDGSSYVVEGKRMAGAAVVDGTRTIWASSLPEGTSAQKAELMALTQALRLAEGKSINIYTDSRYAFATAHVHGAIYKQRGWLTSAGREIKNKEEILSLLEALHLPKRLAIIHCPGHQKAKDPISRGNQMADRVAKQAAQGVNLLPAGKRTADGSEFEKRTADGSEFESPKKKAKVE

SEQ ID NO: 58 - protein, 2086 aa, synthetic construct
  source 1..2086: note = Description of Artificial Sequence: Synthetic polypeptide
MPAAKRVKLDGGDKKYSIGLDIGTNSVGWAVITDEYKVPSKKFKVLGNTDRHSIKKNLIGALLFDSGETAEATRLKRTARRRYTRRKNRICYLQEIFSNEMAKVDDSFFHRLEESFLVEEDKKHERHPIFGNIVDEVAYHEKYPTIYHLRKKLVDSTDKADLRLIYLALAHMIKFRGHFLIEGDLNPDNSDVDKLFIQLVQTYNQLFEENPINASGVDAKAILSARLSKSRRLENLIAQLPGEKKNGLFGNLIALSLGLTPNFKSNFDLAEDAKLQLSKDTYDDDLDNLLAQIGDQYADLFLAAKNLSDAILLSDILRVNTEITKAPLSASMIKRYDEHHQDLTLLKALVRQQLPEKYKEIFFDQSKNGYAGYIDGGASQEEFYKFIKPILEKMDGTEELLVKLNREDLLRKQRTFDNGSIPHQIHLGELHAILRRQEDFYPFLKDNREKIEKILTFRIPYYVGPLARGNSRFAWMTRKSEETITPWNFEEVVDKGASAQSFIERMTNFDKNLPNEKVLPKHSLLYEYFTVYNELTKVKYVTEGMRKPAFLSGEQKKAIVDLLFKTNRKVTVKQLKEDYFKKIECFDSVEISGVEDRFNASLGTYHDLLKIIKDKDFLDNEENEDILEDIVLTLTLFEDREMIEERLKTYAHLFDDKVMKQLKRRRYTGWGRLSRKLINGIRDKQSGKTILDFLKSDGFANRNFMQLIHDDSLTFKEDIQKAQVSGQGDSLHEHIANLAGSPAIKKGILQTVKVVDELVKVMGRHKPENIVIEMARENQTTQKGQKNSRERMKRIEEGIKELGSQILKEHPVENTQLQNEKLYLYYLQNGRDMYVDQELDINRLSDYDVDHIVPQSFLKDDSIDNKVLTRSDKARGKSDNVPSEEVVKKMKNYWRQLLNAKLITQRKFDNLTKAERGGLSELDKAGFIKRQLVETRQITKHVAQILDSRMNTKYDENDKLIREVKVITLKSKLVSDFRKDFQFYKVREINNYHHAHDAYLNAVVGTALIKKYPKLESEFVYGDYKVYDVRKMIAKSEQEIGKATAKYFFYSNIMNFFKTEITLANGEIRKRPLIETNGETGEIVWDKGRDFATVRKVLSMPQVNIVKKTEVQTGGFSKESILPKRNSDKLIARKKDWDPKKYGGFDSPTVAYSVLVVAKVEKGKSKKLKSVKELLGITIMERSSFEKNPIDFLEAKGYKEVKKDLIIKLPKYSLFELENGRKRMLASAGELQKGNELALPSKYVNFLYLASHYEKLKGSPEDNEQKQLFVEQHKHYLDEIIEQISEFSKRVILADANLDKVLSAYNKHRDKPIREQAENIIHLFTLTNLGAPAAFKYFDTTIDRKRYTSTKEVLDATLIHQSITGLYETRIDLSQLGGDGGGGSPAPGGGGGLDDEYRLYSPLVKPDQNIQFWLEQFPQAWAETAGMGLAKQVPPQVIQLKASATPVSVRQYPLSKEAQEGIRPHVQRLIQQGILVPVQSPWNTPLLPVRKPGTNDYRPVQDLREVNKRVQDIHPTVPNPYNLLCALPPQRSWYTVLDLKDAFFCLRLHPTSQPLFAFEWRDPGTGRTGQLTWTRLPQGFKNSPTIFNEALHRDLANFRIQHPQVTLLQYVDDLLLAGATKQDCLEGTKALLLELSDLGYRASAKKAQICRREVTYLGYSLRDGQRWLTEARKKTVVQIPAPTTAKQVREFLGKAGFCRLFIPGFATLAAPLYPLTKPKGEFSWAPEHQKAFDAIKKALLSAPALALPDVTKPFTLYVDERKGVARGVLTQTLGPWRRPVAYLSKKLDPVASGWPVCLKAIAAVAILVKDADKLTLGQNITVIAPHALENIVRQPPDRWMTNARMTHYQSLLLTERVTFAPPAALNPATLLPEETDEPVTHDCHQLLIEETGVRKDLTDIPLTGEVLTWFTDGSSYVVEGKRMAGAAVVDGTRTIWASSLPEGTSAQKAELMALTQALRLAEGKSINIYTDSRYAFATAHVHGAIYKQRGWLTSAGREIKNKEEILSLLEALHLPKRLAIIHCPGHQKAKDPISRGNQMADRVAKQAAQGVNLLPAGKRTADGSEFEKRTADGSEFESPKKKAKVE

SEQ ID NO: 59 - protein, 2083 aa, synthetic construct
  source 1..2083: note = Description of Artificial Sequence: Synthetic polypeptide
MPAAKRVKLDGGDKKYSIGLDIGTNSVGWAVITDEYKVPSKKFKVLGNTDRHSIKKNLIGALLFDSGETAEATRLKRTARRRYTRRKNRICYLQEIFSNEMAKVDDSFFHRLEESFLVEEDKKHERHPIFGNIVDEVAYHEKYPTIYHLRKKLVDSTDKADLRLIYLALAHMIKFRGHFLIEGDLNPDNSDVDKLFIQLVQTYNQLFEENPINASGVDAKAILSARLSKSRRLENLIAQLPGEKKNGLFGNLIALSLGLTPNFKSNFDLAEDAKLQLSKDTYDDDLDNLLAQIGDQYADLFLAAKNLSDAILLSDILRVNTEITKAPLSASMIKRYDEHHQDLTLLKALVRQQLPEKYKEIFFDQSKNGYAGYIDGGASQEEFYKFIKPILEKMDGTEELLVKLNREDLLRKQRTFDNGSIPHQIHLGELHAILRRQEDFYPFLKDNREKIEKILTFRIPYYVGPLARGNSRFAWMTRKSEETITPWNFEEVVDKGASAQSFIERMTNFDKNLPNEKVLPKHSLLYEYFTVYNELTKVKYVTEGMRKPAFLSGEQKKAIVDLLFKTNRKVTVKQLKEDYFKKIECFDSVEISGVEDRFNASLGTYHDLLKIIKDKDFLDNEENEDILEDIVLTLTLFEDREMIEERLKTYAHLFDDKVMKQLKRRRYTGWGRLSRKLINGIRDKQSGKTILDFLKSDGFANRNFMQLIHDDSLTFKEDIQKAQVSGQGDSLHEHIANLAGSPAIKKGILQTVKVVDELVKVMGRHKPENIVIEMARENQTTQKGQKNSRERMKRIEEGIKELGSQILKEHPVENTQLQNEKLYLYYLQNGRDMYVDQELDINRLSDYDVDHIVPQSFLKDDSIDNKVLTRSDKARGKSDNVPSEEVVKKMKNYWRQLLNAKLITQRKFDNLTKAERGGLSELDKAGFIKRQLVETRQITKHVAQILDSRMNTKYDENDKLIREVKVITLKSKLVSDFRKDFQFYKVREINNYHHAHDAYLNAVVGTALIKKYPKLESEFVYGDYKVYDVRKMIAKSEQEIGKATAKYFFYSNIMNFFKTEITLANGEIRKRPLIETNGETGEIVWDKGRDFATVRKVLSMPQVNIVKKTEVQTGGFSKESILPKRNSDKLIARKKDWDPKKYGGFDSPTVAYSVLVVAKVEKGKSKKLKSVKELLGITIMERSSFEKNPIDFLEAKGYKEVKKDLIIKLPKYSLFELENGRKRMLASAGELQKGNELALPSKYVNFLYLASHYEKLKGSPEDNEQKQLFVEQHKHYLDEIIEQISEFSKRVILADANLDKVLSAYNKHRDKPIREQAENIIHLFTLTNLGAPAAFKYFDTTIDRKRYTSTKEVLDATLIHQSITGLYETRIDLSQLGGDGGGGGGGGGGLDDEYRLYSPLVKPDQNIQFWLEQFPQAWAETAGMGLAKQVPPQVIQLKASATPVSVRQYPLSKEAQEGIRPHVQRLIQQGILVPVQSPWNTPLLPVRKPGTNDYRPVQDLREVNKRVQDIHPTVPNPYNLLCALPPQRSWYTVLDLKDAFFCLRLHPTSQPLFAFEWRDPGTGRTGQLTWTRLPQGFKNSPTIFNEALHRDLANFRIQHPQVTLLQYVDDLLLAGATKQDCLEGTKALLLELSDLGYRASAKKAQICRREVTYLGYSLRDGQRWLTEARKKTVVQIPAPTTAKQVREFLGKAGFCRLFIPGFATLAAPLYPLTKPKGEFSWAPEHQKAFDAIKKALLSAPALALPDVTKPFTLYVDERKGVARGVLTQTLGPWRRPVAYLSKKLDPVASGWPVCLKAIAAVAILVKDADKLTLGQNITVIAPHALENIVRQPPDRWMTNARMTHYQSLLLTERVTFAPPAALNPATLLPEETDEPVTHDCHQLLIEETGVRKDLTDIPLTGEVLTWFTDGSSYVVEGKRMAGAAVVDGTRTIWASSLPEGTSAQKAELMALTQALRLAEGKSINIYTDSRYAFATAHVHGAIYKQRGWLTSAGREIKNKEEILSLLEALHLPKRLAIIHCPGHQKAKDPISRGNQMADRVAKQAAQGVNLLPAGKRTADGSEFEKRTADGSEFESPKKKAKVE

SEQ ID NO: 60 - protein, 2086 aa, synthetic construct
  source 1..2086: note = Description of Artificial Sequence: Synthetic polypeptide
MPAAKRVKLDGGDKKYSIGLDIGTNSVGWAVITDEYKVPSKKFKVLGNTDRHSIKKNLIGALLFDSGETAEATRLKRTARRRYTRRKNRICYLQEIFSNEMAKVDDSFFHRLEESFLVEEDKKHERHPIFGNIVDEVAYHEKYPTIYHLRKKLVDSTDKADLRLIYLALAHMIKFRGHFLIEGDLNPDNSDVDKLFIQLVQTYNQLFEENPINASGVDAKAILSARLSKSRRLENLIAQLPGEKKNGLFGNLIALSLGLTPNFKSNFDLAEDAKLQLSKDTYDDDLDNLLAQIGDQYADLFLAAKNLSDAILLSDILRVNTEITKAPLSASMIKRYDEHHQDLTLLKALVRQQLPEKYKEIFFDQSKNGYAGYIDGGASQEEFYKFIKPILEKMDGTEELLVKLNREDLLRKQRTFDNGSIPHQIHLGELHAILRRQEDFYPFLKDNREKIEKILTFRIPYYVGPLARGNSRFAWMTRKSEETITPWNFEEVVDKGASAQSFIERMTNFDKNLPNEKVLPKHSLLYEYFTVYNELTKVKYVTEGMRKPAFLSGEQKKAIVDLLFKTNRKVTVKQLKEDYFKKIECFDSVEISGVEDRFNASLGTYHDLLKIIKDKDFLDNEENEDILEDIVLTLTLFEDREMIEERLKTYAHLFDDKVMKQLKRRRYTGWGRLSRKLINGIRDKQSGKTILDFLKSDGFANRNFMQLIHDDSLTFKEDIQKAQVSGQGDSLHEHIANLAGSPAIKKGILQTVKVVDELVKVMGRHKPENIVIEMARENQTTQKGQKNSRERMKRIEEGIKELGSQILKEHPVENTQLQNEKLYLYYLQNGRDMYVDQELDINRLSDYDVDHIVPQSFLKDDSIDNKVLTRSDKARGKSDNVPSEEVVKKMKNYWRQLLNAKLITQRKFDNLTKAERGGLSELDKAGFIKRQLVETRQITKHVAQILDSRMNTKYDENDKLIREVKVITLKSKLVSDFRKDFQFYKVREINNYHHAHDAYLNAVVGTALIKKYPKLESEFVYGDYKVYDVRKMIAKSEQEIGKATAKYFFYSNIMNFFKTEITLANGEIRKRPLIETNGETGEIVWDKGRDFATVRKVLSMPQVNIVKKTEVQTGGFSKESILPKRNSDKLIARKKDWDPKKYGGFDSPTVAYSVLVVAKVEKGKSKKLKSVKELLGITIMERSSFEKNPIDFLEAKGYKEVKKDLIIKLPKYSLFELENGRKRMLASAGELQKGNELALPSKYVNFLYLASHYEKLKGSPEDNEQKQLFVEQHKHYLDEIIEQISEFSKRVILADANLDKVLSAYNKHRDKPIREQAENIIHLFTLTNLGAPAAFKYFDTTIDRKRYTSTKEVLDATLIHQSITGLYETRIDLSQLGGDGGPAPGGSGSSGGLDDEYRLYSPLVKPDQNIQFWLEQFPQAWAETAGMGLAKQVPPQVIQLKASATPVSVRQYPLSKEAQEGIRPHVQRLIQQGILVPVQSPWNTPLLPVRKPGTNDYRPVQDLREVNKRVQDIHPTVPNPYNLLCALPPQRSWYTVLDLKDAFFCLRLHPTSQPLFAFEWRDPGTGRTGQLTWTRLPQGFKNSPTIFNEALHRDLANFRIQHPQVTLLQYVDDLLLAGATKQDCLEGTKALLLELSDLGYRASAKKAQICRREVTYLGYSLRDGQRWLTEARKKTVVQIPAPTTAKQVREFLGKAGFCRLFIPGFATLAAPLYPLTKPKGEFSWAPEHQKAFDAIKKALLSAPALALPDVTKPFTLYVDERKGVARGVLTQTLGPWRRPVAYLSKKLDPVASGWPVCLKAIAAVAILVKDADKLTLGQNITVIAPHALENIVRQPPDRWMTNARMTHYQSLLLTERVTFAPPAALNPATLLPEETDEPVTHDCHQLLIEETGVRKDLTDIPLTGEVLTWFTDGSSYVVEGKRMAGAAVVDGTRTIWASSLPEGTSAQKAELMALTQALRLAEGKSINIYTDSRYAFATAHVHGAIYKQRGWLTSAGREIKNKEEILSLLEALHLPKRLAIIHCPGHQKAKDPISRGNQMADRVAKQAAQGVNLLPAGKRTADGSEFEKRTADGSEFESPKKKAKVE

SEQ ID NO: 61 - protein, 2083 aa, synthetic construct
  source 1..2083: note = Description of Artificial Sequence: Synthetic polypeptide
MPAAKRVKLDGGDKKYSIGLDIGTNSVGWAVITDEYKVPSKKFKVLGNTDRHSIKKNLIGALLFDSGETAEATRLKRTARRRYTRRKNRICYLQEIFSNEMAKVDDSFFHRLEESFLVEEDKKHERHPIFGNIVDEVAYHEKYPTIYHLRKKLVDSTDKADLRLIYLALAHMIKFRGHFLIEGDLNPDNSDVDKLFIQLVQTYNQLFEENPINASGVDAKAILSARLSKSRRLENLIAQLPGEKKNGLFGNLIALSLGLTPNFKSNFDLAEDAKLQLSKDTYDDDLDNLLAQIGDQYADLFLAAKNLSDAILLSDILRVNTEITKAPLSASMIKRYDEHHQDLTLLKALVRQQLPEKYKEIFFDQSKNGYAGYIDGGASQEEFYKFIKPILEKMDGTEELLVKLNREDLLRKQRTFDNGSIPHQIHLGELHAILRRQEDFYPFLKDNREKIEKILTFRIPYYVGPLARGNSRFAWMTRKSEETITPWNFEEVVDKGASAQSFIERMTNFDKNLPNEKVLPKHSLLYEYFTVYNELTKVKYVTEGMRKPAFLSGEQKKAIVDLLFKTNRKVTVKQLKEDYFKKIECFDSVEISGVEDRFNASLGTYHDLLKIIKDKDFLDNEENEDILEDIVLTLTLFEDREMIEERLKTYAHLFDDKVMKQLKRRRYTGWGRLSRKLINGIRDKQSGKTILDFLKSDGFANRNFMQLIHDDSLTFKEDIQKAQVSGQGDSLHEHIANLAGSPAIKKGILQTVKVVDELVKVMGRHKPENIVIEMARENQTTQKGQKNSRERMKRIEEGIKELGSQILKEHPVENTQLQNEKLYLYYLQNGRDMYVDQELDINRLSDYDVDHIVPQSFLKDDSIDNKVLTRSDKARGKSDNVPSEEVVKKMKNYWRQLLNAKLITQRKFDNLTKAERGGLSELDKAGFIKRQLVETRQITKHVAQILDSRMNTKYDENDKLIREVKVITLKSKLVSDFRKDFQFYKVREINNYHHAHDAYLNAVVGTALIKKYPKLESEFVYGDYKVYDVRKMIAKSEQEIGKATAKYFFYSNIMNFFKTEITLANGEIRKRPLIETNGETGEIVWDKGRDFATVRKVLSMPQVNIVKKTEVQTGGFSKESILPKRNSDKLIARKKDWDPKKYGGFDSPTVAYSVLVVAKVEKGKSKKLKSVKELLGITIMERSSFEKNPIDFLEAKGYKEVKKDLIIKLPKYSLFELENGRKRMLASAGELQKGNELALPSKYVNFLYLASHYEKLKGSPEDNEQKQLFVEQHKHYLDEIIEQISEFSKRVILADANLDKVLSAYNKHRDKPIREQAENIIHLFTLTNLGAPAAFKYFDTTIDRKRYTSTKEVLDATLIHQSITGLYETRIDLSQLGGDGGPAPGSSGGLDDEYRLYSPLVKPDQNIQFWLEQFPQAWAETAGMGLAKQVPPQVIQLKASATPVSVRQYPLSKEAQEGIRPHVQRLIQQGILVPVQSPWNTPLLPVRKPGTNDYRPVQDLREVNKRVQDIHPTVPNPYNLLCALPPQRSWYTVLDLKDAFFCLRLHPTSQPLFAFEWRDPGTGRTGQLTWTRLPQGFKNSPTIFNEALHRDLANFRIQHPQVTLLQYVDDLLLAGATKQDCLEGTKALLLELSDLGYRASAKKAQICRREVTYLGYSLRDGQRWLTEARKKTVVQIPAPTTAKQVREFLGKAGFCRLFIPGFATLAAPLYPLTKPKGEFSWAPEHQKAFDAIKKALLSAPALALPDVTKPFTLYVDERKGVARGVLTQTLGPWRRPVAYLSKKLDPVASGWPVCLKAIAAVAILVKDADKLTLGQNITVIAPHALENIVRQPPDRWMTNARMTHYQSLLLTERVTFAPPAALNPATLLPEETDEPVTHDCHQLLIEETGVRKDLTDIPLTGEVLTWFTDGSSYVVEGKRMAGAAVVDGTRTIWASSLPEGTSAQKAELMALTQALRLAEGKSINIYTDSRYAFATAHVHGAIYKQRGWLTSAGREIKNKEEILSLLEALHLPKRLAIIHCPGHQKAKDPISRGNQMADRVAKQAAQGVNLLPAGKRTADGSEFEKRTADGSEFESPKKKAKVE

SEQ ID NO: 62 - protein, 2088 aa, synthetic construct
  source 1..2088: note = Description of Artificial Sequence: Synthetic polypeptide
MPAAKRVKLDGGDKKYSIGLDIGTNSVGWAVITDEYKVPSKKFKVLGNTDRHSIKKNLIGALLFDSGETAEATRLKRTARRRYTRRKNRICYLQEIFSNEMAKVDDSFFHRLEESFLVEEDKKHERHPIFGNIVDEVAYHEKYPTIYHLRKKLVDSTDKADLRLIYLALAHMIKFRGHFLIEGDLNPDNSDVDKLFIQLVQTYNQLFEENPINASGVDAKAILSARLSKSRRLENLIAQLPGEKKNGLFGNLIALSLGLTPNFKSNFDLAEDAKLQLSKDTYDDDLDNLLAQIGDQYADLFLAAKNLSDAILLSDILRVNTEITKAPLSASMIKRYDEHHQDLTLLKALVRQQLPEKYKEIFFDQSKNGYAGYIDGGASQEEFYKFIKPILEKMDGTEELLVKLNREDLLRKQRTFDNGSIPHQIHLGELHAILRRQEDFYPFLKDNREKIEKILTFRIPYYVGPLARGNSRFAWMTRKSEETITPWNFEEVVDKGASAQSFIERMTNFDKNLPNEKVLPKHSLLYEYFTVYNELTKVKYVTEGMRKPAFLSGEQKKAIVDLLFKTNRKVTVKQLKEDYFKKIECFDSVEISGVEDRFNASLGTYHDLLKIIKDKDFLDNEENEDILEDIVLTLTLFEDREMIEERLKTYAHLFDDKVMKQLKRRRYTGWGRLSRKLINGIRDKQSGKTILDFLKSDGFANRNFMQLIHDDSLTFKEDIQKAQVSGQGDSLHEHIANLAGSPAIKKGILQTVKVVDELVKVMGRHKPENIVIEMARENQTTQKGQKNSRERMKRIEEGIKELGSQILKEHPVENTQLQNEKLYLYYLQNGRDMYVDQELDINRLSDYDVDHIVPQSFLKDDSIDNKVLTRSDKARGKSDNVPSEEVVKKMKNYWRQLLNAKLITQRKFDNLTKAERGGLSELDKAGFIKRQLVETRQITKHVAQILDSRMNTKYDENDKLIREVKVITLKSKLVSDFRKDFQFYKVREINNYHHAHDAYLNAVVGTALIKKYPKLESEFVYGDYKVYDVRKMIAKSEQEIGKATAKYFFYSNIMNFFKTEITLANGEIRKRPLIETNGETGEIVWDKGRDFATVRKVLSMPQVNIVKKTEVQTGGFSKESILPKRNSDKLIARKKDWDPKKYGGFDSPTVAYSVLVVAKVEKGKSKKLKSVKELLGITIMERSSFEKNPIDFLEAKGYKEVKKDLIIKLPKYSLFELENGRKRMLASAGELQKGNELALPSKYVNFLYLASHYEKLKGSPEDNEQKQLFVEQHKHYLDEIIEQISEFSKRVILADANLDKVLSAYNKHRDKPIREQAENIIHLFTLTNLGAPAAFKYFDTTIDRKRYTSTKEVLDATLIHQSITGLYETRIDLSQLGGDGGPAPAPAPAPAPGGLDDEYRLYSPLVKPDQNIQFWLEQFPQAWAETAGMGLAKQVPPQVIQLKASATPVSVRQYPLSKEAQEGIRPHVQRLIQQGILVPVQSPWNTPLLPVRKPGTNDYRPVQDLREVNKRVQDIHPTVPNPYNLLCALPPQRSWYTVLDLKDAFFCLRLHPTSQPLFAFEWRDPGTGRTGQLTWTRLPQGFKNSPTIFNEALHRDLANFRIQHPQVTLLQYVDDLLLAGATKQDCLEGTKALLLELSDLGYRASAKKAQICRREVTYLGYSLRDGQRWLTEARKKTVVQIPAPTTAKQVREFLGKAGFCRLFIPGFATLAAPLYPLTKPKGEFSWAPEHQKAFDAIKKALLSAPALALPDVTKPFTLYVDERKGVARGVLTQTLGPWRRPVAYLSKKLDPVASGWPVCLKAIAAVAILVKDADKLTLGQNITVIAPHALENIVRQPPDRWMTNARMTHYQSLLLTERVTFAPPAALNPATLLPEETDEPVTHDCHQLLIEETGVRKDLTDIPLTGEVLTWFTDGSSYVVEGKRMAGAAVVDGTRTIWASSLPEGTSAQKAELMALTQALRLAEGKSINIYTDSRYAFATAHVHGAIYKQRGWLTSAGREIKNKEEILSLLEALHLPKRLAIIHCPGHQKAKDPISRGNQMADRVAKQAAQGVNLLPAGKRTADGSEFEKRTADGSEFESPKKKAKVE

SEQ ID NO: 63 - protein, 2088 aa, synthetic construct
  source 1..2088: note = Description of Artificial Sequence: Synthetic polypeptide
MPAAKRVKLDGGDKKYSIGLDIGTNSVGWAVITDEYKVPSKKFKVLGNTDRHSIKKNLIGALLFDSGETAEATRLKRTARRRYTRRKNRICYLQEIFSNEMAKVDDSFFHRLEESFLVEEDKKHERHPIFGNIVDEVAYHEKYPTIYHLRKKLVDSTDKADLRLIYLALAHMIKFRGHFLIEGDLNPDNSDVDKLFIQLVQTYNQLFEENPINASGVDAKAILSARLSKSRRLENLIAQLPGEKKNGLFGNLIALSLGLTPNFKSNFDLAEDAKLQLSKDTYDDDLDNLLAQIGDQYADLFLAAKNLSDAILLSDILRVNTEITKAPLSASMIKRYDEHHQDLTLLKALVRQQLPEKYKEIFFDQSKNGYAGYIDGGASQEEFYKFIKPILEKMDGTEELLVKLNREDLLRKQRTFDNGSIPHQIHLGELHAILRRQEDFYPFLKDNREKIEKILTFRIPYYVGPLARGNSRFAWMTRKSEETITPWNFEEVVDKGASAQSFIERMTNFDKNLPNEKVLPKHSLLYEYFTVYNELTKVKYVTEGMRKPAFLSGEQKKAIVDLLFKTNRKVTVKQLKEDYFKKIECFDSVEISGVEDRFNASLGTYHDLLKIIKDKDFLDNEENEDILEDIVLTLTLFEDREMIEERLKTYAHLFDDKVMKQLKRRRYTGWGRLSRKLINGIRDKQSGKTILDFLKSDGFANRNFMQLIHDDSLTFKEDIQKAQVSGQGDSLHEHIANLAGSPAIKKGILQTVKVVDELVKVMGRHKPENIVIEMARENQTTQKGQKNSRERMKRIEEGIKELGSQILKEHPVENTQLQNEKLYLYYLQNGRDMYVDQELDINRLSDYDVDHIVPQSFLKDDSIDNKVLTRSDKARGKSDNVPSEEVVKKMKNYWRQLLNAKLITQRKFDNLTKAERGGLSELDKAGFIKRQLVETRQITKHVAQILDSRMNTKYDENDKLIREVKVITLKSKLVSDFRKDFQFYKVREINNYHHAHDAYLNAVVGTALIKKYPKLESEFVYGDYKVYDVRKMIAKSEQEIGKATAKYFFYSNIMNFFKTEITLANGEIRKRPLIETNGETGEIVWDKGRDFATVRKVLSMPQVNIVKKTEVQTGGFSKESILPKRNSDKLIARKKDWDPKKYGGFDSPTVAYSVLVVAKVEKGKSKKLKSVKELLGITIMERSSFEKNPIDFLEAKGYKEVKKDLIIKLPKYSLFELENGRKRMLASAGELQKGNELALPSKYVNFLYLASHYEKLKGSPEDNEQKQLFVEQHKHYLDEIIEQISEFSKRVILADANLDKVLSAYNKHRDKPIREQAENIIHLFTLTNLGAPAAFKYFDTTIDRKRYTSTKEVLDATLIHQSITGLYETRIDLSQLGGDGGGGGEAAAKPAPGGLDDEYRLYSPLVKPDQNIQFWLEQFPQAWAETAGMGLAKQVPPQVIQLKASATPVSVRQYPLSKEAQEGIRPHVQRLIQQGILVPVQSPWNTPLLPVRKPGTNDYRPVQDLREVNKRVQDIHPTVPNPYNLLCALPPQRSWYTVLDLKDAFFCLRLHPTSQPLFAFEWRDPGTGRTGQLTWTRLPQGFKNSPTIFNEALHRDLANFRIQHPQVTLLQYVDDLLLAGATKQDCLEGTKALLLELSDLGYRASAKKAQICRREVTYLGYSLRDGQRWLTEARKKTVVQIPAPTTAKQVREFLGKAGFCRLFIPGFATLAAPLYPLTKPKGEFSWAPEHQKAFDAIKKALLSAPALALPDVTKPFTLYVDERKGVARGVLTQTLGPWRRPVAYLSKKLDPVASGWPVCLKAIAAVAILVKDADKLTLGQNITVIAPHALENIVRQPPDRWMTNARMTHYQSLLLTERVTFAPPAALNPATLLPEETDEPVTHDCHQLLIEETGVRKDLTDIPLTGEVLTWFTDGSSYVVEGKRMAGAAVVDGTRTIWASSLPEGTSAQKAELMALTQALRLAEGKSINIYTDSRYAFATAHVHGAIYKQRGWLTSAGREIKNKEEILSLLEALHLPKRLAIIHCPGHQKAKDPISRGNQMADRVAKQAAQGVNLLPAGKRTADGSEFEKRTADGSEFESPKKKAKVE

SEQ ID NO: 64 - protein, 2086 aa, synthetic construct
  source 1..2086: note = Description of Artificial Sequence: Synthetic polypeptide
MPAAKRVKLDGGDKKYSIGLDIGTNSVGWAVITDEYKVPSKKFKVLGNTDRHSIKKNLIGALLFDSGETAEATRLKRTARRRYTRRKNRICYLQEIFSNEMAKVDDSFFHRLEESFLVEEDKKHERHPIFGNIVDEVAYHEKYPTIYHLRKKLVDSTDKADLRLIYLALAHMIKFRGHFLIEGDLNPDNSDVDKLFIQLVQTYNQLFEENPINASGVDAKAILSARLSKSRRLENLIAQLPGEKKNGLFGNLIALSLGLTPNFKSNFDLAEDAKLQLSKDTYDDDLDNLLAQIGDQYADLFLAAKNLSDAILLSDILRVNTEITKAPLSASMIKRYDEHHQDLTLLKALVRQQLPEKYKEIFFDQSKNGYAGYIDGGASQEEFYKFIKPILEKMDGTEELLVKLNREDLLRKQRTFDNGSIPHQIHLGELHAILRRQEDFYPFLKDNREKIEKILTFRIPYYVGPLARGNSRFAWMTRKSEETITPWNFEEVVDKGASAQSFIERMTNFDKNLPNEKVLPKHSLLYEYFTVYNELTKVKYVTEGMRKPAFLSGEQKKAIVDLLFKTNRKVTVKQLKEDYFKKIECFDSVEISGVEDRFNASLGTYHDLLKIIKDKDFLDNEENEDILEDIVLTLTLFEDREMIEERLKTYAHLFDDKVMKQLKRRRYTGWGRLSRKLINGIRDKQSGKTILDFLKSDGFANRNFMQLIHDDSLTFKEDIQKAQVSGQGDSLHEHIANLAGSPAIKKGILQTVKVVDELVKVMGRHKPENIVIEMARENQTTQKGQKNSRERMKRIEEGIKELGSQILKEHPVENTQLQNEKLYLYYLQNGRDMYVDQELDINRLSDYDVDHIVPQSFLKDDSIDNKVLTRSDKARGKSDNVPSEEVVKKMKNYWRQLLNAKLITQRKFDNLTKAERGGLSELDKAGFIKRQLVETRQITKHVAQILDSRMNTKYDENDKLIREVKVITLKSKLVSDFRKDFQFYKVREINNYHHAHDAYLNAVVGTALIKKYPKLESEFVYGDYKVYDVRKMIAKSEQEIGKATAKYFFYSNIMNFFKTEITLANGEIRKRPLIETNGETGEIVWDKGRDFATVRKVLSMPQVNIVKKTEVQTGGFSKESILPKRNSDKLIARKKDWDPKKYGGFDSPTVAYSVLVVAKVEKGKSKKLKSVKELLGITIMERSSFEKNPIDFLEAKGYKEVKKDLIIKLPKYSLFELENGRKRMLASAGELQKGNELALPSKYVNFLYLASHYEKLKGSPEDNEQKQLFVEQHKHYLDEIIEQISEFSKRVILADANLDKVLSAYNKHRDKPIREQAENIIHLFTLTNLGAPAAFKYFDTTIDRKRYTSTKEVLDATLIHQSITGLYETRIDLSQLGGDGGGSSGGSPAPGGLDDEYRLYSPLVKPDQNIQFWLEQFPQAWAETAGMGLAKQVPPQVIQLKASATPVSVRQYPLSKEAQEGIRPHVQRLIQQGILVPVQSPWNTPLLPVRKPGTNDYRPVQDLREVNKRVQDIHPTVPNPYNLLCALPPQRSWYTVLDLKDAFFCLRLHPTSQPLFAFEWRDPGTGRTGQLTWTRLPQGFKNSPTIFNEALHRDLANFRIQHPQVTLLQYVDDLLLAGATKQDCLEGTKALLLELSDLGYRASAKKAQICRREVTYLGYSLRDGQRWLTEARKKTVVQIPAPTTAKQVREFLGKAGFCRLFIPGFATLAAPLYPLTKPKGEFSWAPEHQKAFDAIKKALLSAPALALPDVTKPFTLYVDERKGVARGVLTQTLGPWRRPVAYLSKKLDPVASGWPVCLKAIAAVAILVKDADKLTLGQNITVIAPHALENIVRQPPDRWMTNARMTHYQSLLLTERVTFAPPAALNPATLLPEETDEPVTHDCHQLLIEETGVRKDLTDIPLTGEVLTWFTDGSSYVVEGKRMAGAAVVDGTRTIWASSLPEGTSAQKAELMALTQALRLAEGKSINIYTDSRYAFATAHVHGAIYKQRGWLTSAGREIKNKEEILSLLEALHLPKRLAIIHCPGHQKAKDPISRGNQMADRVAKQAAQGVNLLPAGKRTADGSEFEKRTADGSEFESPKKKAKVE

SEQ ID NO: 65 - protein, 2088 aa, synthetic construct
  source 1..2088: note = Description of Artificial Sequence: Synthetic polypeptide
MPAAKRVKLDGGDKKYSIGLDIGTNSVGWAVITDEYKVPSKKFKVLGNTDRHSIKKNLIGALLFDSGETAEATRLKRTARRRYTRRKNRICYLQEIFSNEMAKVDDSFFHRLEESFLVEEDKKHERHPIFGNIVDEVAYHEKYPTIYHLRKKLVDSTDKADLRLIYLALAHMIKFRGHFLIEGDLNPDNSDVDKLFIQLVQTYNQLFEENPINASGVDAKAILSARLSKSRRLENLIAQLPGEKKNGLFGNLIALSLGLTPNFKSNFDLAEDAKLQLSKDTYDDDLDNLLAQIGDQYADLFLAAKNLSDAILLSDILRVNTEITKAPLSASMIKRYDEHHQDLTLLKALVRQQLPEKYKEIFFDQSKNGYAGYIDGGASQEEFYKFIKPILEKMDGTEELLVKLNREDLLRKQRTFDNGSIPHQIHLGELHAILRRQEDFYPFLKDNREKIEKILTFRIPYYVGPLARGNSRFAWMTRKSEETITPWNFEEVVDKGASAQSFIERMTNFDKNLPNEKVLPKHSLLYEYFTVYNELTKVKYVTEGMRKPAFLSGEQKKAIVDLLFKTNRKVTVKQLKEDYFKKIECFDSVEISGVEDRFNASLGTYHDLLKIIKDKDFLDNEENEDILEDIVLTLTLFEDREMIEERLKTYAHLFDDKVMKQLKRRRYTGWGRLSRKLINGIRDKQSGKTILDFLKSDGFANRNFMQLIHDDSLTFKEDIQKAQVSGQGDSLHEHIANLAGSPAIKKGILQTVKVVDELVKVMGRHKPENIVIEMARENQTTQKGQKNSRERMKRIEEGIKELGSQILKEHPVENTQLQNEKLYLYYLQNGRDMYVDQELDINRLSDYDVDHIVPQSFLKDDSIDNKVLTRSDKARGKSDNVPSEEVVKKMKNYWRQLLNAKLITQRKFDNLTKAERGGLSELDKAGFIKRQLVETRQITKHVAQILDSRMNTKYDENDKLIREVKVITLKSKLVSDFRKDFQFYKVREINNYHHAHDAYLNAVVGTALIKKYPKLESEFVYGDYKVYDVRKMIAKSEQEIGKATAKYFFYSNIMNFFKTEITLANGEIRKRPLIETNGETGEIVWDKGRDFATVRKVLSMPQVNIVKKTEVQTGGFSKESILPKRNSDKLIARKKDWDPKKYGGFDSPTVAYSVLVVAKVEKGKSKKLKSVKELLGITIMERSSFEKNPIDFLEAKGYKEVKKDLIIKLPKYSLFELENGRKRMLASAGELQKGNELALPSKYVNFLYLASHYEKLKGSPEDNEQKQLFVEQHKHYLDEIIEQISEFSKRVILADANLDKVLSAYNKHRDKPIREQAENIIHLFTLTNLGAPAAFKYFDTTIDRKRYTSTKEVLDATLIHQSITGLYETRIDLSQLGGDGGGGGEAAAKGGSGGLDDEYRLYSPLVKPDQNIQFWLEQFPQAWAETAGMGLAKQVPPQVIQLKASATPVSVRQYPLSKEAQEGIRPHVQRLIQQGILVPVQSPWNTPLLPVRKPGTNDYRPVQDLREVNKRVQDIHPTVPNPYNLLCALPPQRSWYTVLDLKDAFFCLRLHPTSQPLFAFEWRDPGTGRTGQLTWTRLPQGFKNSPTIFNEALHRDLANFRIQHPQVTLLQYVDDLLLAGATKQDCLEGTKALLLELSDLGYRASAKKAQICRREVTYLGYSLRDGQRWLTEARKKTVVQIPAPTTAKQVREFLGKAGFCRLFIPGFATLAAPLYPLTKPKGEFSWAPEHQKAFDAIKKALLSAPALALPDVTKPFTLYVDERKGVARGVLTQTLGPWRRPVAYLSKKLDPVASGWPVCLKAIAAVAILVKDADKLTLGQNITVIAPHALENIVRQPPDRWMTNARMTHYQSLLLTERVTFAPPAALNPATLLPEETDEPVTHDCHQLLIEETGVRKDLTDIPLTGEVLTWFTDGSSYVVEGKRMAGAAVVDGTRTIWASSLPEGTSAQKAELMALTQALRLAEGKSINIYTDSRYAFATAHVHGAIYKQRGWLTSAGREIKNKEEILSLLEALHLPKRLAIIHCPGHQKAKDPISRGNQMADRVAKQAAQGVNLLPAGKRTADGSEFEKRTADGSEFESPKKKAKVE

SEQ ID NO: 66 - protein, 2081 aa, synthetic construct
  source 1..2081: note = Description of Artificial Sequence: Synthetic polypeptide
MPAAKRVKLDGGDKKYSIGLDIGTNSVGWAVITDEYKVPSKKFKVLGNTDRHSIKKNLIGALLFDSGETAEATRLKRTARRRYTRRKNRICYLQEIFSNEMAKVDDSFFHRLEESFLVEEDKKHERHPIFGNIVDEVAYHEKYPTIYHLRKKLVDSTDKADLRLIYLALAHMIKFRGHFLIEGDLNPDNSDVDKLFIQLVQTYNQLFEENPINASGVDAKAILSARLSKSRRLENLIAQLPGEKKNGLFGNLIALSLGLTPNFKSNFDLAEDAKLQLSKDTYDDDLDNLLAQIGDQYADLFLAAKNLSDAILLSDILRVNTEITKAPLSASMIKRYDEHHQDLTLLKALVRQQLPEKYKEIFFDQSKNGYAGYIDGGASQEEFYKFIKPILEKMDGTEELLVKLNREDLLRKQRTFDNGSIPHQIHLGELHAILRRQEDFYPFLKDNREKIEKILTFRIPYYVGPLARGNSRFAWMTRKSEETITPWNFEEVVDKGASAQSFIERMTNFDKNLPNEKVLPKHSLLYEYFTVYNELTKVKYVTEGMRKPAFLSGEQKKAIVDLLFKTNRKVTVKQLKEDYFKKIECFDSVEISGVEDRFNASLGTYHDLLKIIKDKDFLDNEENEDILEDIVLTLTLFEDREMIEERLKTYAHLFDDKVMKQLKRRRYTGWGRLSRKLINGIRDKQSGKTILDFLKSDGFANRNFMQLIHDDSLTFKEDIQKAQVSGQGDSLHEHIANLAGSPAIKKGILQTVKVVDELVKVMGRHKPENIVIEMARENQTTQKGQKNSRERMKRIEEGIKELGSQILKEHPVENTQLQNEKLYLYYLQNGRDMYVDQELDINRLSDYDVDHIVPQSFLKDDSIDNKVLTRSDKARGKSDNVPSEEVVKKMKNYWRQLLNAKLITQRKFDNLTKAERGGLSELDKAGFIKRQLVETRQITKHVAQILDSRMNTKYDENDKLIREVKVITLKSKLVSDFRKDFQFYKVREINNYHHAHDAYLNAVVGTALIKKYPKLESEFVYGDYKVYDVRKMIAKSEQEIGKATAKYFFYSNIMNFFKTEITLANGEIRKRPLIETNGETGEIVWDKGRDFATVRKVLSMPQVNIVKKTEVQTGGFSKESILPKRNSDKLIARKKDWDPKKYGGFDSPTVAYSVLVVAKVEKGKSKKLKSVKELLGITIMERSSFEKNPIDFLEAKGYKEVKKDLIIKLPKYSLFELENGRKRMLASAGELQKGNELALPSKYVNFLYLASHYEKLKGSPEDNEQKQLFVEQHKHYLDEIIEQISEFSKRVILADANLDKVLSAYNKHRDKPIREQAENIIHLFTLTNLGAPAAFKYFDTTIDRKRYTSTKEVLDATLIHQSITGLYETRIDLSQLGGDGGGGGGGGLDDEYRLYSPLVKPDQNIQFWLEQFPQAWAETAGMGLAKQVPPQVIQLKASATPVSVRQYPLSKEAQEGIRPHVQRLIQQGILVPVQSPWNTPLLPVRKPGTNDYRPVQDLREVNKRVQDIHPTVPNPYNLLCALPPQRSWYTVLDLKDAFFCLRLHPTSQPLFAFEWRDPGTGRTGQLTWTRLPQGFKNSPTIFNEALHRDLANFRIQHPQVTLLQYVDDLLLAGATKQDCLEGTKALLLELSDLGYRASAKKAQICRREVTYLGYSLRDGQRWLTEARKKTVVQIPAPTTAKQVREFLGKAGFCRLFIPGFATLAAPLYPLTKPKGEFSWAPEHQKAFDAIKKALLSAPALALPDVTKPFTLYVDERKGVARGVLTQTLGPWRRPVAYLSKKLDPVASGWPVCLKAIAAVAILVKDADKLTLGQNITVIAPHALENIVRQPPDRWMTNARMTHYQSLLLTERVTFAPPAALNPATLLPEETDEPVTHDCHQLLIEETGVRKDLTDIPLTGEVLTWFTDGSSYVVEGKRMAGAAVVDGTRTIWASSLPEGTSAQKAELMALTQALRLAEGKSINIYTDSRYAFATAHVHGAIYKQRGWLTSAGREIKNKEEILSLLEALHLPKRLAIIHCPGHQKAKDPISRGNQMADRVAKQAAQGVNLLPAGKRTADGSEFEKRTADGSEFESPKKKAKVE

SEQ ID NO: 67 - protein, 2089 aa, synthetic construct
  source 1..2089: note = Description of Artificial Sequence: Synthetic polypeptide
MPAAKRVKLDGGDKKYSIGLDIGTNSVGWAVITDEYKVPSKKFKVLGNTDRHSIKKNLIGALLFDSGETAEATRLKRTARRRYTRRKNRICYLQEIFSNEMAKVDDSFFHRLEESFLVEEDKKHERHPIFGNIVDEVAYHEKYPTIYHLRKKLVDSTDKADLRLIYLALAHMIKFRGHFLIEGDLNPDNSDVDKLFIQLVQTYNQLFEENPINASGVDAKAILSARLSKSRRLENLIAQLPGEKKNGLFGNLIALSLGLTPNFKSNFDLAEDAKLQLSKDTYDDDLDNLLAQIGDQYADLFLAAKNLSDAILLSDILRVNTEITKAPLSASMIKRYDEHHQDLTLLKALVRQQLPEKYKEIFFDQSKNGYAGYIDGGASQEEFYKFIKPILEKMDGTEELLVKLNREDLLRKQRTFDNGSIPHQIHLGELHAILRRQEDFYPFLKDNREKIEKILTFRIPYYVGPLARGNSRFAWMTRKSEETITPWNFEEVVDKGASAQSFIERMTNFDKNLPNEKVLPKHSLLYEYFTVYNELTKVKYVTEGMRKPAFLSGEQKKAIVDLLFKTNRKVTVKQLKEDYFKKIECFDSVEISGVEDRFNASLGTYHDLLKIIKDKDFLDNEENEDILEDIVLTLTLFEDREMIEERLKTYAHLFDDKVMKQLKRRRYTGWGRLSRKLINGIRDKQSGKTILDFLKSDGFANRNFMQLIHDDSLTFKEDIQKAQVSGQGDSLHEHIANLAGSPAIKKGILQTVKVVDELVKVMGRHKPENIVIEMARENQTTQKGQKNSRERMKRIEEGIKELGSQILKEHPVENTQLQNEKLYLYYLQNGRDMYVDQELDINRLSDYDVDHIVPQSFLKDDSIDNKVLTRSDKARGKSDNVPSEEVVKKMKNYWRQLLNAKLITQRKFDNLTKAERGGLSELDKAGFIKRQLVETRQITKHVAQILDSRMNTKYDENDKLIREVKVITLKSKLVSDFRKDFQFYKVREINNYHHAHDAYLNAVVGTALIKKYPKLESEFVYGDYKVYDVRKMIAKSEQEIGKATAKYFFYSNIMNFFKTEITLANGEIRKRPLIETNGETGEIVWDKGRDFATVRKVLSMPQVNIVKKTEVQTGGFSKESILPKRNSDKLIARKKDWDPKKYGGFDSPTVAYSVLVVAKVEKGKSKKLKSVKELLGITIMERSSFEKNPIDFLEAKGYKEVKKDLIIKLPKYSLFELENGRKRMLASAGELQKGNELALPSKYVNFLYLASHYEKLKGSPEDNEQKQLFVEQHKHYLDEIIEQISEFSKRVILADANLDKVLSAYNKHRDKPIREQAENIIHLFTLTNLGAPAAFKYFDTTIDRKRYTSTKEVLDATLIHQSITGLYETRIDLSQLGGDGGGGSGGSGGSGGSGGLDDEYRLYSPLVKPDQNIQFWLEQFPQAWAETAGMGLAKQVPPQVIQLKASATPVSVRQYPLSKEAQEGIRPHVQRLIQQGILVPVQSPWNTPLLPVRKPGTNDYRPVQDLREVNKRVQDIHPTVPNPYNLLCALPPQRSWYTVLDLKDAFFCLRLHPTSQPLFAFEWRDPGTGRTGQLTWTRLPQGFKNSPTIFNEALHRDLANFRIQHPQVTLLQYVDDLLLAGATKQDCLEGTKALLLELSDLGYRASAKKAQICRREVTYLGYSLRDGQRWLTEARKKTVVQIPAPTTAKQVREFLGKAGFCRLFIPGFATLAAPLYPLTKPKGEFSWAPEHQKAFDAIKKALLSAPALALPDVTKPFTLYVDERKGVARGVLTQTLGPWRRPVAYLSKKLDPVASGWPVCLKAIAAVAILVKDADKLTLGQNITVIAPHALENIVRQPPDRWMTNARMTHYQSLLLTERVTFAPPAALNPATLLPEETDEPVTHDCHQLLIEETGVRKDLTDIPLTGEVLTWFTDGSSYVVEGKRMAGAAVVDGTRTIWASSLPEGTSAQKAELMALTQALRLAEGKSINIYTDSRYAFATAHVHGAIYKQRGWLTSAGREIKNKEEILSLLEALHLPKRLAIIHCPGHQKAKDPISRGNQMADRVAKQAAQGVNLLPAGKRTADGSEFEKRTADGSEFESPKKKAKVE

SEQ ID NO: 68 - protein, 2088 aa, synthetic construct
  source 1..2088: note = Description of Artificial Sequence: Synthetic polypeptide
MPAAKRVKLDGGDKKYSIGLDIGTNSVGWAVITDEYKVPSKKFKVLGNTDRHSIKKNLIGALLFDSGETAEATRLKRTARRRYTRRKNRICYLQEIFSNEMAKVDDSFFHRLEESFLVEEDKKHERHPIFGNIVDEVAYHEKYPTIYHLRKKLVDSTDKADLRLIYLALAHMIKFRGHFLIEGDLNPDNSDVDKLFIQLVQTYNQLFEENPINASGVDAKAILSARLSKSRRLENLIAQLPGEKKNGLFGNLIALSLGLTPNFKSNFDLAEDAKLQLSKDTYDDDLDNLLAQIGDQYADLFLAAKNLSDAILLSDILRVNTEITKAPLSASMIKRYDEHHQDLTLLKALVRQQLPEKYKEIFFDQSKNGYAGYIDGGASQEEFYKFIKPILEKMDGTEELLVKLNREDLLRKQRTFDNGSIPHQIHLGELHAILRRQEDFYPFLKDNREKIEKILTFRIPYYVGPLARGNSRFAWMTRKSEETITPWNFEEVVDKGASAQSFIERMTNFDKNLPNEKVLPKHSLLYEYFTVYNELTKVKYVTEGMRKPAFLSGEQKKAIVDLLFKTNRKVTVKQLKEDYFKKIECFDSVEISGVEDRFNASLGTYHDLLKIIKDKDFLDNEENEDILEDIVLTLTLFEDREMIEERLKTYAHLFDDKVMKQLKRRRYTGWGRLSRKLINGIRDKQSGKTILDFLKSDGFANRNFMQLIHDDSLTFKEDIQKAQVSGQGDSLHEHIANLAGSPAIKKGILQTVKVVDELVKVMGRHKPENIVIEMARENQTTQKGQKNSRERMKRIEEGIKELGSQILKEHPVENTQLQNEKLYLYYLQNGRDMYVDQELDINRLSDYDVDHIVPQSFLKDDSIDNKVLTRSDKARGKSDNVPSEEVVKKMKNYWRQLLNAKLITQRKFDNLTKAERGGLSELDKAGFIKRQLVETRQITKHVAQILDSRMNTKYDENDKLIREVKVITLKSKLVSDFRKDFQFYKVREINNYHHAHDAYLNAVVGTALIKKYPKLESEFVYGDYKVYDVRKMIAKSEQEIGKATAKYFFYSNIMNFFKTEITLANGEIRKRPLIETNGETGEIVWDKGRDFATVRKVLSMPQVNIVKKTEVQTGGFSKESILPKRNSDKLIARKKDWDPKKYGGFDSPTVAYSVLVVAKVEKGKSKKLKSVKELLGITIMERSSFEKNPIDFLEAKGYKEVKKDLIIKLPKYSLFELENGRKRMLASAGELQKGNELALPSKYVNFLYLASHYEKLKGSPEDNEQKQLFVEQHKHYLDEIIEQISEFSKRVILADANLDKVLSAYNKHRDKPIREQAENIIHLFTLTNLGAPAAFKYFDTTIDRKRYTSTKEVLDATLIHQSITGLYETRIDLSQLGGDGGGGGGGSEAAAKGGLDDEYRLYSPLVKPDQNIQFWLEQFPQAWAETAGMGLAKQVPPQVIQLKASATPVSVRQYPLSKEAQEGIRPHVQRLIQQGILVPVQSPWNTPLLPVRKPGTNDYRPVQDLREVNKRVQDIHPTVPNPYNLLCALPPQRSWYTVLDLKDAFFCLRLHPTSQPLFAFEWRDPGTGRTGQLTWTRLPQGFKNSPTIFNEALHRDLANFRIQHPQVTLLQYVDDLLLAGATKQDCLEGTKALLLELSDLGYRASAKKAQICRREVTYLGYSLRDGQRWLTEARKKTVVQIPAPTTAKQVREFLGKAGFCRLFIPGFATLAAPLYPLTKPKGEFSWAPEHQKAFDAIKKALLSAPALALPDVTKPFTLYVDERKGVARGVLTQTLGPWRRPVAYLSKKLDPVASGWPVCLKAIAAVAILVKDADKLTLGQNITVIAPHALENIVRQPPDRWMTNARMTHYQSLLLTERVTFAPPAALNPATLLPEETDEPVTHDCHQLLIEETGVRKDLTDIPLTGEVLTWFTDGSSYVVEGKRMAGAAVVDGTRTIWASSLPEGTSAQKAELMALTQALRLAEGKSINIYTDSRYAFATAHVHGAIYKQRGWLTSAGREIKNKEEILSLLEALHLPKRLAIIHCPGHQKAKDPISRGNQMADRVAKQAAQGVNLLPAGKRTADGSEFEKRTADGSEFESPKKKAKVE

SEQ ID NO: 69 - protein, 2086 aa, synthetic construct
  source 1..2086: note = Description of Artificial Sequence: Synthetic polypeptide
MPAAKRVKLDGGDKKYSIGLDIGTNSVGWAVITDEYKVPSKKFKVLGNTDRHSIKKNLIGALLFDSGETAEATRLKRTARRRYTRRKNRICYLQEIFSNEMAKVDDSFFHRLEESFLVEEDKKHERHPIFGNIVDEVAYHEKYPTIYHLRKKLVDSTDKADLRLIYLALAHMIKFRGHFLIEGDLNPDNSDVDKLFIQLVQTYNQLFEENPINASGVDAKAILSARLSKSRRLENLIAQLPGEKKNGLFGNLIALSLGLTPNFKSNFDLAEDAKLQLSKDTYDDDLDNLLAQIGDQYADLFLAAKNLSDAILLSDILRVNTEITKAPLSASMIKRYDEHHQDLTLLKALVRQQLPEKYKEIFFDQSKNGYAGYIDGGASQEEFYKFIKPILEKMDGTEELLVKLNREDLLRKQRTFDNGSIPHQIHLGELHAILRRQEDFYPFLKDNREKIEKILTFRIPYYVGPLARGNSRFAWMTRKSEETITPWNFEEVVDKGASAQSFIERMTNFDKNLPNEKVLPKHSLLYEYFTVYNELTKVKYVTEGMRKPAFLSGEQKKAIVDLLFKTNRKVTVKQLKEDYFKKIECFDSVEISGVEDRFNASLGTYHDLLKIIKDKDFLDNEENEDILEDIVLTLTLFEDREMIEERLKTYAHLFDDKVMKQLKRRRYTGWGRLSRKLINGIRDKQSGKTILDFLKSDGFANRNFMQLIHDDSLTFKEDIQKAQVSGQGDSLHEHIANLAGSPAIKKGILQTVKVVDELVKVMGRHKPENIVIEMARENQTTQKGQKNSRERMKRIEEGIKELGSQILKEHPVENTQLQNEKLYLYYLQNGRDMYVDQELDINRLSDYDVDHIVPQSFLKDDSIDNKVLTRSDKARGKSDNVPSEEVVKKMKNYWRQLLNAKLITQRKFDNLTKAERGGLSELDKAGFIKRQLVETRQITKHVAQILDSRMNTKYDENDKLIREVKVITLKSKLVSDFRKDFQFYKVREINNYHHAHDAYLNAVVGTALIKKYPKLESEFVYGDYKVYDVRKMIAKSEQEIGKATAKYFFYSNIMNFFKTEITLANGEIRKRPLIETNGETGEIVWDKGRDFATVRKVLSMPQVNIVKKTEVQTGGFSKESILPKRNSDKLIARKKDWDPKKYGGFDSPTVAYSVLVVAKVEKGKSKKLKSVKELLGITIMERSSFEKNPIDFLEAKGYKEVKKDLIIKLPKYSLFELENGRKRMLASAGELQKGNELALPSKYVNFLYLASHYEKLKGSPEDNEQKQLFVEQHKHYLDEIIEQISEFSKRVILADANLDKVLSAYNKHRDKPIREQAENIIHLFTLTNLGAPAAFKYFDTTIDRKRYTSTKEVLDATLIHQSITGLYETRIDLSQLGGDGGGSSPAPGGSGGLDDEYRLYSPLVKPDQNIQFWLEQFPQAWAETAGMGLAKQVPPQVIQLKASATPVSVRQYPLSKEAQEGIRPHVQRLIQQGILVPVQSPWNTPLLPVRKPGTNDYRPVQDLREVNKRVQDIHPTVPNPYNLLCALPPQRSWYTVLDLKDAFFCLRLHPTSQPLFAFEWRDPGTGRTGQLTWTRLPQGFKNSPTIFNEALHRDLANFRIQHPQVTLLQYVDDLLLAGATKQDCLEGTKALLLELSDLGYRASAKKAQICRREVTYLGYSLRDGQRWLTEARKKTVVQIPAPTTAKQVREFLGKAGFCRLFIPGFATLAAPLYPLTKPKGEFSWAPEHQKAFDAIKKALLSAPALALPDVTKPFTLYVDERKGVARGVLTQTLGPWRRPVAYLSKKLDPVASGWPVCLKAIAAVAILVKDADKLTLGQNITVIAPHALENIVRQPPDRWMTNARMTHYQSLLLTERVTFAPPAALNPATLLPEETDEPVTHDCHQLLIEETGVRKDLTDIPLTGEVLTWFTDGSSYVVEGKRMAGAAVVDGTRTIWASSLPEGTSAQKAELMALTQALRLAEGKSINIYTDSRYAFATAHVHGAIYKQRGWLTSAGREIKNKEEILSLLEALHLPKRLAIIHCPGHQKAKDPISRGNQMADRVAKQAAQGVNLLPAGKRTADGSEFEKRTADGSEFESPKKKAKVE

SEQ ID NO: 70 - protein, 2082 aa, synthetic construct
  source 1..2082: note = Description of Artificial Sequence: Synthetic polypeptide
MPAAKRVKLDGGDKKYSIGLDIGTNSVGWAVITDEYKVPSKKFKVLGNTDRHSIKKNLIGALLFDSGETAEATRLKRTARRRYTRRKNRICYLQEIFSNEMAKVDDSFFHRLEESFLVEEDKKHERHPIFGNIVDEVAYHEKYPTIYHLRKKLVDSTDKADLRLIYLALAHMIKFRGHFLIEGDLNPDNSDVDKLFIQLVQTYNQLFEENPINASGVDAKAILSARLSKSRRLENLIAQLPGEKKNGLFGNLIALSLGLTPNFKSNFDLAEDAKLQLSKDTYDDDLDNLLAQIGDQYADLFLAAKNLSDAILLSDILRVNTEITKAPLSASMIKRYDEHHQDLTLLKALVRQQLPEKYKEIFFDQSKNGYAGYIDGGASQEEFYKFIKPILEKMDGTEELLVKLNREDLLRKQRTFDNGSIPHQIHLGELHAILRRQEDFYPFLKDNREKIEKILTFRIPYYVGPLARGNSRFAWMTRKSEETITPWNFEEVVDKGASAQSFIERMTNFDKNLPNEKVLPKHSLLYEYFTVYNELTKVKYVTEGMRKPAFLSGEQKKAIVDLLFKTNRKVTVKQLKEDYFKKIECFDSVEISGVEDRFNASLGTYHDLLKIIKDKDFLDNEENEDILEDIVLTLTLFEDREMIEERLKTYAHLFDDKVMKQLKRRRYTGWGRLSRKLINGIRDKQSGKTILDFLKSDGFANRNFMQLIHDDSLTFKEDIQKAQVSGQGDSLHEHIANLAGSPAIKKGILQTVKVVDELVKVMGRHKPENIVIEMARENQTTQKGQKNSRERMKRIEEGIKELGSQILKEHPVENTQLQNEKLYLYYLQNGRDMYVDQELDINRLSDYDVDHIVPQSFLKDDSIDNKVLTRSDKARGKSDNVPSEEVVKKMKNYWRQLLNAKLITQRKFDNLTKAERGGLSELDKAGFIKRQLVETRQITKHVAQILDSRMNTKYDENDKLIREVKVITLKSKLVSDFRKDFQFYKVREINNYHHAHDAYLNAVVGTALIKKYPKLESEFVYGDYKVYDVRKMIAKSEQEIGKATAKYFFYSNIMNFFKTEITLANGEIRKRPLIETNGETGEIVWDKGRDFATVRKVLSMPQVNIVKKTEVQTGGFSKESILPKRNSDKLIARKKDWDPKKYGGFDSPTVAYSVLVVAKVEKGKSKKLKSVKELLGITIMERSSFEKNPIDFLEAKGYKEVKKDLIIKLPKYSLFELENGRKRMLASAGELQKGNELALPSKYVNFLYLASHYEKLKGSPEDNEQKQLFVEQHKHYLDEIIEQISEFSKRVILADANLDKVLSAYNKHRDKPIREQAENIIHLFTLTNLGAPAAFKYFDTTIDRKRYTSTKEVLDATLIHQSITGLYETRIDLSQLGGDGGGGGGGGGLDDEYRLYSPLVKPDQNIQFWLEQFPQAWAETAGMGLAKQVPPQVIQLKASATPVSVRQYPLSKEAQEGIRPHVQRLIQQGILVPVQSPWNTPLLPVRKPGTNDYRPVQDLREVNKRVQDIHPTVPNPYNLLCALPPQRSWYTVLDLKDAFFCLRLHPTSQPLFAFEWRDPGTGRTGQLTWTRLPQGFKNSPTIFNEALHRDLANFRIQHPQVTLLQYVDDLLLAGATKQDCLEGTKALLLELSDLGYRASAKKAQICRREVTYLGYSLRDGQRWLTEARKKTVVQIPAPTTAKQVREFLGKAGFCRLFIPGFATLAAPLYPLTKPKGEFSWAPEHQKAFDAIKKALLSAPALALPDVTKPFTLYVDERKGVARGVLTQTLGPWRRPVAYLSKKLDPVASGWPVCLKAIAAVAILVKDADKLTLGQNITVIAPHALENIVRQPPDRWMTNARMTHYQSLLLTERVTFAPPAALNPATLLPEETDEPVTHDCHQLLIEETGVRKDLTDIPLTGEVLTWFTDGSSYVVEGKRMAGAAVVDGTRTIWASSLPEGTSAQKAELMALTQALRLAEGKSINIYTDSRYAFATAHVHGAIYKQRGWLTSAGREIKNKEEILSLLEALHLPKRLAIIHCPGHQKAKDPISRGNQMADRVAKQAAQGVNLLPAGKRTADGSEFEKRTADGSEFESPKKKAKVE

SEQ ID NO: 71 - protein, 2088 aa, synthetic construct
  source 1..2088: note = Description of Artificial Sequence: Synthetic polypeptide
MPAAKRVKLDGGDKKYSIGLDIGTNSVGWAVITDEYKVPSKKFKVLGNTDRHSIKKNLIGALLFDSGETAEATRLKRTARRRYTRRKNRICYLQEIFSNEMAKVDDSFFHRLEESFLVEEDKKHERHPIFGNIVDEVAYHEKYPTIYHLRKKLVDSTDKADLRLIYLALAHMIKFRGHFLIEGDLNPDNSDVDKLFIQLVQTYNQLFEENPINASGVDAKAILSARLSKSRRLENLIAQLPGEKKNGLFGNLIALSLGLTPNFKSNFDLAEDAKLQLSKDTYDDDLDNLLAQIGDQYADLFLAAKNLSDAILLSDILRVNTEITKAPLSASMIKRYDEHHQDLTLLKALVRQQLPEKYKEIFFDQSKNGYAGYIDGGASQEEFYKFIKPILEKMDGTEELLVKLNREDLLRKQRTFDNGSIPHQIHLGELHAILRRQEDFYPFLKDNREKIEKILTFRIPYYVGPLARGNSRFAWMTRKSEETITPWNFEEVVDKGASAQSFIERMTNFDKNLPNEKVLPKHSLLYEYFTVYNELTKVKYVTEGMRKPAFLSGEQKKAIVDLLFKTNRKVTVKQLKEDYFKKIECFDSVEISGVEDRFNASLGTYHDLLKIIKDKDFLDNEENEDILEDIVLTLTLFEDREMIEERLKTYAHLFDDKVMKQLKRRRYTGWGRLSRKLINGIRDKQSGKTILDFLKSDGFANRNFMQLIHDDSLTFKEDIQKAQVSGQGDSLHEHIANLAGSPAIKKGILQTVKVVDELVKVMGRHKPENIVIEMARENQTTQKGQKNSRERMKRIEEGIKELGSQILKEHPVENTQLQNEKLYLYYLQNGRDMYVDQELDINRLSDYDVDHIVPQSFLKDDSIDNKVLTRSDKARGKSDNVPSEEVVKKMKNYWRQLLNAKLITQRKFDNLTKAERGGLSELDKAGFIKRQLVETRQITKHVAQILDSRMNTKYDENDKLIREVKVITLKSKLVSDFRKDFQFYKVREINNYHHAHDAYLNAVVGTALIKKYPKLESEFVYGDYKVYDVRKMIAKSEQEIGKATAKYFFYSNIMNFFKTEITLANGEIRKRPLIETNGETGEIVWDKGRDFATVRKVLSMPQVNIVKKTEVQTGGFSKESILPKRNSDKLIARKKDWDPKKYGGFDSPTVAYSVLVVAKVEKGKSKKLKSVKELLGITIMERSSFEKNPIDFLEAKGYKEVKKDLIIKLPKYSLFELENGRKRMLASAGELQKGNELALPSKYVNFLYLASHYEKLKGSPEDNEQKQLFVEQHKHYLDEIIEQISEFSKRVILADANLDKVLSAYNKHRDKPIREQAENIIHLFTLTNLGAPAAFKYFDTTIDRKRYTSTKEVLDATLIHQSITGLYETRIDLSQLGGDGGEAAAKGGSGSSGGLDDEYRLYSPLVKPDQNIQFWLEQFPQAWAETAGMGLAKQVPPQVIQLKASATPVSVRQYPLSKEAQEGIRPHVQRLIQQGILVPVQSPWNTPLLPVRKPGTNDYRPVQDLREVNKRVQDIHPTVPNPYNLLCALPPQRSWYTVLDLKDAFFCLRLHPTSQPLFAFEWRDPGTGRTGQLTWTRLPQGFKNSPTIFNEALHRDLANFRIQHPQVTLLQYVDDLLLAGATKQDCLEGTKALLLELSDLGYRASAKKAQICRREVTYLGYSLRDGQRWLTEARKKTVVQIPAPTTAKQVREFLGKAGFCRLFIPGFATLAAPLYPLTKPKGEFSWAPEHQKAFDAIKKALLSAPALALPDVTKPFTLYVDERKGVARGVLTQTLGPWRRPVAYLSKKLDPVASGWPVCLKAIAAVAILVKDADKLTLGQNITVIAPHALENIVRQPPDRWMTNARMTHYQSLLLTERVTFAPPAALNPATLLPEETDEPVTHDCHQLLIEETGVRKDLTDIPLTGEVLTWFTDGSSYVVEGKRMAGAAVVDGTRTIWASSLPEGTSAQKAELMALTQALRLAEGKSINIYTDSRYAFATAHVHGAIYKQRGWLTSAGREIKNKEEILSLLEALHLPKRLAIIHCPGHQKAKDPISRGNQMADRVAKQAAQGVNLLPAGKRTADGSEFEKRTADGSEFESPKKKAKVE

SEQ ID NO: 72 - protein, 2088 aa, synthetic construct
  source 1..2088: note = Description of Artificial Sequence: Synthetic polypeptide
MPAAKRVKLDGGDKKYSIGLDIGTNSVGWAVITDEYKVPSKKFKVLGNTDRHSIKKNLIGALLFDSGETAEATRLKRTARRRYTRRKNRICYLQEIFSNEMAKVDDSFFHRLEESFLVEEDKKHERHPIFGNIVDEVAYHEKYPTIYHLRKKLVDSTDKADLRLIYLALAHMIKFRGHFLIEGDLNPDNSDVDKLFIQLVQTYNQLFEENPINASGVDAKAILSARLSKSRRLENLIAQLPGEKKNGLFGNLIALSLGLTPNFKSNFDLAEDAKLQLSKDTYDDDLDNLLAQIGDQYADLFLAAKNLSDAILLSDILRVNTEITKAPLSASMIKRYDEHHQDLTLLKALVRQQLPEKYKEIFFDQSKNGYAGYIDGGASQEEFYKFIKPILEKMDGTEELLVKLNREDLLRKQRTFDNGSIPHQIHLGELHAILRRQEDFYPFLKDNREKIEKILTFRIPYYVGPLARGNSRFAWMTRKSEETITPWNFEEVVDKGASAQSFIERMTNFDKNLPNEKVLPKHSLLYEYFTVYNELTKVKYVTEGMRKPAFLSGEQKKAIVDLLFKTNRKVTVKQLKEDYFKKIECFDSVEISGVEDRFNASLGTYHDLLKIIKDKDFLDNEENEDILEDIVLTLTLFEDREMIEERLKTYAHLFDDKVMKQLKRRRYTGWGRLSRKLINGIRDKQSGKTILDFLKSDGFANRNFMQLIHDDSLTFKEDIQKAQVSGQGDSLHEHIANLAGSPAIKKGILQTVKVVDELVKVMGRHKPENIVIEMARENQTTQKGQKNSRERMKRIEEGIKELGSQILKEHPVENTQLQNEKLYLYYLQNGRDMYVDQELDINRLSDYDVDHIVPQSFLKDDSIDNKVLTRSDKARGKSDNVPSEEVVKKMKNYWRQLLNAKLITQRKFDNLTKAERGGLSELDKAGFIKRQLVETRQITKHVAQILDSRMNTKYDENDKLIREVKVITLKSKLVSDFRKDFQFYKVREINNYHHAHDAYLNAVVGTALIKKYPKLESEFVYGDYKVYDVRKMIAKSEQEIGKATAKYFFYSNIMNFFKTEITLANGEIRKRPLIETNGETGEIVWDKGRDFATVRKVLSMPQVNIVKKTEVQTGGFSKESILPKRNSDKLIARKKDWDPKKYGGFDSPTVAYSVLVVAKVEKGKSKKLKSVKELLGITIMERSSFEKNPIDFLEAKGYKEVKKDLIIKLPKYSLFELENGRKRMLASAGELQKGNELALPSKYVNFLYLASHYEKLKGSPEDNEQKQLFVEQHKHYLDEIIEQISEFSKRVILADANLDKVLSAYNKHRDKPIREQAENIIHLFTLTNLGAPAAFKYFDTTIDRKRYTSTKEVLDATLIHQSITGLYETRIDLSQLGGDGGEAAAKGGSGGGGGLDDEYRLYSPLVKPDQNIQFWLEQFPQAWAETAGMGLAKQVPPQVIQLKASATPVSVRQYPLSKEAQEGIRPHVQRLIQQGILVPVQSPWNTPLLPVRKPGTNDYRPVQDLREVNKRVQDIHPTVPNPYNLLCALPPQRSWYTVLDLKDAFFCLRLHPTSQPLFAFEWRDPGTGRTGQLTWTRLPQGFKNSPTIFNEALHRDLANFRIQHPQVTLLQYVDDLLLAGATKQDCLEGTKALLLELSDLGYRASAKKAQICRREVTYLGYSLRDGQRWLTEARKKTVVQIPAPTTAKQVREFLGKAGFCRLFIPGFATLAAPLYPLTKPKGEFSWAPEHQKAFDAIKKALLSAPALALPDVTKPFTLYVDERKGVARGVLTQTLGPWRRPVAYLSKKLDPVASGWPVCLKAIAAVAILVKDADKLTLGQNITVIAPHALENIVRQPPDRWMTNARMTHYQSLLLTERVTFAPPAALNPATLLPEETDEPVTHDCHQLLIEETGVRKDLTDIPLTGEVLTWFTDGSSYVVEGKRMAGAAVVDGTRTIWASSLPEGTSAQKAELMALTQALRLAEGKSINIYTDSRYAFATAHVHGAIYKQRGWLTSAGREIKNKEEILSLLEALHLPKRLAIIHCPGHQKAKDPISRGNQMADRVAKQAAQGVNLLPAGKRTADGSEFEKRTADGSEFESPKKKAKVE

SEQ ID NO: 73 - protein, 2086 aa, synthetic construct
  source 1..2086: note = Description of Artificial Sequence: Synthetic polypeptide
MPAAKRVKLDGGDKKYSIGLDIGTNSVGWAVITDEYKVPSKKFKVLGNTDRHSIKKNLIGALLFDSGETAEATRLKRTARRRYTRRKNRICYLQEIFSNEMAKVDDSFFHRLEESFLVEEDKKHERHPIFGNIVDEVAYHEKYPTIYHLRKKLVDSTDKADLRLIYLALAHMIKFRGHFLIEGDLNPDNSDVDKLFIQLVQTYNQLFEENPINASGVDAKAILSARLSKSRRLENLIAQLPGEKKNGLFGNLIALSLGLTPNFKSNFDLAEDAKLQLSKDTYDDDLDNLLAQIGDQYADLFLAAKNLSDAILLSDILRVNTEITKAPLSASMIKRYDEHHQDLTLLKALVRQQLPEKYKEIFFDQSKNGYAGYIDGGASQEEFYKFIKPILEKMDGTEELLVKLNREDLLRKQRTFDNGSIPHQIHLGELHAILRRQEDFYPFLKDNREKIEKILTFRIPYYVGPLARGNSRFAWMTRKSEETITPWNFEEVVDKGASAQSFIERMTNFDKNLPNEKVLPKHSLLYEYFTVYNELTKVKYVTEGMRKPAFLSGEQKKAIVDLLFKTNRKVTVKQLKEDYFKKIECFDSVEISGVEDRFNASLGTYHDLLKIIKDKDFLDNEENEDILEDIVLTLTLFEDREMIEERLKTYAHLFDDKVMKQLKRRRYTGWGRLSRKLINGIRDKQSGKTILDFLKSDGFANRNFMQLIHDDSLTFKEDIQKAQVSGQGDSLHEHIANLAGSPAIKKGILQTVKVVDELVKVMGRHKPENIVIEMARENQTTQKGQKNSRERMKRIEEGIKELGSQILKEHPVENTQLQNEKLYLYYLQNGRDMYVDQELDINRLSDYDVDHIVPQSFLKDDSIDNKVLTRSDKARGKSDNVPSEEVVKKMKNYWRQLLNAKLITQRKFDNLTKAERGGLSELDKAGFIKRQLVETRQITKHVAQILDSRMNTKYDENDKLIREVKVITLKSKLVSDFRKDFQFYKVREINNYHHAHDAYLNAVVGTALIKKYPKLESEFVYGDYKVYDVRKMIAKSEQEIGKATAKYFFYSNIMNFFKTEITLANGEIRKRPLIETNGETGEIVWDKGRDFATVRKVLSMPQVNIVKKTEVQTGGFSKESILPKRNSDKLIARKKDWDPKKYGGFDSPTVAYSVLVVAKVEKGKSKKLKSVKELLGITIMERSSFEKNPIDFLEAKGYKEVKKDLIIKLPKYSLFELENGRKRMLASAGELQKGNELALPSKYVNFLYLASHYEKLKGSPEDNEQKQLFVEQHKHYLDEIIEQISEFSKRVILADANLDKVLSAYNKHRDKPIREQAENIIHLFTLTNLGAPAAFKYFDTTIDRKRYTSTKEVLDATLIHQSITGLYETRIDLSQLGGDGGGSSPAPGGGGGLDDEYRLYSPLVKPDQNIQFWLEQFPQAWAETAGMGLAKQVPPQVIQLKASATPVSVRQYPLSKEAQEGIRPHVQRLIQQGILVPVQSPWNTPLLPVRKPGTNDYRPVQDLREVNKRVQDIHPTVPNPYNLLCALPPQRSWYTVLDLKDAFFCLRLHPTSQPLFAFEWRDPGTGRTGQLTWTRLPQGFKNSPTIFNEALHRDLANFRIQHPQVTLLQYVDDLLLAGATKQDCLEGTKALLLELSDLGYRASAKKAQICRREVTYLGYSLRDGQRWLTEARKKTVVQIPAPTTAKQVREFLGKAGFCRLFIPGFATLAAPLYPLTKPKGEFSWAPEHQKAFDAIKKALLSAPALALPDVTKPFTLYVDERKGVARGVLTQTLGPWRRPVAYLSKKLDPVASGWPVCLKAIAAVAILVKDADKLTLGQNITVIAPHALENIVRQPPDRWMTNARMTHYQSLLLTERVTFAPPAALNPATLLPEETDEPVTHDCHQLLIEETGVRKDLTDIPLTGEVLTWFTDGSSYVVEGKRMAGAAVVDGTRTIWASSLPEGTSAQKAELMALTQALRLAEGKSINIYTDSRYAFATAHVHGAIYKQRGWLTSAGREIKNKEEILSLLEALHLPKRLAIIHCPGHQKAKDPISRGNQMADRVAKQAAQGVNLLPAGKRTADGSEFEKRTADGSEFESPKKKAKVE

SEQ ID NO: 74 - protein, 2089 aa, synthetic construct
  source 1..2089: note = Description of Artificial Sequence: Synthetic polypeptide
MPAAKRVKLDGGDKKYSIGLDIGTNSVGWAVITDEYKVPSKKFKVLGNTDRHSIKKNLIGALLFDSGETAEATRLKRTARRRYTRRKNRICYLQEIFSNEMAKVDDSFFHRLEESFLVEEDKKHERHPIFGNIVDEVAYHEKYPTIYHLRKKLVDSTDKADLRLIYLALAHMIKFRGHFLIEGDLNPDNSDVDKLFIQLVQTYNQLFEENPINASGVDAKAILSARLSKSRRLENLIAQLPGEKKNGLFGNLIALSLGLTPNFKSNFDLAEDAKLQLSKDTYDDDLDNLLAQIGDQYADLFLAAKNLSDAILLSDILRVNTEITKAPLSASMIKRYDEHHQDLTLLKALVRQQLPEKYKEIFFDQSKNGYAGYIDGGASQEEFYKFIKPILEKMDGTEELLVKLNREDLLRKQRTFDNGSIPHQIHLGELHAILRRQEDFYPFLKDNREKIEKILTFRIPYYVGPLARGNSRFAWMTRKSEETITPWNFEEVVDKGASAQSFIERMTNFDKNLPNEKVLPKHSLLYEYFTVYNELTKVKYVTEGMRKPAFLSGEQKKAIVDLLFKTNRKVTVKQLKEDYFKKIECFDSVEISGVEDRFNASLGTYHDLLKIIKDKDFLDNEENEDILEDIVLTLTLFEDREMIEERLKTYAHLFDDKVMKQLKRRRYTGWGRLSRKLINGIRDKQSGKTILDFLKSDGFANRNFMQLIHDDSLTFKEDIQKAQVSGQGDSLHEHIANLAGSPAIKKGILQTVKVVDELVKVMGRHKPENIVIEMARENQTTQKGQKNSRERMKRIEEGIKELGSQILKEHPVENTQLQNEKLYLYYLQNGRDMYVDQELDINRLSDYDVDHIVPQSFLKDDSIDNKVLTRSDKARGKSDNVPSEEVVKKMKNYWRQLLNAKLITQRKFDNLTKAERGGLSELDKAGFIKRQLVETRQITKHVAQILDSRMNTKYDENDKLIREVKVITLKSKLVSDFRKDFQFYKVREINNYHHAHDAYLNAVVGTALIKKYPKLESEFVYGDYKVYDVRKMIAKSEQEIGKATAKYFFYSNIMNFFKTEITLANGEIRKRPLIETNGETGEIVWDKGRDFATVRKVLSMPQVNIVKKTEVQTGGFSKESILPKRNSDKLIARKKDWDPKKYGGFDSPTVAYSVLVVAKVEKGKSKKLKSVKELLGITIMERSSFEKNPIDFLEAKGYKEVKKDLIIKLPKYSLFELENGRKRMLASAGELQKGNELALPSKYVNFLYLASHYEKLKGSPEDNEQKQLFVEQHKHYLDEIIEQISEFSKRVILADANLDKVLSAYNKHRDKPIREQAENIIHLFTLTNLGAPAAFKYFDTTIDRKRYTSTKEVLDATLIHQSITGLYETRIDLSQLGGDGGGSAGSAAGSGEFGGLDDEYRLYSPLVKPDQNIQFWLEQFPQAWAETAGMGLAKQVPPQVIQLKASATPVSVRQYPLSKEAQEGIRPHVQRLIQQGILVPVQSPWNTPLLPVRKPGTNDYRPVQDLREVNKRVQDIHPTVPNPYNLLCALPPQRSWYTVLDLKDAFFCLRLHPTSQPLFAFEWRDPGTGRTGQLTWTRLPQGFKNSPTIFNEALHRDLANFRIQHPQVTLLQYVDDLLLAGATKQDCLEGTKALLLELSDLGYRASAKKAQICRREVTYLGYSLRDGQRWLTEARKKTVVQIPAPTTAKQVREFLGKAGFCRLFIPGFATLAAPLYPLTKPKGEFSWAPEHQKAFDAIKKALLSAPALALPDVTKPFTLYVDERKGVARGVLTQTLGPWRRPVAYLSKKLDPVASGWPVCLKAIAAVAILVKDADKLTLGQNITVIAPHALENIVRQPPDRWMTNARMTHYQSLLLTERVTFAPPAALNPATLLPEETDEPVTHDCHQLLIEETGVRKDLTDIPLTGEVLTWFTDGSSYVVEGKRMAGAAVVDGTRTIWASSLPEGTSAQKAELMALTQALRLAEGKSINIYTDSRYAFATAHVHGAIYKQRGWLTSAGREIKNKEEILSLLEALHLPKRLAIIHCPGHQKAKDPISRGNQMADRVAKQAAQGVNLLPAGKRTADGSEFEKRTADGSEFESPKKKAKVE

SEQ ID NO: 75 - protein, 2092 aa, synthetic construct
  source 1..2092: note = Description of Artificial Sequence: Synthetic polypeptide
MPAAKRVKLDGGDKKYSIGLDIGTNSVGWAVITDEYKVPSKKFKVLGNTDRHSIKKNLIGALLFDSGETAEATRLKRTARRRYTRRKNRICYLQEIFSNEMAKVDDSFFHRLEESFLVEEDKKHERHPIFGNIVDEVAYHEKYPTIYHLRKKLVDSTDKADLRLIYLALAHMIKFRGHFLIEGDLNPDNSDVDKLFIQLVQTYNQLFEENPINASGVDAKAILSARLSKSRRLENLIAQLPGEKKNGLFGNLIALSLGLTPNFKSNFDLAEDAKLQLSKDTYDDDLDNLLAQIGDQYADLFLAAKNLSDAILLSDILRVNTEITKAPLSASMIKRYDEHHQDLTLLKALVRQQLPEKYKEIFFDQSKNGYAGYIDGGASQEEFYKFIKPILEKMDGTEELLVKLNREDLLRKQRTFDNGSIPHQIHLGELHAILRRQEDFYPFLKDNREKIEKILTFRIPYYVGPLARGNSRFAWMTRKSEETITPWNFEEVVDKGASAQSFIERMTNFDKNLPNEKVLPKHSLLYEYFTVYNELTKVKYVTEGMRKPAFLSGEQKKAIVDLLFKTNRKVTVKQLKEDYFKKIECFDSVEISGVEDRFNASLGTYHDLLKIIKDKDFLDNEENEDILEDIVLTLTLFEDREMIEERLKTYAHLFDDKVMKQLKRRRYTGWGRLSRKLINGIRDKQSGKTILDFLKSDGFANRNFMQLIHDDSLTFKEDIQKAQVSGQGDSLHEHIANLAGSPAIKKGILQTVKVVDELVKVMGRHKPENIVIEMARENQTTQKGQKNSRERMKRIEEGIKELGSQILKEHPVENTQLQNEKLYLYYLQNGRDMYVDQELDINRLSDYDVDHIVPQSFLKDDSIDNKVLTRSDKARGKSDNVPSEEVVKKMKNYWRQLLNAKLITQRKFDNLTKAERGGLSELDKAGFIKRQLVETRQITKHVAQILDSRMNTKYDENDKLIREVKVITLKSKLVSDFRKDFQFYKVREINNYHHAHDAYLNAVVGTALIKKYPKLESEFVYGDYKVYDVRKMIAKSEQEIGKATAKYFFYSNIMNFFKTEITLANGEIRKRPLIETNGETGEIVWDKGRDFATVRKVLSMPQVNIVKKTEVQTGGFSKESILPKRNSDKLIARKKDWDPKKYGGFDSPTVAYSVLVVAKVEKGKSKKLKSVKELLGITIMERSSFEKNPIDFLEAKGYKEVKKDLIIKLPKYSLFELENGRKRMLASAGELQKGNELALPSKYVNFLYLASHYEKLKGSPEDNEQKQLFVEQHKHYLDEIIEQISEFSKRVILADANLDKVLSAYNKHRDKPIREQAENIIHLFTLTNLGAPAAFKYFDTTIDRKRYTSTKEVLDATLIHQSITGLYETRIDLSQLGGDGGGGGGSEAAAKGGGGSGGLDDEYRLYSPLVKPDQNIQFWLEQFPQAWAETAGMGLAKQVPPQVIQLKASATPVSVRQYPLSKEAQEGIRPHVQRLIQQGILVPVQSPWNTPLLPVRKPGTNDYRPVQDLREVNKRVQDIHPTVPNPYNLLCALPPQRSWYTVLDLKDAFFCLRLHPTSQPLFAFEWRDPGTGRTGQLTWTRLPQGFKNSPTIFNEALHRDLANFRIQHPQVTLLQYVDDLLLAGATKQDCLEGTKALLLELSDLGYRASAKKAQICRREVTYLGYSLRDGQRWLTEARKKTVVQIPAPTTAKQVREFLGKAGFCRLFIPGFATLAAPLYPLTKPKGEFSWAPEHQKAFDAIKKALLSAPALALPDVTKPFTLYVDERKGVARGVLTQTLGPWRRPVAYLSKKLDPVASGWPVCLKAIAAVAILVKDADKLTLGQNITVIAPHALENIVRQPPDRWMTNARMTHYQSLLLTERVTFAPPAALNPATLLPEETDEPVTHDCHQLLIEETGVRKDLTDIPLTGEVLTWFTDGSSYVVEGKRMAGAAVVDGTRTIWASSLPEGTSAQKAELMALTQALRLAEGKSINIYTDSRYAFATAHVHGAIYKQRGWLTSAGREIKNKEEILSLLEALHLPKRLAIIHCPGHQKAKDPISRGNQMADRVAKQAAQGVNLLPAGKRTADGSEFEKRTADGSEFESPKKKAKVE

SEQ ID NO: 76 - protein, 2083 aa, synthetic construct
  source 1..2083: note = Description of Artificial Sequence: Synthetic polypeptide
MPAAKRVKLDGGDKKYSIGLDIGTNSVGWAVITDEYKVPSKKFKVLGNTDRHSIKKNLIGALLFDSGETAEATRLKRTARRRYTRRKNRICYLQEIFSNEMAKVDDSFFHRLEESFLVEEDKKHERHPIFGNIVDEVAYHEKYPTIYHLRKKLVDSTDKADLRLIYLALAHMIKFRGHFLIEGDLNPDNSDVDKLFIQLVQTYNQLFEENPINASGVDAKAILSARLSKSRRLENLIAQLPGEKKNGLFGNLIALSLGLTPNFKSNFDLAEDAKLQLSKDTYDDDLDNLLAQIGDQYADLFLAAKNLSDAILLSDILRVNTEITKAPLSASMIKRYDEHHQDLTLLKALVRQQLPEKYKEIFFDQSKNGYAGYIDGGASQEEFYKFIKPILEKMDGTEELLVKLNREDLLRKQRTFDNGSIPHQIHLGELHAILRRQEDFYPFLKDNREKIEKILTFRIPYYVGPLARGNSRFAWMTRKSEETITPWNFEEVVDKGASAQSFIERMTNFDKNLPNEKVLPKHSLLYEYFTVYNELTKVKYVTEGMRKPAFLSGEQKKAIVDLLFKTNRKVTVKQLKEDYFKKIECFDSVEISGVEDRFNASLGTYHDLLKIIKDKDFLDNEENEDILEDIVLTLTLFEDREMIEERLKTYAHLFDDKVMKQLKRRRYTGWGRLSRKLINGIRDKQSGKTILDFLKSDGFANRNFMQLIHDDSLTFKEDIQKAQVSGQGDSLHEHIANLAGSPAIKKGILQTVKVVDELVKVMGRHKPENIVIEMARENQTTQKGQKNSRERMKRIEEGIKELGSQILKEHPVENTQLQNEKLYLYYLQNGRDMYVDQELDINRLSDYDVDHIVPQSFLKDDSIDNKVLTRSDKARGKSDNVPSEEVVKKMKNYWRQLLNAKLITQRKFDNLTKAERGGLSELDKAGFIKRQLVETRQITKHVAQILDSRMNTKYDENDKLIREVKVITLKSKLVSDFRKDFQFYKVREINNYHHAHDAYLNAVVGTALIKKYPKLESEFVYGDYKVYDVRKMIAKSEQEIGKATAKYFFYSNIMNFFKTEITLANGEIRKRPLIETNGETGEIVWDKGRDFATVRKVLSMPQVNIVKKTEVQTGGFSKESILPKRNSDKLIARKKDWDPKKYGGFDSPTVAYSVLVVAKVEKGKSKKLKSVKELLGITIMERSSFEKNPIDFLEAKGYKEVKKDLIIKLPKYSLFELENGRKRMLASAGELQKGNELALPSKYVNFLYLASHYEKLKGSPEDNEQKQLFVEQHKHYLDEIIEQISEFSKRVILADANLDKVLSAYNKHRDKPIREQAENIIHLFTLTNLGAPAAFKYFDTTIDRKRYTSTKEVLDATLIHQSITGLYETRIDLSQLGGDGGGGGPAPGGLDDEYRLYSPLVKPDQNIQFWLEQFPQAWAETAGMGLAKQVPPQVIQLKASATPVSVRQYPLSKEAQEGIRPHVQRLIQQGILVPVQSPWNTPLLPVRKPGTNDYRPVQDLREVNKRVQDIHPTVPNPYNLLCALPPQRSWYTVLDLKDAFFCLRLHPTSQPLFAFEWRDPGTGRTGQLTWTRLPQGFKNSPTIFNEALHRDLANFRIQHPQVTLLQYVDDLLLAGATKQDCLEGTKALLLELSDLGYRASAKKAQICRREVTYLGYSLRDGQRWLTEARKKTVVQIPAPTTAKQVREFLGKAGFCRLFIPGFATLAAPLYPLTKPKGEFSWAPEHQKAFDAIKKALLSAPALALPDVTKPFTLYVDERKGVARGVLTQTLGPWRRPVAYLSKKLDPVASGWPVCLKAIAAVAILVKDADKLTLGQNITVIAPHALENIVRQPPDRWMTNARMTHYQSLLLTERVTFAPPAALNPATLLPEETDEPVTHDCHQLLIEETGVRKDLTDIPLTGEVLTWFTDGSSYVVEGKRMAGAAVVDGTRTIWASSLPEGTSAQKAELMALTQALRLAEGKSINIYTDSRYAFATAHVHGAIYKQRGWLTSAGREIKNKEEILSLLEALHLPKRLAIIHCPGHQKAKDPISRGNQMADRVAKQAAQGVNLLPAGKRTADGSEFEKRTADGSEFESPKKKAKVE

SEQ ID NO: 77 - protein, 2084 aa, synthetic construct
  source 1..2084: note = Description of Artificial Sequence: Synthetic polypeptide
MPAAKRVKLDGGDKKYSIGLDIGTNSVGWAVITDEYKVPSKKFKVLGNTDRHSIKKNLIGALLFDSGETAEATRLKRTARRRYTRRKNRICYLQEIFSNEMAKVDDSFFHRLEESFLVEEDKKHERHPIFGNIVDEVAYHEKYPTIYHLRKKLVDSTDKADLRLIYLALAHMIKFRGHFLIEGDLNPDNSDVDKLFIQLVQTYNQLFEENPINASGVDAKAILSARLSKSRRLENLIAQLPGEKKNGLFGNLIALSLGLTPNFKSNFDLAEDAKLQLSKDTYDDDLDNLLAQIGDQYADLFLAAKNLSDAILLSDILRVNTEITKAPLSASMIKRYDEHHQDLTLLKALVRQQLPEKYKEIFFDQSKNGYAGYIDGGASQEEFYKFIKPILEKMDGTEELLVKLNREDLLRKQRTFDNGSIPHQIHLGELHAILRRQEDFYPFLKDNREKIEKILTFRIPYYVGPLARGNSRFAWMTRKSEETITPWNFEEVVDKGASAQSFIERMTNFDKNLPNEKVLPKHSLLYEYFTVYNELTKVKYVTEGMRKPAFLSGEQKKAIVDLLFKTNRKVTVKQLKEDYFKKIECFDSVEISGVEDRFNASLGTYHDLLKIIKDKDFLDNEENEDILEDIVLTLTLFEDREMIEERLKTYAHLFDDKVMKQLKRRRYTGWGRLSRKLINGIRDKQSGKTILDFLKSDGFANRNFMQLIHDDSLTFKEDIQKAQVSGQGDSLHEHIANLAGSPAIKKGILQTVKVVDELVKVMGRHKPENIVIEMARENQTTQKGQKNSRERMKRIEEGIKELGSQILKEHPVENTQLQNEKLYLYYLQNGRDMYVDQELDINRLSDYDVDHIVPQSFLKDDSIDNKVLTRSDKARGKSDNVPSEEVVKKMKNYWRQLLNAKLITQRKFDNLTKAERGGLSELDKAGFIKRQLVETRQITKHVAQILDSRMNTKYDENDKLIREVKVITLKSKLVSDFRKDFQFYKVREINNYHHAHDAYLNAVVGTALIKKYPKLESEFVYGDYKVYDVRKMIAKSEQEIGKATAKYFFYSNIMNFFKTEITLANGEIRKRPLIETNGETGEIVWDKGRDFATVRKVLSMPQVNIVKKTEVQTGGFSKESILPKRNSDKLIARKKDWDPKKYGGFDSPTVAYSVLVVAKVEKGKSKKLKSVKELLGITIMERSSFEKNPIDFLEAKGYKEVKKDLIIKLPKYSLFELENGRKRMLASAGELQKGNELALPSKYVNFLYLASHYEKLKGSPEDNEQKQLFVEQHKHYLDEIIEQISEFSKRVILADANLDKVLSAYNKHRDKPIREQAENIIHLFTLTNLGAPAAFKYFDTTIDRKRYTSTKEVLDATLIHQSITGLYETRIDLSQLGGDGGGGGGGGGGGLDDEYRLYSPLVKPDQNIQFWLEQFPQAWAETAGMGLAKQVPPQVIQLKASATPVSVRQYPLSKEAQEGIRPHVQRLIQQGILVPVQSPWNTPLLPVRKPGTNDYRPVQDLREVNKRVQDIHPTVPNPYNLLCALPPQRSWYTVLDLKDAFFCLRLHPTSQPLFAFEWRDPGTGRTGQLTWTRLPQGFKNSPTIFNEALHRDLANFRIQHPQVTLLQYVDDLLLAGATKQDCLEGTKALLLELSDLGYRASAKKAQICRREVTYLGYSLRDGQRWLTEARKKTVVQIPAPTTAKQVREFLGKAGFCRLFIPGFATLAAPLYPLTKPKGEFSWAPEHQKAFDAIKKALLSAPALALPDVTKPFTLYVDERKGVARGVLTQTLGPWRRPVAYLSKKLDPVASGWPVCLKAIAAVAILVKDADKLTLGQNITVIAPHALENIVRQPPDRWMTNARMTHYQSLLLTERVTFAPPAALNPATLLPEETDEPVTHDCHQLLIEETGVRKDLTDIPLTGEVLTWFTDGSSYVVEGKRMAGAAVVDGTRTIWASSLPEGTSAQKAELMALTQALRLAEGKSINIYTDSRYAFATAHVHGAIYKQRGWLTSAGREIKNKEEILSLLEALHLPKRLAIIHCPGHQKAKDPISRGNQMADRVAKQAAQGVNLLPAGKRTADGSEFEKRTADGSEFESPKKKAKVE

SEQ ID NO: 78 - protein, 2083 aa, synthetic construct
  source 1..2083: note = Description of Artificial Sequence: Synthetic polypeptide
MPAAKRVKLDGGDKKYSIGLDIGTNSVGWAVITDEYKVPSKKFKVLGNTDRHSIKKNLIGALLFDSGETAEATRLKRTARRRYTRRKNRICYLQEIFSNEMAKVDDSFFHRLEESFLVEEDKKHERHPIFGNIVDEVAYHEKYPTIYHLRKKLVDSTDKADLRLIYLALAHMIKFRGHFLIEGDLNPDNSDVDKLFIQLVQTYNQLFEENPINASGVDAKAILSARLSKSRRLENLIAQLPGEKKNGLFGNLIALSLGLTPNFKSNFDLAEDAKLQLSKDTYDDDLDNLLAQIGDQYADLFLAAKNLSDAILLSDILRVNTEITKAPLSASMIKRYDEHHQDLTLLKALVRQQLPEKYKEIFFDQSKNGYAGYIDGGASQEEFYKFIKPILEKMDGTEELLVKLNREDLLRKQRTFDNGSIPHQIHLGELHAILRRQEDFYPFLKDNREKIEKILTFRIPYYVGPLARGNSRFAWMTRKSEETITPWNFEEVVDKGASAQSFIERMTNFDKNLPNEKVLPKHSLLYEYFTVYNELTKVKYVTEGMRKPAFLSGEQKKAIVDLLFKTNRKVTVKQLKEDYFKKIECFDSVEISGVEDRFNASLGTYHDLLKIIKDKDFLDNEENEDILEDIVLTLTLFEDREMIEERLKTYAHLFDDKVMKQLKRRRYTGWGRLSRKLINGIRDKQSGKTILDFLKSDGFANRNFMQLIHDDSLTFKEDIQKAQVSGQGDSLHEHIANLAGSPAIKKGILQTVKVVDELVKVMGRHKPENIVIEMARENQTTQKGQKNSRERMKRIEEGIKELGSQILKEHPVENTQLQNEKLYLYYLQNGRDMYVDQELDINRLSDYDVDHIVPQSFLKDDSIDNKVLTRSDKARGKSDNVPSEEVVKKMKNYWRQLLNAKLITQRKFDNLTKAERGGLSELDKAGFIKRQLVETRQITKHVAQILDSRMNTKYDENDKLIREVKVITLKSKLVSDFRKDFQFYKVREINNYHHAHDAYLNAVVGTALIKKYPKLESEFVYGDYKVYDVRKMIAKSEQEIGKATAKYFFYSNIMNFFKTEITLANGEIRKRPLIETNGETGEIVWDKGRDFATVRKVLSMPQVNIVKKTEVQTGGFSKESILPKRNSDKLIARKKDWDPKKYGGFDSPTVAYSVLVVAKVEKGKSKKLKSVKELLGITIMERSSFEKNPIDFLEAKGYKEVKKDLIIKLPKYSLFELENGRKRMLASAGELQKGNELALPSKYVNFLYLASHYEKLKGSPEDNEQKQLFVEQHKHYLDEIIEQISEFSKRVILADANLDKVLSAYNKHRDKPIREQAENIIHLFTLTNLGAPAAFKYFDTTIDRKRYTSTKEVLDATLIHQSITGLYETRIDLSQLGGDGGGGSPAPGGLDDEYRLYSPLVKPDQNIQFWLEQFPQAWAETAGMGLAKQVPPQVIQLKASATPVSVRQYPLSKEAQEGIRPHVQRLIQQGILVPVQSPWNTPLLPVRKPGTNDYRPVQDLREVNKRVQDIHPTVPNPYNLLCALPPQRSWYTVLDLKDAFFCLRLHPTSQPLFAFEWRDPGTGRTGQLTWTRLPQGFKNSPTIFNEALHRDLANFRIQHPQVTLLQYVDDLLLAGATKQDCLEGTKALLLELSDLGYRASAKKAQICRREVTYLGYSLRDGQRWLTEARKKTVVQIPAPTTAKQVREFLGKAGFCRLFIPGFATLAAPLYPLTKPKGEFSWAPEHQKAFDAIKKALLSAPALALPDVTKPFTLYVDERKGVARGVLTQTLGPWRRPVAYLSKKLDPVASGWPVCLKAIAAVAILVKDADKLTLGQNITVIAPHALENIVRQPPDRWMTNARMTHYQSLLLTERVTFAPPAALNPATLLPEETDEPVTHDCHQLLIEETGVRKDLTDIPLTGEVLTWFTDGSSYVVEGKRMAGAAVVDGTRTIWASSLPEGTSAQKAELMALTQALRLAEGKSINIYTDSRYAFATAHVHGAIYKQRGWLTSAGREIKNKEEILSLLEALHLPKRLAIIHCPGHQKAKDPISRGNQMADRVAKQAAQGVNLLPAGKRTADGSEFEKRTADGSEFESPKKKAKVE

SEQ ID NO: 79 - protein, 2083 aa, synthetic construct
  source 1..2083: note = Description of Artificial Sequence: Synthetic polypeptide
MPAAKRVKLDGGDKKYSIGLDIGTNSVGWAVITDEYKVPSKKFKVLGNTDRHSIKKNLIGALLFDSGETAEATRLKRTARRRYTRRKNRICYLQEIFSNEMAKVDDSFFHRLEESFLVEEDKKHERHPIFGNIVDEVAYHEKYPTIYHLRKKLVDSTDKADLRLIYLALAHMIKFRGHFLIEGDLNPDNSDVDKLFIQLVQTYNQLFEENPINASGVDAKAILSARLSKSRRLENLIAQLPGEKKNGLFGNLIALSLGLTPNFKSNFDLAEDAKLQLSKDTYDDDLDNLLAQIGDQYADLFLAAKNLSDAILLSDILRVNTEITKAPLSASMIKRYDEHHQDLTLLKALVRQQLPEKYKEIFFDQSKNGYAGYIDGGASQEEFYKFIKPILEKMDGTEELLVKLNREDLLRKQRTFDNGSIPHQIHLGELHAILRRQEDFYPFLKDNREKIEKILTFRIPYYVGPLARGNSRFAWMTRKSEETITPWNFEEVVDKGASAQSFIERMTNFDKNLPNEKVLPKHSLLYEYFTVYNELTKVKYVTEGMRKPAFLSGEQKKAIVDLLFKTNRKVTVKQLKEDYFKKIECFDSVEISGVEDRFNASLGTYHDLLKIIKDKDFLDNEENEDILEDIVLTLTLFEDREMIEERLKTYAHLFDDKVMKQLKRRRYTGWGRLSRKLINGIRDKQSGKTILDFLKSDGFANRNFMQLIHDDSLTFKEDIQKAQVSGQGDSLHEHIANLAGSPAIKKGILQTVKVVDELVKVMGRHKPENIVIEMARENQTTQKGQKNSRERMKRIEEGIKELGSQILKEHPVENTQLQNEKLYLYYLQNGRDMYVDQELDINRLSDYDVDHIVPQSFLKDDSIDNKVLTRSDKARGKSDNVPSEEVVKKMKNYWRQLLNAKLITQRKFDNLTKAERGGLSELDKAGFIKRQLVETRQITKHVAQILDSRMNTKYDENDKLIREVKVITLKSKLVSDFRKDFQFYKVREINNYHHAHDAYLNAVVGTALIKKYPKLESEFVYGDYKVYDVRKMIAKSEQEIGKATAKYFFYSNIMNFFKTEITLANGEIRKRPLIETNGETGEIVWDKGRDFATVRKVLSMPQVNIVKKTEVQTGGFSKESILPKRNSDKLIARKKDWDPKKYGGFDSPTVAYSVLVVAKVEKGKSKKLKSVKELLGITIMERSSFEKNPIDFLEAKGYKEVKKDLIIKLPKYSLFELENGRKRMLASAGELQKGNELALPSKYVNFLYLASHYEKLKGSPEDNEQKQLFVEQHKHYLDEIIEQISEFSKRVILADANLDKVLSAYNKHRDKPIREQAENIIHLFTLTNLGAPAAFKYFDTTIDRKRYTSTKEVLDATLIHQSITGLYETRIDLSQLGGDGGPAPGGGGGLDDEYRLYSPLVKPDQNIQFWLEQFPQAWAETAGMGLAKQVPPQVIQLKASATPVSVRQYPLSKEAQEGIRPHVQRLIQQGILVPVQSPWNTPLLPVRKPGTNDYRPVQDLREVNKRVQDIHPTVPNPYNLLCALPPQRSWYTVLDLKDAFFCLRLHPTSQPLFAFEWRDPGTGRTGQLTWTRLPQGFKNSPTIFNEALHRDLANFRIQHPQVTLLQYVDDLLLAGATKQDCLEGTKALLLELSDLGYRASAKKAQICRREVTYLGYSLRDGQRWLTEARKKTVVQIPAPTTAKQVREFLGKAGFCRLFIPGFATLAAPLYPLTKPKGEFSWAPEHQKAFDAIKKALLSAPALALPDVTKPFTLYVDERKGVARGVLTQTLGPWRRPVAYLSKKLDPVASGWPVCLKAIAAVAILVKDADKLTLGQNITVIAPHALENIVRQPPDRWMTNARMTHYQSLLLTERVTFAPPAALNPATLLPEETDEPVTHDCHQLLIEETGVRKDLTDIPLTGEVLTWFTDGSSYVVEGKRMAGAAVVDGTRTIWASSLPEGTSAQKAELMALTQALRLAEGKSINIYTDSRYAFATAHVHGAIYKQRGWLTSAGREIKNKEEILSLLEALHLPKRLAIIHCPGHQKAKDPISRGNQMADRVAKQAAQGVNLLPAGKRTADGSEFEKRTADGSEFESPKKKAKVE

SEQ ID NO: 80 - protein, 2088 aa, synthetic construct
  source 1..2088: note = Description of Artificial Sequence: Synthetic polypeptide
MPAAKRVKLDGGDKKYSIGLDIGTNSVGWAVITDEYKVPSKKFKVLGNTDRHSIKKNLIGALLFDSGETAEATRLKRTARRRYTRRKNRICYLQEIFSNEMAKVDDSFFHRLEESFLVEEDKKHERHPIFGNIVDEVAYHEKYPTIYHLRKKLVDSTDKADLRLIYLALAHMIKFRGHFLIEGDLNPDNSDVDKLFIQLVQTYNQLFEENPINASGVDAKAILSARLSKSRRLENLIAQLPGEKKNGLFGNLIALSLGLTPNFKSNFDLAEDAKLQLSKDTYDDDLDNLLAQIGDQYADLFLAAKNLSDAILLSDILRVNTEITKAPLSASMIKRYDEHHQDLTLLKALVRQQLPEKYKEIFFDQSKNGYAGYIDGGASQEEFYKFIKPILEKMDGTEELLVKLNREDLLRKQRTFDNGSIPHQIHLGELHAILRRQEDFYPFLKDNREKIEKILTFRIPYYVGPLARGNSRFAWMTRKSEETITPWNFEEVVDKGASAQSFIERMTNFDKNLPNEKVLPKHSLLYEYFTVYNELTKVKYVTEGMRKPAFLSGEQKKAIVDLLFKTNRKVTVKQLKEDYFKKIECFDSVEISGVEDRFNASLGTYHDLLKIIKDKDFLDNEENEDILEDIVLTLTLFEDREMIEERLKTYAHLFDDKVMKQLKRRRYTGWGRLSRKLINGIRDKQSGKTILDFLKSDGFANRNFMQLIHDDSLTFKEDIQKAQVSGQGDSLHEHIANLAGSPAIKKGILQTVKVVDELVKVMGRHKPENIVIEMARENQTTQKGQKNSRERMKRIEEGIKELGSQILKEHPVENTQLQNEKLYLYYLQNGRDMYVDQELDINRLSDYDVDHIVPQSFLKDDSIDNKVLTRSDKARGKSDNVPSEEVVKKMKNYWRQLLNAKLITQRKFDNLTKAERGGLSELDKAGFIKRQLVETRQITKHVAQILDSRMNTKYDENDKLIREVKVITLKSKLVSDFRKDFQFYKVREINNYHHAHDAYLNAVVGTALIKKYPKLESEFVYGDYKVYDVRKMIAKSEQEIGKATAKYFFYSNIMNFFKTEITLANGEIRKRPLIETNGETGEIVWDKGRDFATVRKVLSMPQVNIVKKTEVQTGGFSKESILPKRNSDKLIARKKDWDPKKYGGFDSPTVAYSVLVVAKVEKGKSKKLKSVKELLGITIMERSSFEKNPIDFLEAKGYKEVKKDLIIKLPKYSLFELENGRKRMLASAGELQKGNELALPSKYVNFLYLASHYEKLKGSPEDNEQKQLFVEQHKHYLDEIIEQISEFSKRVILADANLDKVLSAYNKHRDKPIREQAENIIHLFTLTNLGAPAAFKYFDTTIDRKRYTSTKEVLDATLIHQSITGLYETRIDLSQLGGDGGGGSGSSEAAAKGGLDDEYRLYSPLVKPDQNIQFWLEQFPQAWAETAGMGLAKQVPPQVIQLKASATPVSVRQYPLSKEAQEGIRPHVQRLIQQGILVPVQSPWNTPLLPVRKPGTNDYRPVQDLREVNKRVQDIHPTVPNPYNLLCALPPQRSWYTVLDLKDAFFCLRLHPTSQPLFAFEWRDPGTGRTGQLTWTRLPQGFKNSPTIFNEALHRDLANFRIQHPQVTLLQYVDDLLLAGATKQDCLEGTKALLLELSDLGYRASAKKAQICRREVTYLGYSLRDGQRWLTEARKKTVVQIPAPTTAKQVREFLGKAGFCRLFIPGFATLAAPLYPLTKPKGEFSWAPEHQKAFDAIKKALLSAPALALPDVTKPFTLYVDERKGVARGVLTQTLGPWRRPVAYLSKKLDPVASGWPVCLKAIAAVAILVKDADKLTLGQNITVIAPHALENIVRQPPDRWMTNARMTHYQSLLLTERVTFAPPAALNPATLLPEETDEPVTHDCHQLLIEETGVRKDLTDIPLTGEVLTWFTDGSSYVVEGKRMAGAAVVDGTRTIWASSLPEGTSAQKAELMALTQALRLAEGKSINIYTDSRYAFATAHVHGAIYKQRGWLTSAGREIKNKEEILSLLEALHLPKRLAIIHCPGHQKAKDPISRGNQMADRVAKQAAQGVNLLPAGKRTADGSEFEKRTADGSEFESPKKKAKVE

SEQ ID NO: 81 - protein, 2083 aa, synthetic construct
  source 1..2083: note = Description of Artificial Sequence: Synthetic polypeptide
MPAAKRVKLDGGDKKYSIGLDIGTNSVGWAVITDEYKVPSKKFKVLGNTDRHSIKKNLIGALLFDSGETAEATRLKRTARRRYTRRKNRICYLQEIFSNEMAKVDDSFFHRLEESFLVEEDKKHERHPIFGNIVDEVAYHEKYPTIYHLRKKLVDSTDKADLRLIYLALAHMIKFRGHFLIEGDLNPDNSDVDKLFIQLVQTYNQLFEENPINASGVDAKAILSARLSKSRRLENLIAQLPGEKKNGLFGNLIALSLGLTPNFKSNFDLAEDAKLQLSKDTYDDDLDNLLAQIGDQYADLFLAAKNLSDAILLSDILRVNTEITKAPLSASMIKRYDEHHQDLTLLKALVRQQLPEKYKEIFFDQSKNGYAGYIDGGASQEEFYKFIKPILEKMDGTEELLVKLNREDLLRKQRTFDNGSIPHQIHLGELHAILRRQEDFYPFLKDNREKIEKILTFRIPYYVGPLARGNSRFAWMTRKSEETITPWNFEEVVDKGASAQSFIERMTNFDKNLPNEKVLPKHSLLYEYFTVYNELTKVKYVTEGMRKPAFLSGEQKKAIVDLLFKTNRKVTVKQLKEDYFKKIECFDSVEISGVEDRFNASLGTYHDLLKIIKDKDFLDNEENEDILEDIVLTLTLFEDREMIEERLKTYAHLFDDKVMKQLKRRRYTGWGRLSRKLINGIRDKQSGKTILDFLKSDGFANRNFMQLIHDDSLTFKEDIQKAQVSGQGDSLHEHIANLAGSPAIKKGILQTVKVVDELVKVMGRHKPENIVIEMARENQTTQKGQKNSRERMKRIEEGIKELGSQILKEHPVENTQLQNEKLYLYYLQNGRDMYVDQELDINRLSDYDVDHIVPQSFLKDDSIDNKVLTRSDKARGKSDNVPSEEVVKKMKNYWRQLLNAKLITQRKFDNLTKAERGGLSELDKAGFIKRQLVETRQITKHVAQILDSRMNTKYDENDKLIREVKVITLKSKLVSDFRKDFQFYKVREINNYHHAHDAYLNAVVGTALIKKYPKLESEFVYGDYKVYDVRKMIAKSEQEIGKATAKYFFYSNIMNFFKTEITLANGEIRKRPLIETNGETGEIVWDKGRDFATVRKVLSMPQVNIVKKTEVQTGGFSKESILPKRNSDKLIARKKDWDPKKYGGFDSPTVAYSVLVVAKVEKGKSKKLKSVKELLGITIMERSSFEKNPIDFLEAKGYKEVKKDLIIKLPKYSLFELENGRKRMLASAGELQKGNELALPSKYVNFLYLASHYEKLKGSPEDNEQKQLFVEQHKHYLDEIIEQISEFSKRVILADANLDKVLSAYNKHRDKPIREQAENIIHLFTLTNLGAPAAFKYFDTTIDRKRYTSTKEVLDATLIHQSITGLYETRIDLSQLGGDGGGSSGGGGGLDDEYRLYSPLVKPDQNIQFWLEQFPQAWAETAGMGLAKQVPPQVIQLKASATPVSVRQYPLSKEAQEGIRPHVQRLIQQGILVPVQSPWNTPLLPVRKPGTNDYRPVQDLREVNKRVQDIHPTVPNPYNLLCALPPQRSWYTVLDLKDAFFCLRLHPTSQPLFAFEWRDPGTGRTGQLTWTRLPQGFKNSPTIFNEALHRDLANFRIQHPQVTLLQYVDDLLLAGATKQDCLEGTKALLLELSDLGYRASAKKAQICRREVTYLGYSLRDGQRWLTEARKKTVVQIPAPTTAKQVREFLGKAGFCRLFIPGFATLAAPLYPLTKPKGEFSWAPEHQKAFDAIKKALLSAPALALPDVTKPFTLYVDERKGVARGVLTQTLGPWRRPVAYLSKKLDPVASGWPVCLKAIAAVAILVKDADKLTLGQNITVIAPHALENIVRQPPDRWMTNARMTHYQSLLLTERVTFAPPAALNPATLLPEETDEPVTHDCHQLLIEETGVRKDLTDIPLTGEVLTWFTDGSSYVVEGKRMAGAAVVDGTRTIWASSLPEGTSAQKAELMALTQALRLAEGKSINIYTDSRYAFATAHVHGAIYKQRGWLTSAGREIKNKEEILSLLEALHLPKRLAIIHCPGHQKAKDPISRGNQMADRVAKQAAQGVNLLPAGKRTADGSEFEKRTADGSEFESPKKKAKVE

SEQ ID NO: 82 - protein, 2086 aa, synthetic construct
  source 1..2086: note = Description of Artificial Sequence: Synthetic polypeptide
MPAAKRVKLDGGDKKYSIGLDIGTNSVGWAVITDEYKVPSKKFKVLGNTDRHSIKKNLIGALLFDSGETAEATRLKRTARRRYTRRKNRICYLQEIFSNEMAKVDDSFFHRLEESFLVEEDKKHERHPIFGNIVDEVAYHEKYPTIYHLRKKLVDSTDKADLRLIYLALAHMIKFRGHFLIEGDLNPDNSDVDKLFIQLVQTYNQLFEENPINASGVDAKAILSARLSKSRRLENLIAQLPGEKKNGLFGNLIALSLGLTPNFKSNFDLAEDAKLQLSKDTYDDDLDNLLAQIGDQYADLFLAAKNLSDAILLSDILRVNTEITKAPLSASMIKRYDEHHQDLTLLKALVRQQLPEKYKEIFFDQSKNGYAGYIDGGASQEEFYKFIKPILEKMDGTEELLVKLNREDLLRKQRTFDNGSIPHQIHLGELHAILRRQEDFYPFLKDNREKIEKILTFRIPYYVGPLARGNSRFAWMTRKSEETITPWNFEEVVDKGASAQSFIERMTNFDKNLPNEKVLPKHSLLYEYFTVYNELTKVKYVTEGMRKPAFLSGEQKKAIVDLLFKTNRKVTVKQLKEDYFKKIECFDSVEISGVEDRFNASLGTYHDLLKIIKDKDFLDNEENEDILEDIVLTLTLFEDREMIEERLKTYAHLFDDKVMKQLKRRRYTGWGRLSRKLINGIRDKQSGKTILDFLKSDGFANRNFMQLIHDDSLTFKEDIQKAQVSGQGDSLHEHIANLAGSPAIKKGILQTVKVVDELVKVMGRHKPENIVIEMARENQTTQKGQKNSRERMKRIEEGIKELGSQILKEHPVENTQLQNEKLYLYYLQNGRDMYVDQELDINRLSDYDVDHIVPQSFLKDDSIDNKVLTRSDKARGKSDNVPSEEVVKKMKNYWRQLLNAKLITQRKFDNLTKAERGGLSELDKAGFIKRQLVETRQITKHVAQILDSRMNTKYDENDKLIREVKVITLKSKLVSDFRKDFQFYKVREINNYHHAHDAYLNAVVGTALIKKYPKLESEFVYGDYKVYDVRKMIAKSEQEIGKATAKYFFYSNIMNFFKTEITLANGEIRKRPLIETNGETGEIVWDKGRDFATVRKVLSMPQVNIVKKTEVQTGGFSKESILPKRNSDKLIARKKDWDPKKYGGFDSPTVAYSVLVVAKVEKGKSKKLKSVKELLGITIMERSSFEKNPIDFLEAKGYKEVKKDLIIKLPKYSLFELENGRKRMLASAGELQKGNELALPSKYVNFLYLASHYEKLKGSPEDNEQKQLFVEQHKHYLDEIIEQISEFSKRVILADANLDKVLSAYNKHRDKPIREQAENIIHLFTLTNLGAPAAFKYFDTTIDRKRYTSTKEVLDATLIHQSITGLYETRIDLSQLGGDGGPAPGSSGGSGGLDDEYRLYSPLVKPDQNIQFWLEQFPQAWAETAGMGLAKQVPPQVIQLKASATPVSVRQYPLSKEAQEGIRPHVQRLIQQGILVPVQSPWNTPLLPVRKPGTNDYRPVQDLREVNKRVQDIHPTVPNPYNLLCALPPQRSWYTVLDLKDAFFCLRLHPTSQPLFAFEWRDPGTGRTGQLTWTRLPQGFKNSPTIFNEALHRDLANFRIQHPQVTLLQYVDDLLLAGATKQDCLEGTKALLLELSDLGYRASAKKAQICRREVTYLGYSLRDGQRWLTEARKKTVVQIPAPTTAKQVREFLGKAGFCRLFIPGFATLAAPLYPLTKPKGEFSWAPEHQKAFDAIKKALLSAPALALPDVTKPFTLYVDERKGVARGVLTQTLGPWRRPVAYLSKKLDPVASGWPVCLKAIAAVAILVKDADKLTLGQNITVIAPHALENIVRQPPDRWMTNARMTHYQSLLLTERVTFAPPAALNPATLLPEETDEPVTHDCHQLLIEETGVRKDLTDIPLTGEVLTWFTDGSSYVVEGKRMAGAAVVDGTRTIWASSLPEGTSAQKAELMALTQALRLAEGKSINIYTDSRYAFATAHVHGAIYKQRGWLTSAGREIKNKEEILSLLEALHLPKRLAIIHCPGHQKAKDPISRGNQMADRVAKQAAQGVNLLPAGKRTADGSEFEKRTADGSEFESPKKKAKVE

SEQ ID NO: 83 - protein, 2088 aa, synthetic construct
  source 1..2088: note = Description of Artificial Sequence: Synthetic polypeptide
MPAAKRVKLDGGDKKYSIGLDIGTNSVGWAVITDEYKVPSKKFKVLGNTDRHSIKKNLIGALLFDSGETAEATRLKRTARRRYTRRKNRICYLQEIFSNEMAKVDDSFFHRLEESFLVEEDKKHERHPIFGNIVDEVAYHEKYPTIYHLRKKLVDSTDKADLRLIYLALAHMIKFRGHFLIEGDLNPDNSDVDKLFIQLVQTYNQLFEENPINASGVDAKAILSARLSKSRRLENLIAQLPGEKKNGLFGNLIALSLGLTPNFKSNFDLAEDAKLQLSKDTYDDDLDNLLAQIGDQYADLFLAAKNLSDAILLSDILRVNTEITKAPLSASMIKRYDEHHQDLTLLKALVRQQLPEKYKEIFFDQSKNGYAGYIDGGASQEEFYKFIKPILEKMDGTEELLVKLNREDLLRKQRTFDNGSIPHQIHLGELHAILRRQEDFYPFLKDNREKIEKILTFRIPYYVGPLARGNSRFAWMTRKSEETITPWNFEEVVDKGASAQSFIERMTNFDKNLPNEKVLPKHSLLYEYFTVYNELTKVKYVTEGMRKPAFLSGEQKKAIVDLLFKTNRKVTVKQLKEDYFKKIECFDSVEISGVEDRFNASLGTYHDLLKIIKDKDFLDNEENEDILEDIVLTLTLFEDREMIEERLKTYAHLFDDKVMKQLKRRRYTGWGRLSRKLINGIRDKQSGKTILDFLKSDGFANRNFMQLIHDDSLTFKEDIQKAQVSGQGDSLHEHIANLAGSPAIKKGILQTVKVVDELVKVMGRHKPENIVIEMARENQTTQKGQKNSRERMKRIEEGIKELGSQILKEHPVENTQLQNEKLYLYYLQNGRDMYVDQELDINRLSDYDVDHIVPQSFLKDDSIDNKVLTRSDKARGKSDNVPSEEVVKKMKNYWRQLLNAKLITQRKFDNLTKAERGGLSELDKAGFIKRQLVETRQITKHVAQILDSRMNTKYDENDKLIREVKVITLKSKLVSDFRKDFQFYKVREINNYHHAHDAYLNAVVGTALIKKYPKLESEFVYGDYKVYDVRKMIAKSEQEIGKATAKYFFYSNIMNFFKTEITLANGEIRKRPLIETNGETGEIVWDKGRDFATVRKVLSMPQVNIVKKTEVQTGGFSKESILPKRNSDKLIARKKDWDPKKYGGFDSPTVAYSVLVVAKVEKGKSKKLKSVKELLGITIMERSSFEKNPIDFLEAKGYKEVKKDLIIKLPKYSLFELENGRKRMLASAGELQKGNELALPSKYVNFLYLASHYEKLKGSPEDNEQKQLFVEQHKHYLDEIIEQISEFSKRVILADANLDKVLSAYNKHRDKPIREQAENIIHLFTLTNLGAPAAFKYFDTTIDRKRYTSTKEVLDATLIHQSITGLYETRIDLSQLGGDGGEAAAKGSSGGSGGLDDEYRLYSPLVKPDQNIQFWLEQFPQAWAETAGMGLAKQVPPQVIQLKASATPVSVRQYPLSKEAQEGIRPHVQRLIQQGILVPVQSPWNTPLLPVRKPGTNDYRPVQDLREVNKRVQDIHPTVPNPYNLLCALPPQRSWYTVLDLKDAFFCLRLHPTSQPLFAFEWRDPGTGRTGQLTWTRLPQGFKNSPTIFNEALHRDLANFRIQHPQVTLLQYVDDLLLAGATKQDCLEGTKALLLELSDLGYRASAKKAQICRREVTYLGYSLRDGQRWLTEARKKTVVQIPAPTTAKQVREFLGKAGFCRLFIPGFATLAAPLYPLTKPKGEFSWAPEHQKAFDAIKKALLSAPALALPDVTKPFTLYVDERKGVARGVLTQTLGPWRRPVAYLSKKLDPVASGWPVCLKAIAAVAILVKDADKLTLGQNITVIAPHALENIVRQPPDRWMTNARMTHYQSLLLTERVTFAPPAALNPATLLPEETDEPVTHDCHQLLIEETGVRKDLTDIPLTGEVLTWFTDGSSYVVEGKRMAGAAVVDGTRTIWASSLPEGTSAQKAELMALTQALRLAEGKSINIYTDSRYAFATAHVHGAIYKQRGWLTSAGREIKNKEEILSLLEALHLPKRLAIIHCPGHQKAKDPISRGNQMADRVAKQAAQGVNLLPAGKRTADGSEFEKRTADGSEFESPKKKAKVE

SEQ ID NO: 84 - protein, 2082 aa, synthetic construct
  source 1..2082: note = Description of Artificial Sequence: Synthetic polypeptide
MPAAKRVKLDGGDKKYSIGLDIGTNSVGWAVITDEYKVPSKKFKVLGNTDRHSIKKNLIGALLFDSGETAEATRLKRTARRRYTRRKNRICYLQEIFSNEMAKVDDSFFHRLEESFLVEEDKKHERHPIFGNIVDEVAYHEKYPTIYHLRKKLVDSTDKADLRLIYLALAHMIKFRGHFLIEGDLNPDNSDVDKLFIQLVQTYNQLFEENPINASGVDAKAILSARLSKSRRLENLIAQLPGEKKNGLFGNLIALSLGLTPNFKSNFDLAEDAKLQLSKDTYDDDLDNLLAQIGDQYADLFLAAKNLSDAILLSDILRVNTEITKAPLSASMIKRYDEHHQDLTLLKALVRQQLPEKYKEIFFDQSKNGYAGYIDGGASQEEFYKFIKPILEKMDGTEELLVKLNREDLLRKQRTFDNGSIPHQIHLGELHAILRRQEDFYPFLKDNREKIEKILTFRIPYYVGPLARGNSRFAWMTRKSEETITPWNFEEVVDKGASAQSFIERMTNFDKNLPNEKVLPKHSLLYEYFTVYNELTKVKYVTEGMRKPAFLSGEQKKAIVDLLFKTNRKVTVKQLKEDYFKKIECFDSVEISGVEDRFNASLGTYHDLLKIIKDKDFLDNEENEDILEDIVLTLTLFEDREMIEERLKTYAHLFDDKVMKQLKRRRYTGWGRLSRKLINGIRDKQSGKTILDFLKSDGFANRNFMQLIHDDSLTFKEDIQKAQVSGQGDSLHEHIANLAGSPAIKKGILQTVKVVDELVKVMGRHKPENIVIEMARENQTTQKGQKNSRERMKRIEEGIKELGSQILKEHPVENTQLQNEKLYLYYLQNGRDMYVDQELDINRLSDYDVDHIVPQSFLKDDSIDNKVLTRSDKARGKSDNVPSEEVVKKMKNYWRQLLNAKLITQRKFDNLTKAERGGLSELDKAGFIKRQLVETRQITKHVAQILDSRMNTKYDENDKLIREVKVITLKSKLVSDFRKDFQFYKVREINNYHHAHDAYLNAVVGTALIKKYPKLESEFVYGDYKVYDVRKMIAKSEQEIGKATAKYFFYSNIMNFFKTEITLANGEIRKRPLIETNGETGEIVWDKGRDFATVRKVLSMPQVNIVKKTEVQTGGFSKESILPKRNSDKLIARKKDWDPKKYGGFDSPTVAYSVLVVAKVEKGKSKKLKSVKELLGITIMERSSFEKNPIDFLEAKGYKEVKKDLIIKLPKYSLFELENGRKRMLASAGELQKGNELALPSKYVNFLYLASHYEKLKGSPEDNEQKQLFVEQHKHYLDEIIEQISEFSKRVILADANLDKVLSAYNKHRDKPIREQAENIIHLFTLTNLGAPAAFKYFDTTIDRKRYTSTKEVLDATLIHQSITGLYETRIDLSQLGGDGGGGGGSGGLDDEYRLYSPLVKPDQNIQFWLEQFPQAWAETAGMGLAKQVPPQVIQLKASATPVSVRQYPLSKEAQEGIRPHVQRLIQQGILVPVQSPWNTPLLPVRKPGTNDYRPVQDLREVNKRVQDIHPTVPNPYNLLCALPPQRSWYTVLDLKDAFFCLRLHPTSQPLFAFEWRDPGTGRTGQLTWTRLPQGFKNSPTIFNEALHRDLANFRIQHPQVTLLQYVDDLLLAGATKQDCLEGTKALLLELSDLGYRASAKKAQICRREVTYLGYSLRDGQRWLTEARKKTVVQIPAPTTAKQVREFLGKAGFCRLFIPGFATLAAPLYPLTKPKGEFSWAPEHQKAFDAIKKALLSAPALALPDVTKPFTLYVDERKGVARGVLTQTLGPWRRPVAYLSKKLDPVASGWPVCLKAIAAVAILVKDADKLTLGQNITVIAPHALENIVRQPPDRWMTNARMTHYQSLLLTERVTFAPPAALNPATLLPEETDEPVTHDCHQLLIEETGVRKDLTDIPLTGEVLTWFTDGSSYVVEGKRMAGAAVVDGTRTIWASSLPEGTSAQKAELMALTQALRLAEGKSINIYTDSRYAFATAHVHGAIYKQRGWLTSAGREIKNKEEILSLLEALHLPKRLAIIHCPGHQKAKDPISRGNQMADRVAKQAAQGVNLLPAGKRTADGSEFEKRTADGSEFESPKKKAKVE

SEQ ID NO: 85 - protein, 2086 aa, synthetic construct
  source 1..2086: note = Description of Artificial Sequence: Synthetic polypeptide
MPAAKRVKLDGGDKKYSIGLDIGTNSVGWAVITDEYKVPSKKFKVLGNTDRHSIKKNLIGALLFDSGETAEATRLKRTARRRYTRRKNRICYLQEIFSNEMAKVDDSFFHRLEESFLVEEDKKHERHPIFGNIVDEVAYHEKYPTIYHLRKKLVDSTDKADLRLIYLALAHMIKFRGHFLIEGDLNPDNSDVDKLFIQLVQTYNQLFEENPINASGVDAKAILSARLSKSRRLENLIAQLPGEKKNGLFGNLIALSLGLTPNFKSNFDLAEDAKLQLSKDTYDDDLDNLLAQIGDQYADLFLAAKNLSDAILLSDILRVNTEITKAPLSASMIKRYDEHHQDLTLLKALVRQQLPEKYKEIFFDQSKNGYAGYIDGGASQEEFYKFIKPILEKMDGTEELLVKLNREDLLRKQRTFDNGSIPHQIHLGELHAILRRQEDFYPFLKDNREKIEKILTFRIPYYVGPLARGNSRFAWMTRKSEETITPWNFEEVVDKGASAQSFIERMTNFDKNLPNEKVLPKHSLLYEYFTVYNELTKVKYVTEGMRKPAFLSGEQKKAIVDLLFKTNRKVTVKQLKEDYFKKIECFDSVEISGVEDRFNASLGTYHDLLKIIKDKDFLDNEENEDILEDIVLTLTLFEDREMIEERLKTYAHLFDDKVMKQLKRRRYTGWGRLSRKLINGIRDKQSGKTILDFLKSDGFANRNFMQLIHDDSLTFKEDIQKAQVSGQGDSLHEHIANLAGSPAIKKGILQTVKVVDELVKVMGRHKPENIVIEMARENQTTQKGQKNSRERMKRIEEGIKELGSQILKEHPVENTQLQNEKLYLYYLQNGRDMYVDQELDINRLSDYDVDHIVPQSFLKDDSIDNKVLTRSDKARGKSDNVPSEEVVKKMKNYWRQLLNAKLITQRKFDNLTKAERGGLSELDKAGFIKRQLVETRQITKHVAQILDSRMNTKYDENDKLIREVKVITLKSKLVSDFRKDFQFYKVREINNYHHAHDAYLNAVVGTALIKKYPKLESEFVYGDYKVYDVRKMIAKSEQEIGKATAKYFFYSNIMNFFKTEITLANGEIRKRPLIETNGETGEIVWDKGRDFATVRKVLSMPQVNIVKKTEVQTGGFSKESILPKRNSDKLIARKKDWDPKKYGGFDSPTVAYSVLVVAKVEKGKSKKLKSVKELLGITIMERSSFEKNPIDFLEAKGYKEVKKDLIIKLPKYSLFELENGRKRMLASAGELQKGNELALPSKYVNFLYLASHYEKLKGSPEDNEQKQLFVEQHKHYLDEIIEQISEFSKRVILADANLDKVLSAYNKHRDKPIREQAENIIHLFTLTNLGAPAAFKYFDTTIDRKRYTSTKEVLDATLIHQSITGLYETRIDLSQLGGDGGGSSGGSGGGGGLDDEYRLYSPLVKPDQNIQFWLEQFPQAWAETAGMGLAKQVPPQVIQLKASATPVSVRQYPLSKEAQEGIRPHVQRLIQQGILVPVQSPWNTPLLPVRKPGTNDYRPVQDLREVNKRVQDIHPTVPNPYNLLCALPPQRSWYTVLDLKDAFFCLRLHPTSQPLFAFEWRDPGTGRTGQLTWTRLPQGFKNSPTIFNEALHRDLANFRIQHPQVTLLQYVDDLLLAGATKQDCLEGTKALLLELSDLGYRASAKKAQICRREVTYLGYSLRDGQRWLTEARKKTVVQIPAPTTAKQVREFLGKAGFCRLFIPGFATLAAPLYPLTKPKGEFSWAPEHQKAFDAIKKALLSAPALALPDVTKPFTLYVDERKGVARGVLTQTLGPWRRPVAYLSKKLDPVASGWPVCLKAIAAVAILVKDADKLTLGQNITVIAPHALENIVRQPPDRWMTNARMTHYQSLLLTERVTFAPPAALNPATLLPEETDEPVTHDCHQLLIEETGVRKDLTDIPLTGEVLTWFTDGSSYVVEGKRMAGAAVVDGTRTIWASSLPEGTSAQKAELMALTQALRLAEGKSINIYTDSRYAFATAHVHGAIYKQRGWLTSAGREIKNKEEILSLLEALHLPKRLAIIHCPGHQKAKDPISRGNQMADRVAKQAAQGVNLLPAGKRTADGSEFEKRTADGSEFESPKKKAKVE

SEQ ID NO: 86 - protein, 2088 aa, synthetic construct
  source 1..2088: note = Description of Artificial Sequence: Synthetic polypeptide
MPAAKRVKLDGGDKKYSIGLDIGTNSVGWAVITDEYKVPSKKFKVLGNTDRHSIKKNLIGALLFDSGETAEATRLKRTARRRYTRRKNRICYLQEIFSNEMAKVDDSFFHRLEESFLVEEDKKHERHPIFGNIVDEVAYHEKYPTIYHLRKKLVDSTDKADLRLIYLALAHMIKFRGHFLIEGDLNPDNSDVDKLFIQLVQTYNQLFEENPINASGVDAKAILSARLSKSRRLENLIAQLPGEKKNGLFGNLIALSLGLTPNFKSNFDLAEDAKLQLSKDTYDDDLDNLLAQIGDQYADLFLAAKNLSDAILLSDILRVNTEITKAPLSASMIKRYDEHHQDLTLLKALVRQQLPEKYKEIFFDQSKNGYAGYIDGGASQEEFYKFIKPILEKMDGTEELLVKLNREDLLRKQRTFDNGSIPHQIHLGELHAILRRQEDFYPFLKDNREKIEKILTFRIPYYVGPLARGNSRFAWMTRKSEETITPWNFEEVVDKGASAQSFIERMTNFDKNLPNEKVLPKHSLLYEYFTVYNELTKVKYVTEGMRKPAFLSGEQKKAIVDLLFKTNRKVTVKQLKEDYFKKIECFDSVEISGVEDRFNASLGTYHDLLKIIKDKDFLDNEENEDILEDIVLTLTLFEDREMIEERLKTYAHLFDDKVMKQLKRRRYTGWGRLSRKLINGIRDKQSGKTILDFLKSDGFANRNFMQLIHDDSLTFKEDIQKAQVSGQGDSLHEHIANLAGSPAIKKGILQTVKVVDELVKVMGRHKPENIVIEMARENQTTQKGQKNSRERMKRIEEGIKELGSQILKEHPVENTQLQNEKLYLYYLQNGRDMYVDQELDINRLSDYDVDHIVPQSFLKDDSIDNKVLTRSDKARGKSDNVPSEEVVKKMKNYWRQLLNAKLITQRKFDNLTKAERGGLSELDKAGFIKRQLVETRQITKHVAQILDSRMNTKYDENDKLIREVKVITLKSKLVSDFRKDFQFYKVREINNYHHAHDAYLNAVVGTALIKKYPKLESEFVYGDYKVYDVRKMIAKSEQEIGKATAKYFFYSNIMNFFKTEITLANGEIRKRPLIETNGETGEIVWDKGRDFATVRKVLSMPQVNIVKKTEVQTGGFSKESILPKRNSDKLIARKKDWDPKKYGGFDSPTVAYSVLVVAKVEKGKSKKLKSVKELLGITIMERSSFEKNPIDFLEAKGYKEVKKDLIIKLPKYSLFELENGRKRMLASAGELQKGNELALPSKYVNFLYLASHYEKLKGSPEDNEQKQLFVEQHKHYLDEIIEQISEFSKRVILADANLDKVLSAYNKHRDKPIREQAENIIHLFTLTNLGAPAAFKYFDTTIDRKRYTSTKEVLDATLIHQSITGLYETRIDLSQLGGDGGGSSPAPEAAAKGGLDDEYRLYSPLVKPDQNIQFWLEQFPQAWAETAGMGLAKQVPPQVIQLKASATPVSVRQYPLSKEAQEGIRPHVQRLIQQGILVPVQSPWNTPLLPVRKPGTNDYRPVQDLREVNKRVQDIHPTVPNPYNLLCALPPQRSWYTVLDLKDAFFCLRLHPTSQPLFAFEWRDPGTGRTGQLTWTRLPQGFKNSPTIFNEALHRDLANFRIQHPQVTLLQYVDDLLLAGATKQDCLEGTKALLLELSDLGYRASAKKAQICRREVTYLGYSLRDGQRWLTEARKKTVVQIPAPTTAKQVREFLGKAGFCRLFIPGFATLAAPLYPLTKPKGEFSWAPEHQKAFDAIKKALLSAPALALPDVTKPFTLYVDERKGVARGVLTQTLGPWRRPVAYLSKKLDPVASGWPVCLKAIAAVAILVKDADKLTLGQNITVIAPHALENIVRQPPDRWMTNARMTHYQSLLLTERVTFAPPAALNPATLLPEETDEPVTHDCHQLLIEETGVRKDLTDIPLTGEVLTWFTDGSSYVVEGKRMAGAAVVDGTRTIWASSLPEGTSAQKAELMALTQALRLAEGKSINIYTDSRYAFATAHVHGAIYKQRGWLTSAGREIKNKEEILSLLEALHLPKRLAIIHCPGHQKAKDPISRGNQMADRVAKQAAQGVNLLPAGKRTADGSEFEKRTADGSEFESPKKKAKVE

SEQ ID NO: 87 - protein, 2083 aa, synthetic construct
  source 1..2083: note = Description of Artificial Sequence: Synthetic polypeptide
MPAAKRVKLDGGDKKYSIGLDIGTNSVGWAVITDEYKVPSKKFKVLGNTDRHSIKKNLIGALLFDSGETAEATRLKRTARRRYTRRKNRICYLQEIFSNEMAKVDDSFFHRLEESFLVEEDKKHERHPIFGNIVDEVAYHEKYPTIYHLRKKLVDSTDKADLRLIYLALAHMIKFRGHFLIEGDLNPDNSDVDKLFIQLVQTYNQLFEENPINASGVDAKAILSARLSKSRRLENLIAQLPGEKKNGLFGNLIALSLGLTPNFKSNFDLAEDAKLQLSKDTYDDDLDNLLAQIGDQYADLFLAAKNLSDAILLSDILRVNTEITKAPLSASMIKRYDEHHQDLTLLKALVRQQLPEKYKEIFFDQSKNGYAGYIDGGASQEEFYKFIKPILEKMDGTEELLVKLNREDLLRKQRTFDNGSIPHQIHLGELHAILRRQEDFYPFLKDNREKIEKILTFRIPYYVGPLARGNSRFAWMTRKSEETITPWNFEEVVDKGASAQSFIERMTNFDKNLPNEKVLPKHSLLYEYFTVYNELTKVKYVTEGMRKPAFLSGEQKKAIVDLLFKTNRKVTVKQLKEDYFKKIECFDSVEISGVEDRFNASLGTYHDLLKIIKDKDFLDNEENEDILEDIVLTLTLFEDREMIEERLKTYAHLFDDKVMKQLKRRRYTGWGRLSRKLINGIRDKQSGKTILDFLKSDGFANRNFMQLIHDDSLTFKEDIQKAQVSGQGDSLHEHIANLAGSPAIKKGILQTVKVVDELVKVMGRHKPENIVIEMARENQTTQKGQKNSRERMKRIEEGIKELGSQILKEHPVENTQLQNEKLYLYYLQNGRDMYVDQELDINRLSDYDVDHIVPQSFLKDDSIDNKVLTRSDKARGKSDNVPSEEVVKKMKNYWRQLLNAKLITQRKFDNLTKAERGGLSELDKAGFIKRQLVETRQITKHVAQILDSRMNTKYDENDKLIREVKVITLKSKLVSDFRKDFQFYKVREINNYHHAHDAYLNAVVGTALIKKYPKLESEFVYGDYKVYDVRKMIAKSEQEIGKATAKYFFYSNIMNFFKTEITLANGEIRKRPLIETNGETGEIVWDKGRDFATVRKVLSMPQVNIVKKTEVQTGGFSKESILPKRNSDKLIARKKDWDPKKYGGFDSPTVAYSVLVVAKVEKGKSKKLKSVKELLGITIMERSSFEKNPIDFLEAKGYKEVKKDLIIKLPKYSLFELENGRKRMLASAGELQKGNELALPSKYVNFLYLASHYEKLKGSPEDNEQKQLFVEQHKHYLDEIIEQISEFSKRVILADANLDKVLSAYNKHRDKPIREQAENIIHLFTLTNLGAPAAFKYFDTTIDRKRYTSTKEVLDATLIHQSITGLYETRIDLSQLGGDGGGGGGGSGGLDDEYRLYSPLVKPDQNIQFWLEQFPQAWAETAGMGLAKQVPPQVIQLKASATPVSVRQYPLSKEAQEGIRPHVQRLIQQGILVPVQSPWNTPLLPVRKPGTNDYRPVQDLREVNKRVQDIHPTVPNPYNLLCALPPQRSWYTVLDLKDAFFCLRLHPTSQPLFAFEWRDPGTGRTGQLTWTRLPQGFKNSPTIFNEALHRDLANFRIQHPQVTLLQYVDDLLLAGATKQDCLEGTKALLLELSDLGYRASAKKAQICRREVTYLGYSLRDGQRWLTEARKKTVVQIPAPTTAKQVREFLGKAGFCRLFIPGFATLAAPLYPLTKPKGEFSWAPEHQKAFDAIKKALLSAPALALPDVTKPFTLYVDERKGVARGVLTQTLGPWRRPVAYLSKKLDPVASGWPVCLKAIAAVAILVKDADKLTLGQNITVIAPHALENIVRQPPDRWMTNARMTHYQSLLLTERVTFAPPAALNPATLLPEETDEPVTHDCHQLLIEETGVRKDLTDIPLTGEVLTWFTDGSSYVVEGKRMAGAAVVDGTRTIWASSLPEGTSAQKAELMALTQALRLAEGKSINIYTDSRYAFATAHVHGAIYKQRGWLTSAGREIKNKEEILSLLEALHLPKRLAIIHCPGHQKAKDPISRGNQMADRVAKQAAQGVNLLPAGKRTADGSEFEKRTADGSEFESPKKKAKVE

SEQ ID NO: 88 - protein, 2083 aa, synthetic construct
  source 1..2083: note = Description of Artificial Sequence: Synthetic polypeptide
MPAAKRVKLDGGDKKYSIGLDIGTNSVGWAVITDEYKVPSKKFKVLGNTDRHSIKKNLIGALLFDSGETAEATRLKRTARRRYTRRKNRICYLQEIFSNEMAKVDDSFFHRLEESFLVEEDKKHERHPIFGNIVDEVAYHEKYPTIYHLRKKLVDSTDKADLRLIYLALAHMIKFRGHFLIEGDLNPDNSDVDKLFIQLVQTYNQLFEENPINASGVDAKAILSARLSKSRRLENLIAQLPGEKKNGLFGNLIALSLGLTPNFKSNFDLAEDAKLQLSKDTYDDDLDNLLAQIGDQYADLFLAAKNLSDAILLSDILRVNTEITKAPLSASMIKRYDEHHQDLTLLKALVRQQLPEKYKEIFFDQSKNGYAGYIDGGASQEEFYKFIKPILEKMDGTEELLVKLNREDLLRKQRTFDNGSIPHQIHLGELHAILRRQEDFYPFLKDNREKIEKILTFRIPYYVGPLARGNSRFAWMTRKSEETITPWNFEEVVDKGASAQSFIERMTNFDKNLPNEKVLPKHSLLYEYFTVYNELTKVKYVTEGMRKPAFLSGEQKKAIVDLLFKTNRKVTVKQLKEDYFKKIECFDSVEISGVEDRFNASLGTYHDLLKIIKDKDFLDNEENEDILEDIVLTLTLFEDREMIEERLKTYAHLFDDKVMKQLKRRRYTGWGRLSRKLINGIRDKQSGKTILDFLKSDGFANRNFMQLIHDDSLTFKEDIQKAQVSGQGDSLHEHIANLAGSPAIKKGILQTVKVVDELVKVMGRHKPENIVIEMARENQTTQKGQKNSRERMKRIEEGIKELGSQILKEHPVENTQLQNEKLYLYYLQNGRDMYVDQELDINRLSDYDVDHIVPQSFLKDDSIDNKVLTRSDKARGKSDNVPSEEVVKKMKNYWRQLLNAKLITQRKFDNLTKAERGGLSELDKAGFIKRQLVETRQITKHVAQILDSRMNTKYDENDKLIREVKVITLKSKLVSDFRKDFQFYKVREINNYHHAHDAYLNAVVGTALIKKYPKLESEFVYGDYKVYDVRKMIAKSEQEIGKATAKYFFYSNIMNFFKTEITLANGEIRKRPLIETNGETGEIVWDKGRDFATVRKVLSMPQVNIVKKTEVQTGGFSKESILPKRNSDKLIARKKDWDPKKYGGFDSPTVAYSVLVVAKVEKGKSKKLKSVKELLGITIMERSSFEKNPIDFLEAKGYKEVKKDLIIKLPKYSLFELENGRKRMLASAGELQKGNELALPSKYVNFLYLASHYEKLKGSPEDNEQKQLFVEQHKHYLDEIIEQISEFSKRVILADANLDKVLSAYNKHRDKPIREQAENIIHLFTLTNLGAPAAFKYFDTTIDRKRYTSTKEVLDATLIHQSITGLYETRIDLSQLGGDGGGSSGGSGGLDDEYRLYSPLVKPDQNIQFWLEQFPQAWAETAGMGLAKQVPPQVIQLKASATPVSVRQYPLSKEAQEGIRPHVQRLIQQGILVPVQSPWNTPLLPVRKPGTNDYRPVQDLREVNKRVQDIHPTVPNPYNLLCALPPQRSWYTVLDLKDAFFCLRLHPTSQPLFAFEWRDPGTGRTGQLTWTRLPQGFKNSPTIFNEALHRDLANFRIQHPQVTLLQYVDDLLLAGATKQDCLEGTKALLLELSDLGYRASAKKAQICRREVTYLGYSLRDGQRWLTEARKKTVVQIPAPTTAKQVREFLGKAGFCRLFIPGFATLAAPLYPLTKPKGEFSWAPEHQKAFDAIKKALLSAPALALPDVTKPFTLYVDERKGVARGVLTQTLGPWRRPVAYLSKKLDPVASGWPVCLKAIAAVAILVKDADKLTLGQNITVIAPHALENIVRQPPDRWMTNARMTHYQSLLLTERVTFAPPAALNPATLLPEETDEPVTHDCHQLLIEETGVRKDLTDIPLTGEVLTWFTDGSSYVVEGKRMAGAAVVDGTRTIWASSLPEGTSAQKAELMALTQALRLAEGKSINIYTDSRYAFATAHVHGAIYKQRGWLTSAGREIKNKEEILSLLEALHLPKRLAIIHCPGHQKAKDPISRGNQMADRVAKQAAQGVNLLPAGKRTADGSEFEKRTADGSEFESPKKKAKVE

SEQ ID NO: 89 - protein, 2086 aa, synthetic construct
  source 1..2086: note = Description of Artificial Sequence: Synthetic polypeptide
MPAAKRVKLDGGDKKYSIGLDIGTNSVGWAVITDEYKVPSKKFKVLGNTDRHSIKKNLIGALLFDSGETAEATRLKRTARRRYTRRKNRICYLQEIFSNEMAKVDDSFFHRLEESFLVEEDKKHERHPIFGNIVDEVAYHEKYPTIYHLRKKLVDSTDKADLRLIYLALAHMIKFRGHFLIEGDLNPDNSDVDKLFIQLVQTYNQLFEENPINASGVDAKAILSARLSKSRRLENLIAQLPGEKKNGLFGNLIALSLGLTPNFKSNFDLAEDAKLQLSKDTYDDDLDNLLAQIGDQYADLFLAAKNLSDAILLSDILRVNTEITKAPLSASMIKRYDEHHQDLTLLKALVRQQLPEKYKEIFFDQSKNGYAGYIDGGASQEEFYKFIKPILEKMDGTEELLVKLNREDLLRKQRTFDNGSIPHQIHLGELHAILRRQEDFYPFLKDNREKIEKILTFRIPYYVGPLARGNSRFAWMTRKSEETITPWNFEEVVDKGASAQSFIERMTNFDKNLPNEKVLPKHSLLYEYFTVYNELTKVKYVTEGMRKPAFLSGEQKKAIVDLLFKTNRKVTVKQLKEDYFKKIECFDSVEISGVEDRFNASLGTYHDLLKIIKDKDFLDNEENEDILEDIVLTLTLFEDREMIEERLKTYAHLFDDKVMKQLKRRRYTGWGRLSRKLINGIRDKQSGKTILDFLKSDGFANRNFMQLIHDDSLTFKEDIQKAQVSGQGDSLHEHIANLAGSPAIKKGILQTVKVVDELVKVMGRHKPENIVIEMARENQTTQKGQKNSRERMKRIEEGIKELGSQILKEHPVENTQLQNEKLYLYYLQNGRDMYVDQELDINRLSDYDVDHIVPQSFLKDDSIDNKVLTRSDKARGKSDNVPSEEVVKKMKNYWRQLLNAKLITQRKFDNLTKAERGGLSELDKAGFIKRQLVETRQITKHVAQILDSRMNTKYDENDKLIREVKVITLKSKLVSDFRKDFQFYKVREINNYHHAHDAYLNAVVGTALIKKYPKLESEFVYGDYKVYDVRKMIAKSEQEIGKATAKYFFYSNIMNFFKTEITLANGEIRKRPLIETNGETGEIVWDKGRDFATVRKVLSMPQVNIVKKTEVQTGGFSKESILPKRNSDKLIARKKDWDPKKYGGFDSPTVAYSVLVVAKVEKGKSKKLKSVKELLGITIMERSSFEKNPIDFLEAKGYKEVKKDLIIKLPKYSLFELENGRKRMLASAGELQKGNELALPSKYVNFLYLASHYEKLKGSPEDNEQKQLFVEQHKHYLDEIIEQISEFSKRVILADANLDKVLSAYNKHRDKPIREQAENIIHLFTLTNLGAPAAFKYFDTTIDRKRYTSTKEVLDATLIHQSITGLYETRIDLSQLGGDGGPAPGSSGGGGGLDDEYRLYSPLVKPDQNIQFWLEQFPQAWAETAGMGLAKQVPPQVIQLKASATPVSVRQYPLSKEAQEGIRPHVQRLIQQGILVPVQSPWNTPLLPVRKPGTNDYRPVQDLREVNKRVQDIHPTVPNPYNLLCALPPQRSWYTVLDLKDAFFCLRLHPTSQPLFAFEWRDPGTGRTGQLTWTRLPQGFKNSPTIFNEALHRDLANFRIQHPQVTLLQYVDDLLLAGATKQDCLEGTKALLLELSDLGYRASAKKAQICRREVTYLGYSLRDGQRWLTEARKKTVVQIPAPTTAKQVREFLGKAGFCRLFIPGFATLAAPLYPLTKPKGEFSWAPEHQKAFDAIKKALLSAPALALPDVTKPFTLYVDERKGVARGVLTQTLGPWRRPVAYLSKKLDPVASGWPVCLKAIAAVAILVKDADKLTLGQNITVIAPHALENIVRQPPDRWMTNARMTHYQSLLLTERVTFAPPAALNPATLLPEETDEPVTHDCHQLLIEETGVRKDLTDIPLTGEVLTWFTDGSSYVVEGKRMAGAAVVDGTRTIWASSLPEGTSAQKAELMALTQALRLAEGKSINIYTDSRYAFATAHVHGAIYKQRGWLTSAGREIKNKEEILSLLEALHLPKRLAIIHCPGHQKAKDPISRGNQMADRVAKQAAQGVNLLPAGKRTADGSEFEKRTADGSEFESPKKKAKVE

SEQ ID NO: 90 - protein, 2093 aa, synthetic construct
  source 1..2093: note = Description of Artificial Sequence: Synthetic polypeptide
MPAAKRVKLDGGDKKYSIGLDIGTNSVGWAVITDEYKVPSKKFKVLGNTDRHSIKKNLIGALLFDSGETAEATRLKRTARRRYTRRKNRICYLQEIFSNEMAKVDDSFFHRLEESFLVEEDKKHERHPIFGNIVDEVAYHEKYPTIYHLRKKLVDSTDKADLRLIYLALAHMIKFRGHFLIEGDLNPDNSDVDKLFIQLVQTYNQLFEENPINASGVDAKAILSARLSKSRRLENLIAQLPGEKKNGLFGNLIALSLGLTPNFKSNFDLAEDAKLQLSKDTYDDDLDNLLAQIGDQYADLFLAAKNLSDAILLSDILRVNTEITKAPLSASMIKRYDEHHQDLTLLKALVRQQLPEKYKEIFFDQSKNGYAGYIDGGASQEEFYKFIKPILEKMDGTEELLVKLNREDLLRKQRTFDNGSIPHQIHLGELHAILRRQEDFYPFLKDNREKIEKILTFRIPYYVGPLARGNSRFAWMTRKSEETITPWNFEEVVDKGASAQSFIERMTNFDKNLPNEKVLPKHSLLYEYFTVYNELTKVKYVTEGMRKPAFLSGEQKKAIVDLLFKTNRKVTVKQLKEDYFKKIECFDSVEISGVEDRFNASLGTYHDLLKIIKDKDFLDNEENEDILEDIVLTLTLFEDREMIEERLKTYAHLFDDKVMKQLKRRRYTGWGRLSRKLINGIRDKQSGKTILDFLKSDGFANRNFMQLIHDDSLTFKEDIQKAQVSGQGDSLHEHIANLAGSPAIKKGILQTVKVVDELVKVMGRHKPENIVIEMARENQTTQKGQKNSRERMKRIEEGIKELGSQILKEHPVENTQLQNEKLYLYYLQNGRDMYVDQELDINRLSDYDVDHIVPQSFLKDDSIDNKVLTRSDKARGKSDNVPSEEVVKKMKNYWRQLLNAKLITQRKFDNLTKAERGGLSELDKAGFIKRQLVETRQITKHVAQILDSRMNTKYDENDKLIREVKVITLKSKLVSDFRKDFQFYKVREINNYHHAHDAYLNAVVGTALIKKYPKLESEFVYGDYKVYDVRKMIAKSEQEIGKATAKYFFYSNIMNFFKTEITLANGEIRKRPLIETNGETGEIVWDKGRDFATVRKVLSMPQVNIVKKTEVQTGGFSKESILPKRNSDKLIARKKDWDPKKYGGFDSPTVAYSVLVVAKVEKGKSKKLKSVKELLGITIMERSSFEKNPIDFLEAKGYKEVKKDLIIKLPKYSLFELENGRKRMLASAGELQKGNELALPSKYVNFLYLASHYEKLKGSPEDNEQKQLFVEQHKHYLDEIIEQISEFSKRVILADANLDKVLSAYNKHRDKPIREQAENIIHLFTLTNLGAPAAFKYFDTTIDRKRYTSTKEVLDATLIHQSITGLYETRIDLSQLGGDGGSGSETPGTSESATPESGGLDDEYRLYSPLVKPDQNIQFWLEQFPQAWAETAGMGLAKQVPPQVIQLKASATPVSVRQYPLSKEAQEGIRPHVQRLIQQGILVPVQSPWNTPLLPVRKPGTNDYRPVQDLREVNKRVQDIHPTVPNPYNLLCALPPQRSWYTVLDLKDAFFCLRLHPTSQPLFAFEWRDPGTGRTGQLTWTRLPQGFKNSPTIFNEALHRDLANFRIQHPQVTLLQYVDDLLLAGATKQDCLEGTKALLLELSDLGYRASAKKAQICRREVTYLGYSLRDGQRWLTEARKKTVVQIPAPTTAKQVREFLGKAGFCRLFIPGFATLAAPLYPLTKPKGEFSWAPEHQKAFDAIKKALLSAPALALPDVTKPFTLYVDERKGVARGVLTQTLGPWRRPVAYLSKKLDPVASGWPVCLKAIAAVAILVKDADKLTLGQNITVIAPHALENIVRQPPDRWMTNARMTHYQSLLLTERVTFAPPAALNPATLLPEETDEPVTHDCHQLLIEETGVRKDLTDIPLTGEVLTWFTDGSSYVVEGKRMAGAAVVDGTRTIWASSLPEGTSAQKAELMALTQALRLAEGKSINIYTDSRYAFATAHVHGAIYKQRGWLTSAGREIKNKEEILSLLEALHLPKRLAIIHCPGHQKAKDPISRGNQMADRVAKQAAQGVNLLPAGKRTADGSEFEKRTADGSEFESPKKKAKVE

SEQ ID NO: 91 - protein, 2086 aa, synthetic construct
  source 1..2086: note = Description of Artificial Sequence: Synthetic polypeptide
MPAAKRVKLDGGDKKYSIGLDIGTNSVGWAVITDEYKVPSKKFKVLGNTDRHSIKKNLIGALLFDSGETAEATRLKRTARRRYTRRKNRICYLQEIFSNEMAKVDDSFFHRLEESFLVEEDKKHERHPIFGNIVDEVAYHEKYPTIYHLRKKLVDSTDKADLRLIYLALAHMIKFRGHFLIEGDLNPDNSDVDKLFIQLVQTYNQLFEENPINASGVDAKAILSARLSKSRRLENLIAQLPGEKKNGLFGNLIALSLGLTPNFKSNFDLAEDAKLQLSKDTYDDDLDNLLAQIGDQYADLFLAAKNLSDAILLSDILRVNTEITKAPLSASMIKRYDEHHQDLTLLKALVRQQLPEKYKEIFFDQSKNGYAGYIDGGASQEEFYKFIKPILEKMDGTEELLVKLNREDLLRKQRTFDNGSIPHQIHLGELHAILRRQEDFYPFLKDNREKIEKILTFRIPYYVGPLARGNSRFAWMTRKSEETITPWNFEEVVDKGASAQSFIERMTNFDKNLPNEKVLPKHSLLYEYFTVYNELTKVKYVTEGMRKPAFLSGEQKKAIVDLLFKTNRKVTVKQLKEDYFKKIECFDSVEISGVEDRFNASLGTYHDLLKIIKDKDFLDNEENEDILEDIVLTLTLFEDREMIEERLKTYAHLFDDKVMKQLKRRRYTGWGRLSRKLINGIRDKQSGKTILDFLKSDGFANRNFMQLIHDDSLTFKEDIQKAQVSGQGDSLHEHIANLAGSPAIKKGILQTVKVVDELVKVMGRHKPENIVIEMARENQTTQKGQKNSRERMKRIEEGIKELGSQILKEHPVENTQLQNEKLYLYYLQNGRDMYVDQELDINRLSDYDVDHIVPQSFLKDDSIDNKVLTRSDKARGKSDNVPSEEVVKKMKNYWRQLLNAKLITQRKFDNLTKAERGGLSELDKAGFIKRQLVETRQITKHVAQILDSRMNTKYDENDKLIREVKVITLKSKLVSDFRKDFQFYKVREINNYHHAHDAYLNAVVGTALIKKYPKLESEFVYGDYKVYDVRKMIAKSEQEIGKATAKYFFYSNIMNFFKTEITLANGEIRKRPLIETNGETGEIVWDKGRDFATVRKVLSMPQVNIVKKTEVQTGGFSKESILPKRNSDKLIARKKDWDPKKYGGFDSPTVAYSVLVVAKVEKGKSKKLKSVKELLGITIMERSSFEKNPIDFLEAKGYKEVKKDLIIKLPKYSLFELENGRKRMLASAGELQKGNELALPSKYVNFLYLASHYEKLKGSPEDNEQKQLFVEQHKHYLDEIIEQISEFSKRVILADANLDKVLSAYNKHRDKPIREQAENIIHLFTLTNLGAPAAFKYFDTTIDRKRYTSTKEVLDATLIHQSITGLYETRIDLSQLGGDGGGSSGGGPAPGGLDDEYRLYSPLVKPDQNIQFWLEQFPQAWAETAGMGLAKQVPPQVIQLKASATPVSVRQYPLSKEAQEGIRPHVQRLIQQGILVPVQSPWNTPLLPVRKPGTNDYRPVQDLREVNKRVQDIHPTVPNPYNLLCALPPQRSWYTVLDLKDAFFCLRLHPTSQPLFAFEWRDPGTGRTGQLTWTRLPQGFKNSPTIFNEALHRDLANFRIQHPQVTLLQYVDDLLLAGATKQDCLEGTKALLLELSDLGYRASAKKAQICRREVTYLGYSLRDGQRWLTEARKKTVVQIPAPTTAKQVREFLGKAGFCRLFIPGFATLAAPLYPLTKPKGEFSWAPEHQKAFDAIKKALLSAPALALPDVTKPFTLYVDERKGVARGVLTQTLGPWRRPVAYLSKKLDPVASGWPVCLKAIAAVAILVKDADKLTLGQNITVIAPHALENIVRQPPDRWMTNARMTHYQSLLLTERVTFAPPAALNPATLLPEETDEPVTHDCHQLLIEETGVRKDLTDIPLTGEVLTWFTDGSSYVVEGKRMAGAAVVDGTRTIWASSLPEGTSAQKAELMALTQALRLAEGKSINIYTDSRYAFATAHVHGAIYKQRGWLTSAGREIKNKEEILSLLEALHLPKRLAIIHCPGHQKAKDPISRGNQMADRVAKQAAQGVNLLPAGKRTADGSEFEKRTADGSEFESPKKKAKVE

SEQ ID NO: 92 - protein, 2088 aa, synthetic construct
  source 1..2088: note = Description of Artificial Sequence: Synthetic polypeptide
MPAAKRVKLDGGDKKYSIGLDIGTNSVGWAVITDEYKVPSKKFKVLGNTDRHSIKKNLIGALLFDSGETAEATRLKRTARRRYTRRKNRICYLQEIFSNEMAKVDDSFFHRLEESFLVEEDKKHERHPIFGNIVDEVAYHEKYPTIYHLRKKLVDSTDKADLRLIYLALAHMIKFRGHFLIEGDLNPDNSDVDKLFIQLVQTYNQLFEENPINASGVDAKAILSARLSKSRRLENLIAQLPGEKKNGLFGNLIALSLGLTPNFKSNFDLAEDAKLQLSKDTYDDDLDNLLAQIGDQYADLFLAAKNLSDAILLSDILRVNTEITKAPLSASMIKRYDEHHQDLTLLKALVRQQLPEKYKEIFFDQSKNGYAGYIDGGASQEEFYKFIKPILEKMDGTEELLVKLNREDLLRKQRTFDNGSIPHQIHLGELHAILRRQEDFYPFLKDNREKIEKILTFRIPYYVGPLARGNSRFAWMTRKSEETITPWNFEEVVDKGASAQSFIERMTNFDKNLPNEKVLPKHSLLYEYFTVYNELTKVKYVTEGMRKPAFLSGEQKKAIVDLLFKTNRKVTVKQLKEDYFKKIECFDSVEISGVEDRFNASLGTYHDLLKIIKDKDFLDNEENEDILEDIVLTLTLFEDREMIEERLKTYAHLFDDKVMKQLKRRRYTGWGRLSRKLINGIRDKQSGKTILDFLKSDGFANRNFMQLIHDDSLTFKEDIQKAQVSGQGDSLHEHIANLAGSPAIKKGILQTVKVVDELVKVMGRHKPENIVIEMARENQTTQKGQKNSRERMKRIEEGIKELGSQILKEHPVENTQLQNEKLYLYYLQNGRDMYVDQELDINRLSDYDVDHIVPQSFLKDDSIDNKVLTRSDKARGKSDNVPSEEVVKKMKNYWRQLLNAKLITQRKFDNLTKAERGGLSELDKAGFIKRQLVETRQITKHVAQILDSRMNTKYDENDKLIREVKVITLKSKLVSDFRKDFQFYKVREINNYHHAHDAYLNAVVGTALIKKYPKLESEFVYGDYKVYDVRKMIAKSEQEIGKATAKYFFYSNIMNFFKTEITLANGEIRKRPLIETNGETGEIVWDKGRDFATVRKVLSMPQVNIVKKTEVQTGGFSKESILPKRNSDKLIARKKDWDPKKYGGFDSPTVAYSVLVVAKVEKGKSKKLKSVKELLGITIMERSSFEKNPIDFLEAKGYKEVKKDLIIKLPKYSLFELENGRKRMLASAGELQKGNELALPSKYVNFLYLASHYEKLKGSPEDNEQKQLFVEQHKHYLDEIIEQISEFSKRVILADANLDKVLSAYNKHRDKPIREQAENIIHLFTLTNLGAPAAFKYFDTTIDRKRYTSTKEVLDATLIHQSITGLYETRIDLSQLGGDGGGGSEAAAKGSSGGLDDEYRLYSPLVKPDQNIQFWLEQFPQAWAETAGMGLAKQVPPQVIQLKASATPVSVRQYPLSKEAQEGIRPHVQRLIQQGILVPVQSPWNTPLLPVRKPGTNDYRPVQDLREVNKRVQDIHPTVPNPYNLLCALPPQRSWYTVLDLKDAFFCLRLHPTSQPLFAFEWRDPGTGRTGQLTWTRLPQGFKNSPTIFNEALHRDLANFRIQHPQVTLLQYVDDLLLAGATKQDCLEGTKALLLELSDLGYRASAKKAQICRREVTYLGYSLRDGQRWLTEARKKTVVQIPAPTTAKQVREFLGKAGFCRLFIPGFATLAAPLYPLTKPKGEFSWAPEHQKAFDAIKKALLSAPALALPDVTKPFTLYVDERKGVARGVLTQTLGPWRRPVAYLSKKLDPVASGWPVCLKAIAAVAILVKDADKLTLGQNITVIAPHALENIVRQPPDRWMTNARMTHYQSLLLTERVTFAPPAALNPATLLPEETDEPVTHDCHQLLIEETGVRKDLTDIPLTGEVLTWFTDGSSYVVEGKRMAGAAVVDGTRTIWASSLPEGTSAQKAELMALTQALRLAEGKSINIYTDSRYAFATAHVHGAIYKQRGWLTSAGREIKNKEEILSLLEALHLPKRLAIIHCPGHQKAKDPISRGNQMADRVAKQAAQGVNLLPAGKRTADGSEFEKRTADGSEFESPKKKAKVE

SEQ ID NO: 93 - protein, 2088 aa, synthetic construct
  source 1..2088: note = Description of Artificial Sequence: Synthetic polypeptide
MPAAKRVKLDGGDKKYSIGLDIGTNSVGWAVITDEYKVPSKKFKVLGNTDRHSIKKNLIGALLFDSGETAEATRLKRTARRRYTRRKNRICYLQEIFSNEMAKVDDSFFHRLEESFLVEEDKKHERHPIFGNIVDEVAYHEKYPTIYHLRKKLVDSTDKADLRLIYLALAHMIKFRGHFLIEGDLNPDNSDVDKLFIQLVQTYNQLFEENPINASGVDAKAILSARLSKSRRLENLIAQLPGEKKNGLFGNLIALSLGLTPNFKSNFDLAEDAKLQLSKDTYDDDLDNLLAQIGDQYADLFLAAKNLSDAILLSDILRVNTEITKAPLSASMIKRYDEHHQDLTLLKALVRQQLPEKYKEIFFDQSKNGYAGYIDGGASQEEFYKFIKPILEKMDGTEELLVKLNREDLLRKQRTFDNGSIPHQIHLGELHAILRRQEDFYPFLKDNREKIEKILTFRIPYYVGPLARGNSRFAWMTRKSEETITPWNFEEVVDKGASAQSFIERMTNFDKNLPNEKVLPKHSLLYEYFTVYNELTKVKYVTEGMRKPAFLSGEQKKAIVDLLFKTNRKVTVKQLKEDYFKKIECFDSVEISGVEDRFNASLGTYHDLLKIIKDKDFLDNEENEDILEDIVLTLTLFEDREMIEERLKTYAHLFDDKVMKQLKRRRYTGWGRLSRKLINGIRDKQSGKTILDFLKSDGFANRNFMQLIHDDSLTFKEDIQKAQVSGQGDSLHEHIANLAGSPAIKKGILQTVKVVDELVKVMGRHKPENIVIEMARENQTTQKGQKNSRERMKRIEEGIKELGSQILKEHPVENTQLQNEKLYLYYLQNGRDMYVDQELDINRLSDYDVDHIVPQSFLKDDSIDNKVLTRSDKARGKSDNVPSEEVVKKMKNYWRQLLNAKLITQRKFDNLTKAERGGLSELDKAGFIKRQLVETRQITKHVAQILDSRMNTKYDENDKLIREVKVITLKSKLVSDFRKDFQFYKVREINNYHHAHDAYLNAVVGTALIKKYPKLESEFVYGDYKVYDVRKMIAKSEQEIGKATAKYFFYSNIMNFFKTEITLANGEIRKRPLIETNGETGEIVWDKGRDFATVRKVLSMPQVNIVKKTEVQTGGFSKESILPKRNSDKLIARKKDWDPKKYGGFDSPTVAYSVLVVAKVEKGKSKKLKSVKELLGITIMERSSFEKNPIDFLEAKGYKEVKKDLIIKLPKYSLFELENGRKRMLASAGELQKGNELALPSKYVNFLYLASHYEKLKGSPEDNEQKQLFVEQHKHYLDEIIEQISEFSKRVILADANLDKVLSAYNKHRDKPIREQAENIIHLFTLTNLGAPAAFKYFDTTIDRKRYTSTKEVLDATLIHQSITGLYETRIDLSQLGGDGGPAPEAAAKGSSGGLDDEYRLYSPLVKPDQNIQFWLEQFPQAWAETAGMGLAKQVPPQVIQLKASATPVSVRQYPLSKEAQEGIRPHVQRLIQQGILVPVQSPWNTPLLPVRKPGTNDYRPVQDLREVNKRVQDIHPTVPNPYNLLCALPPQRSWYTVLDLKDAFFCLRLHPTSQPLFAFEWRDPGTGRTGQLTWTRLPQGFKNSPTIFNEALHRDLANFRIQHPQVTLLQYVDDLLLAGATKQDCLEGTKALLLELSDLGYRASAKKAQICRREVTYLGYSLRDGQRWLTEARKKTVVQIPAPTTAKQVREFLGKAGFCRLFIPGFATLAAPLYPLTKPKGEFSWAPEHQKAFDAIKKALLSAPALALPDVTKPFTLYVDERKGVARGVLTQTLGPWRRPVAYLSKKLDPVASGWPVCLKAIAAVAILVKDADKLTLGQNITVIAPHALENIVRQPPDRWMTNARMTHYQSLLLTERVTFAPPAALNPATLLPEETDEPVTHDCHQLLIEETGVRKDLTDIPLTGEVLTWFTDGSSYVVEGKRMAGAAVVDGTRTIWASSLPEGTSAQKAELMALTQALRLAEGKSINIYTDSRYAFATAHVHGAIYKQRGWLTSAGREIKNKEEILSLLEALHLPKRLAIIHCPGHQKAKDPISRGNQMADRVAKQAAQGVNLLPAGKRTADGSEFEKRTADGSEFESPKKKAKVE

SEQ ID NO: 94 - protein, 2088 aa, synthetic construct
  source 1..2088: note = Description of Artificial Sequence: Synthetic polypeptide
MPAAKRVKLDGGDKKYSIGLDIGTNSVGWAVITDEYKVPSKKFKVLGNTDRHSIKKNLIGALLFDSGETAEATRLKRTARRRYTRRKNRICYLQEIFSNEMAKVDDSFFHRLEESFLVEEDKKHERHPIFGNIVDEVAYHEKYPTIYHLRKKLVDSTDKADLRLIYLALAHMIKFRGHFLIEGDLNPDNSDVDKLFIQLVQTYNQLFEENPINASGVDAKAILSARLSKSRRLENLIAQLPGEKKNGLFGNLIALSLGLTPNFKSNFDLAEDAKLQLSKDTYDDDLDNLLAQIGDQYADLFLAAKNLSDAILLSDILRVNTEITKAPLSASMIKRYDEHHQDLTLLKALVRQQLPEKYKEIFFDQSKNGYAGYIDGGASQEEFYKFIKPILEKMDGTEELLVKLNREDLLRKQRTFDNGSIPHQIHLGELHAILRRQEDFYPFLKDNREKIEKILTFRIPYYVGPLARGNSRFAWMTRKSEETITPWNFEEVVDKGASAQSFIERMTNFDKNLPNEKVLPKHSLLYEYFTVYNELTKVKYVTEGMRKPAFLSGEQKKAIVDLLFKTNRKVTVKQLKEDYFKKIECFDSVEISGVEDRFNASLGTYHDLLKIIKDKDFLDNEENEDILEDIVLTLTLFEDREMIEERLKTYAHLFDDKVMKQLKRRRYTGWGRLSRKLINGIRDKQSGKTILDFLKSDGFANRNFMQLIHDDSLTFKEDIQKAQVSGQGDSLHEHIANLAGSPAIKKGILQTVKVVDELVKVMGRHKPENIVIEMARENQTTQKGQKNSRERMKRIEEGIKELGSQILKEHPVENTQLQNEKLYLYYLQNGRDMYVDQELDINRLSDYDVDHIVPQSFLKDDSIDNKVLTRSDKARGKSDNVPSEEVVKKMKNYWRQLLNAKLITQRKFDNLTKAERGGLSELDKAGFIKRQLVETRQITKHVAQILDSRMNTKYDENDKLIREVKVITLKSKLVSDFRKDFQFYKVREINNYHHAHDAYLNAVVGTALIKKYPKLESEFVYGDYKVYDVRKMIAKSEQEIGKATAKYFFYSNIMNFFKTEITLANGEIRKRPLIETNGETGEIVWDKGRDFATVRKVLSMPQVNIVKKTEVQTGGFSKESILPKRNSDKLIARKKDWDPKKYGGFDSPTVAYSVLVVAKVEKGKSKKLKSVKELLGITIMERSSFEKNPIDFLEAKGYKEVKKDLIIKLPKYSLFELENGRKRMLASAGELQKGNELALPSKYVNFLYLASHYEKLKGSPEDNEQKQLFVEQHKHYLDEIIEQISEFSKRVILADANLDKVLSAYNKHRDKPIREQAENIIHLFTLTNLGAPAAFKYFDTTIDRKRYTSTKEVLDATLIHQSITGLYETRIDLSQLGGDGGGGSGGGEAAAKGGLDDEYRLYSPLVKPDQNIQFWLEQFPQAWAETAGMGLAKQVPPQVIQLKASATPVSVRQYPLSKEAQEGIRPHVQRLIQQGILVPVQSPWNTPLLPVRKPGTNDYRPVQDLREVNKRVQDIHPTVPNPYNLLCALPPQRSWYTVLDLKDAFFCLRLHPTSQPLFAFEWRDPGTGRTGQLTWTRLPQGFKNSPTIFNEALHRDLANFRIQHPQVTLLQYVDDLLLAGATKQDCLEGTKALLLELSDLGYRASAKKAQICRREVTYLGYSLRDGQRWLTEARKKTVVQIPAPTTAKQVREFLGKAGFCRLFIPGFATLAAPLYPLTKPKGEFSWAPEHQKAFDAIKKALLSAPALALPDVTKPFTLYVDERKGVARGVLTQTLGPWRRPVAYLSKKLDPVASGWPVCLKAIAAVAILVKDADKLTLGQNITVIAPHALENIVRQPPDRWMTNARMTHYQSLLLTERVTFAPPAALNPATLLPEETDEPVTHDCHQLLIEETGVRKDLTDIPLTGEVLTWFTDGSSYVVEGKRMAGAAVVDGTRTIWASSLPEGTSAQKAELMALTQALRLAEGKSINIYTDSRYAFATAHVHGAIYKQRGWLTSAGREIKNKEEILSLLEALHLPKRLAIIHCPGHQKAKDPISRGNQMADRVAKQAAQGVNLLPAGKRTADGSEFEKRTADGSEFESPKKKAKVE

SEQ ID NO: 95 - protein, 2086 aa, synthetic construct
  source 1..2086: note = Description of Artificial Sequence: Synthetic polypeptide
MPAAKRVKLDGGDKKYSIGLDIGTNSVGWAVITDEYKVPSKKFKVLGNTDRHSIKKNLIGALLFDSGETAEATRLKRTARRRYTRRKNRICYLQEIFSNEMAKVDDSFFHRLEESFLVEEDKKHERHPIFGNIVDEVAYHEKYPTIYHLRKKLVDSTDKADLRLIYLALAHMIKFRGHFLIEGDLNPDNSDVDKLFIQLVQTYNQLFEENPINASGVDAKAILSARLSKSRRLENLIAQLPGEKKNGLFGNLIALSLGLTPNFKSNFDLAEDAKLQLSKDTYDDDLDNLLAQIGDQYADLFLAAKNLSDAILLSDILRVNTEITKAPLSASMIKRYDEHHQDLTLLKALVRQQLPEKYKEIFFDQSKNGYAGYIDGGASQEEFYKFIKPILEKMDGTEELLVKLNREDLLRKQRTFDNGSIPHQIHLGELHAILRRQEDFYPFLKDNREKIEKILTFRIPYYVGPLARGNSRFAWMTRKSEETITPWNFEEVVDKGASAQSFIERMTNFDKNLPNEKVLPKHSLLYEYFTVYNELTKVKYVTEGMRKPAFLSGEQKKAIVDLLFKTNRKVTVKQLKEDYFKKIECFDSVEISGVEDRFNASLGTYHDLLKIIKDKDFLDNEENEDILEDIVLTLTLFEDREMIEERLKTYAHLFDDKVMKQLKRRRYTGWGRLSRKLINGIRDKQSGKTILDFLKSDGFANRNFMQLIHDDSLTFKEDIQKAQVSGQGDSLHEHIANLAGSPAIKKGILQTVKVVDELVKVMGRHKPENIVIEMARENQTTQKGQKNSRERMKRIEEGIKELGSQILKEHPVENTQLQNEKLYLYYLQNGRDMYVDQELDINRLSDYDVDHIVPQSFLKDDSIDNKVLTRSDKARGKSDNVPSEEVVKKMKNYWRQLLNAKLITQRKFDNLTKAERGGLSELDKAGFIKRQLVETRQITKHVAQILDSRMNTKYDENDKLIREVKVITLKSKLVSDFRKDFQFYKVREINNYHHAHDAYLNAVVGTALIKKYPKLESEFVYGDYKVYDVRKMIAKSEQEIGKATAKYFFYSNIMNFFKTEITLANGEIRKRPLIETNGETGEIVWDKGRDFATVRKVLSMPQVNIVKKTEVQTGGFSKESILPKRNSDKLIARKKDWDPKKYGGFDSPTVAYSVLVVAKVEKGKSKKLKSVKELLGITIMERSSFEKNPIDFLEAKGYKEVKKDLIIKLPKYSLFELENGRKRMLASAGELQKGNELALPSKYVNFLYLASHYEKLKGSPEDNEQKQLFVEQHKHYLDEIIEQISEFSKRVILADANLDKVLSAYNKHRDKPIREQAENIIHLFTLTNLGAPAAFKYFDTTIDRKRYTSTKEVLDATLIHQSITGLYETRIDLSQLGGDGGGGGGSSGGSGGLDDEYRLYSPLVKPDQNIQFWLEQFPQAWAETAGMGLAKQVPPQVIQLKASATPVSVRQYPLSKEAQEGIRPHVQRLIQQGILVPVQSPWNTPLLPVRKPGTNDYRPVQDLREVNKRVQDIHPTVPNPYNLLCALPPQRSWYTVLDLKDAFFCLRLHPTSQPLFAFEWRDPGTGRTGQLTWTRLPQGFKNSPTIFNEALHRDLANFRIQHPQVTLLQYVDDLLLAGATKQDCLEGTKALLLELSDLGYRASAKKAQICRREVTYLGYSLRDGQRWLTEARKKTVVQIPAPTTAKQVREFLGKAGFCRLFIPGFATLAAPLYPLTKPKGEFSWAPEHQKAFDAIKKALLSAPALALPDVTKPFTLYVDERKGVARGVLTQTLGPWRRPVAYLSKKLDPVASGWPVCLKAIAAVAILVKDADKLTLGQNITVIAPHALENIVRQPPDRWMTNARMTHYQSLLLTERVTFAPPAALNPATLLPEETDEPVTHDCHQLLIEETGVRKDLTDIPLTGEVLTWFTDGSSYVVEGKRMAGAAVVDGTRTIWASSLPEGTSAQKAELMALTQALRLAEGKSINIYTDSRYAFATAHVHGAIYKQRGWLTSAGREIKNKEEILSLLEALHLPKRLAIIHCPGHQKAKDPISRGNQMADRVAKQAAQGVNLLPAGKRTADGSEFEKRTADGSEFESPKKKAKVE

SEQ ID NO: 96 - protein, 2104 aa, synthetic construct
  source 1..2104: note = Description of Artificial Sequence: Synthetic polypeptide
MPAAKRVKLDGGDKKYSIGLDIGTNSVGWAVITDEYKVPSKKFKVLGNTDRHSIKKNLIGALLFDSGETAEATRLKRTARRRYTRRKNRICYLQEIFSNEMAKVDDSFFHRLEESFLVEEDKKHERHPIFGNIVDEVAYHEKYPTIYHLRKKLVDSTDKADLRLIYLALAHMIKFRGHFLIEGDLNPDNSDVDKLFIQLVQTYNQLFEENPINASGVDAKAILSARLSKSRRLENLIAQLPGEKKNGLFGNLIALSLGLTPNFKSNFDLAEDAKLQLSKDTYDDDLDNLLAQIGDQYADLFLAAKNLSDAILLSDILRVNTEITKAPLSASMIKRYDEHHQDLTLLKALVRQQLPEKYKEIFFDQSKNGYAGYIDGGASQEEFYKFIKPILEKMDGTEELLVKLNREDLLRKQRTFDNGSIPHQIHLGELHAILRRQEDFYPFLKDNREKIEKILTFRIPYYVGPLARGNSRFAWMTRKSEETITPWNFEEVVDKGASAQSFIERMTNFDKNLPNEKVLPKHSLLYEYFTVYNELTKVKYVTEGMRKPAFLSGEQKKAIVDLLFKTNRKVTVKQLKEDYFKKIECFDSVEISGVEDRFNASLGTYHDLLKIIKDKDFLDNEENEDILEDIVLTLTLFEDREMIEERLKTYAHLFDDKVMKQLKRRRYTGWGRLSRKLINGIRDKQSGKTILDFLKSDGFANRNFMQLIHDDSLTFKEDIQKAQVSGQGDSLHEHIANLAGSPAIKKGILQTVKVVDELVKVMGRHKPENIVIEMARENQTTQKGQKNSRERMKRIEEGIKELGSQILKEHPVENTQLQNEKLYLYYLQNGRDMYVDQELDINRLSDYDVDHIVPQSFLKDDSIDNKVLTRSDKARGKSDNVPSEEVVKKMKNYWRQLLNAKLITQRKFDNLTKAERGGLSELDKAGFIKRQLVETRQITKHVAQILDSRMNTKYDENDKLIREVKVITLKSKLVSDFRKDFQFYKVREINNYHHAHDAYLNAVVGTALIKKYPKLESEFVYGDYKVYDVRKMIAKSEQEIGKATAKYFFYSNIMNFFKTEITLANGEIRKRPLIETNGETGEIVWDKGRDFATVRKVLSMPQVNIVKKTEVQTGGFSKESILPKRNSDKLIARKKDWDPKKYGGFDSPTVAYSVLVVAKVEKGKSKKLKSVKELLGITIMERSSFEKNPIDFLEAKGYKEVKKDLIIKLPKYSLFELENGRKRMLASAGELQKGNELALPSKYVNFLYLASHYEKLKGSPEDNEQKQLFVEQHKHYLDEIIEQISEFSKRVILADANLDKVLSAYNKHRDKPIREQAENIIHLFTLTNLGAPAAFKYFDTTIDRKRYTSTKEVLDATLIHQSITGLYETRIDLSQLGGDGGEAAAKEAAAKEAAAKEAAAKEAAAKGGTLQLDDEYRLYSPLVKPDQNIQFWLEQFPQAWAETAGMGLAKQVPPQVIQLKASATPVSVRQYPLSKEAQEGIRPHVQRLIQQGILVPVQSPWNTPLLPVRKPGTNDYRPVQDLREVNKRVQDIHPTVPNPYNLLCALPPQRSWYTVLDLKDAFFCLRLHPTSQPLFAFEWRDPGTGRTGQLTWTRLPQGFKNSPTIFDEALHRDLANFRIQHPQVTLLQYVDDLLLAGATKQDCLEGTKALLLELSDLGYRASAKKAQICRREVTYLGYSLRDGQRWLTEARKKTVVQIPAPTTAKQVREFLGTAGFCRLWIPGFATLAAPLYPLTKEKGEFSWAPEHQKAFDAIKKALLSAPALALPDVTKPFTLYVDERKGVARGVLTQTLGPWRRPVAYLSKKLDPVASGWPVCLKAIAAVAILVKDADKLTLGQNITVIAPHALENIVRQPPDRWMTNARMTHYQSLLLTERVTFAPPAALNPATLLPEETDEPVTHDCHQLLIEETGVRKDLTDIPLTGEVLTWFTDGSSYVVEGKRMAGAAVVDGTRTIWASSLPEGTSAQKAELMALTQALRLAEGKSINIYTDSRYAFATAHVHGAIYKQRGLLTSAGREIKNKEEILSLLEALHLPKRLAIIHCPGHQKAKDPISRGNQMADRVAKQAAQGVNLLAGKRTADGSEFEKRTADGSEFESPKKKAKVE

SEQ ID NO: 97 - protein, 2094 aa, synthetic construct
  source 1..2094: note = Description of Artificial Sequence: Synthetic polypeptide
MPAAKRVKLDGGDKKYSIGLDIGTNSVGWAVITDEYKVPSKKFKVLGNTDRHSIKKNLIGALLFDSGETAEATRLKRTARRRYTRRKNRICYLQEIFSNEMAKVDDSFFHRLEESFLVEEDKKHERHPIFGNIVDEVAYHEKYPTIYHLRKKLVDSTDKADLRLIYLALAHMIKFRGHFLIEGDLNPDNSDVDKLFIQLVQTYNQLFEENPINASGVDAKAILSARLSKSRRLENLIAQLPGEKKNGLFGNLIALSLGLTPNFKSNFDLAEDAKLQLSKDTYDDDLDNLLAQIGDQYADLFLAAKNLSDAILLSDILRVNTEITKAPLSASMIKRYDEHHQDLTLLKALVRQQLPEKYKEIFFDQSKNGYAGYIDGGASQEEFYKFIKPILEKMDGTEELLVKLNREDLLRKQRTFDNGSIPHQIHLGELHAILRRQEDFYPFLKDNREKIEKILTFRIPYYVGPLARGNSRFAWMTRKSEETITPWNFEEVVDKGASAQSFIERMTNFDKNLPNEKVLPKHSLLYEYFTVYNELTKVKYVTEGMRKPAFLSGEQKKAIVDLLFKTNRKVTVKQLKEDYFKKIECFDSVEISGVEDRFNASLGTYHDLLKIIKDKDFLDNEENEDILEDIVLTLTLFEDREMIEERLKTYAHLFDDKVMKQLKRRRYTGWGRLSRKLINGIRDKQSGKTILDFLKSDGFANRNFMQLIHDDSLTFKEDIQKAQVSGQGDSLHEHIANLAGSPAIKKGILQTVKVVDELVKVMGRHKPENIVIEMARENQTTQKGQKNSRERMKRIEEGIKELGSQILKEHPVENTQLQNEKLYLYYLQNGRDMYVDQELDINRLSDYDVDHIVPQSFLKDDSIDNKVLTRSDKARGKSDNVPSEEVVKKMKNYWRQLLNAKLITQRKFDNLTKAERGGLSELDKAGFIKRQLVETRQITKHVAQILDSRMNTKYDENDKLIREVKVITLKSKLVSDFRKDFQFYKVREINNYHHAHDAYLNAVVGTALIKKYPKLESEFVYGDYKVYDVRKMIAKSEQEIGKATAKYFFYSNIMNFFKTEITLANGEIRKRPLIETNGETGEIVWDKGRDFATVRKVLSMPQVNIVKKTEVQTGGFSKESILPKRNSDKLIARKKDWDPKKYGGFDSPTVAYSVLVVAKVEKGKSKKLKSVKELLGITIMERSSFEKNPIDFLEAKGYKEVKKDLIIKLPKYSLFELENGRKRMLASAGELQKGNELALPSKYVNFLYLASHYEKLKGSPEDNEQKQLFVEQHKHYLDEIIEQISEFSKRVILADANLDKVLSAYNKHRDKPIREQAENIIHLFTLTNLGAPAAFKYFDTTIDRKRYTSTKEVLDATLIHQSITGLYETRIDLSQLGGDGGEAAAKGGGGSEAAAKGGTLQLDDEYRLYSPLVKPDQNIQFWLEQFPQAWAETAGMGLAKQVPPQVIQLKASATPVSVRQYPLSKEAQEGIRPHVQRLIQQGILVPVQSPWNTPLLPVRKPGTNDYRPVQDLREVNKRVQDIHPTVPNPYNLLCALPPQRSWYTVLDLKDAFFCLRLHPTSQPLFAFEWRDPGTGRTGQLTWTRLPQGFKNSPTIFDEALHRDLANFRIQHPQVTLLQYVDDLLLAGATKQDCLEGTKALLLELSDLGYRASAKKAQICRREVTYLGYSLRDGQRWLTEARKKTVVQIPAPTTAKQVREFLGTAGFCRLWIPGFATLAAPLYPLTKEKGEFSWAPEHQKAFDAIKKALLSAPALALPDVTKPFTLYVDERKGVARGVLTQTLGPWRRPVAYLSKKLDPVASGWPVCLKAIAAVAILVKDADKLTLGQNITVIAPHALENIVRQPPDRWMTNARMTHYQSLLLTERVTFAPPAALNPATLLPEETDEPVTHDCHQLLIEETGVRKDLTDIPLTGEVLTWFTDGSSYVVEGKRMAGAAVVDGTRTIWASSLPEGTSAQKAELMALTQALRLAEGKSINIYTDSRYAFATAHVHGAIYKQRGLLTSAGREIKNKEEILSLLEALHLPKRLAIIHCPGHQKAKDPISRGNQMADRVAKQAAQGVNLLAGKRTADGSEFEKRTADGSEFESPKKKAKVE

SEQ ID NO: 98 - protein, 2125 aa, synthetic construct
  source 1..2125: note = Description of Artificial Sequence: Synthetic polypeptide
MPAAKRVKLDGGDKKYSIGLDIGTNSVGWAVITDEYKVPSKKFKVLGNTDRHSIKKNLIGALLFDSGETAEATRLKRTARRRYTRRKNRICYLQEIFSNEMAKVDDSFFHRLEESFLVEEDKKHERHPIFGNIVDEVAYHEKYPTIYHLRKKLVDSTDKADLRLIYLALAHMIKFRGHFLIEGDLNPDNSDVDKLFIQLVQTYNQLFEENPINASGVDAKAILSARLSKSRRLENLIAQLPGEKKNGLFGNLIALSLGLTPNFKSNFDLAEDAKLQLSKDTYDDDLDNLLAQIGDQYADLFLAAKNLSDAILLSDILRVNTEITKAPLSASMIKRYDEHHQDLTLLKALVRQQLPEKYKEIFFDQSKNGYAGYIDGGASQEEFYKFIKPILEKMDGTEELLVKLNREDLLRKQRTFDNGSIPHQIHLGELHAILRRQEDFYPFLKDNREKIEKILTFRIPYYVGPLARGNSRFAWMTRKSEETITPWNFEEVVDKGASAQSFIERMTNFDKNLPNEKVLPKHSLLYEYFTVYNELTKVKYVTEGMRKPAFLSGEQKKAIVDLLFKTNRKVTVKQLKEDYFKKIECFDSVEISGVEDRFNASLGTYHDLLKIIKDKDFLDNEENEDILEDIVLTLTLFEDREMIEERLKTYAHLFDDKVMKQLKRRRYTGWGRLSRKLINGIRDKQSGKTILDFLKSDGFANRNFMQLIHDDSLTFKEDIQKAQVSGQGDSLHEHIANLAGSPAIKKGILQTVKVVDELVKVMGRHKPENIVIEMARENQTTQKGQKNSRERMKRIEEGIKELGSQILKEHPVENTQLQNEKLYLYYLQNGRDMYVDQELDINRLSDYDVDHIVPQSFLKDDSIDNKVLTRSDKARGKSDNVPSEEVVKKMKNYWRQLLNAKLITQRKFDNLTKAERGGLSELDKAGFIKRQLVETRQITKHVAQILDSRMNTKYDENDKLIREVKVITLKSKLVSDFRKDFQFYKVREINNYHHAHDAYLNAVVGTALIKKYPKLESEFVYGDYKVYDVRKMIAKSEQEIGKATAKYFFYSNIMNFFKTEITLANGEIRKRPLIETNGETGEIVWDKGRDFATVRKVLSMPQVNIVKKTEVQTGGFSKESILPKRNSDKLIARKKDWDPKKYGGFDSPTVAYSVLVVAKVEKGKSKKLKSVKELLGITIMERSSFEKNPIDFLEAKGYKEVKKDLIIKLPKYSLFELENGRKRMLASAGELQKGNELALPSKYVNFLYLASHYEKLKGSPEDNEQKQLFVEQHKHYLDEIIEQISEFSKRVILADANLDKVLSAYNKHRDKPIREQAENIIHLFTLTNLGAPAAFKYFDTTIDRKRYTSTKEVLDATLIHQSITGLYETRIDLSQLGGDGGAEAAAKEAAAKEAAAKEAAAKALEAEAAAKEAAAKEAAAKEAAAKAGGTLQLDDEYRLYSPLVKPDQNIQFWLEQFPQAWAETAGMGLAKQVPPQVIQLKASATPVSVRQYPLSKEAQEGIRPHVQRLIQQGILVPVQSPWNTPLLPVRKPGTNDYRPVQDLREVNKRVQDIHPTVPNPYNLLCALPPQRSWYTVLDLKDAFFCLRLHPTSQPLFAFEWRDPGTGRTGQLTWTRLPQGFKNSPTIFDEALHRDLANFRIQHPQVTLLQYVDDLLLAGATKQDCLEGTKALLLELSDLGYRASAKKAQICRREVTYLGYSLRDGQRWLTEARKKTVVQIPAPTTAKQVREFLGTAGFCRLWIPGFATLAAPLYPLTKEKGEFSWAPEHQKAFDAIKKALLSAPALALPDVTKPFTLYVDERKGVARGVLTQTLGPWRRPVAYLSKKLDPVASGWPVCLKAIAAVAILVKDADKLTLGQNITVIAPHALENIVRQPPDRWMTNARMTHYQSLLLTERVTFAPPAALNPATLLPEETDEPVTHDCHQLLIEETGVRKDLTDIPLTGEVLTWFTDGSSYVVEGKRMAGAAVVDGTRTIWASSLPEGTSAQKAELMALTQALRLAEGKSINIYTDSRYAFATAHVHGAIYKQRGLLTSAGREIKNKEEILSLLEALHLPKRLAIIHCPGHQKAKDPISRGNQMADRVAKQAAQGVNLLAGKRTADGSEFEKRTADGSEFESPKKKAKVE

SEQ ID NO: 99 - protein, 2094 aa, synthetic construct
  source 1..2094: note = Description of Artificial Sequence: Synthetic polypeptide
MPAAKRVKLDGGDKKYSIGLDIGTNSVGWAVITDEYKVPSKKFKVLGNTDRHSIKKNLIGALLFDSGETAEATRLKRTARRRYTRRKNRICYLQEIFSNEMAKVDDSFFHRLEESFLVEEDKKHERHPIFGNIVDEVAYHEKYPTIYHLRKKLVDSTDKADLRLIYLALAHMIKFRGHFLIEGDLNPDNSDVDKLFIQLVQTYNQLFEENPINASGVDAKAILSARLSKSRRLENLIAQLPGEKKNGLFGNLIALSLGLTPNFKSNFDLAEDAKLQLSKDTYDDDLDNLLAQIGDQYADLFLAAKNLSDAILLSDILRVNTEITKAPLSASMIKRYDEHHQDLTLLKALVRQQLPEKYKEIFFDQSKNGYAGYIDGGASQEEFYKFIKPILEKMDGTEELLVKLNREDLLRKQRTFDNGSIPHQIHLGELHAILRRQEDFYPFLKDNREKIEKILTFRIPYYVGPLARGNSRFAWMTRKSEETITPWNFEEVVDKGASAQSFIERMTNFDKNLPNEKVLPKHSLLYEYFTVYNELTKVKYVTEGMRKPAFLSGEQKKAIVDLLFKTNRKVTVKQLKEDYFKKIECFDSVEISGVEDRFNASLGTYHDLLKIIKDKDFLDNEENEDILEDIVLTLTLFEDREMIEERLKTYAHLFDDKVMKQLKRRRYTGWGRLSRKLINGIRDKQSGKTILDFLKSDGFANRNFMQLIHDDSLTFKEDIQKAQVSGQGDSLHEHIANLAGSPAIKKGILQTVKVVDELVKVMGRHKPENIVIEMARENQTTQKGQKNSRERMKRIEEGIKELGSQILKEHPVENTQLQNEKLYLYYLQNGRDMYVDQELDINRLSDYDVDHIVPQSFLKDDSIDNKVLTRSDKARGKSDNVPSEEVVKKMKNYWRQLLNAKLITQRKFDNLTKAERGGLSELDKAGFIKRQLVETRQITKHVAQILDSRMNTKYDENDKLIREVKVITLKSKLVSDFRKDFQFYKVREINNYHHAHDAYLNAVVGTALIKKYPKLESEFVYGDYKVYDVRKMIAKSEQEIGKATAKYFFYSNIMNFFKTEITLANGEIRKRPLIETNGETGEIVWDKGRDFATVRKVLSMPQVNIVKKTEVQTGGFSKESILPKRNSDKLIARKKDWDPKKYGGFDSPTVAYSVLVVAKVEKGKSKKLKSVKELLGITIMERSSFEKNPIDFLEAKGYKEVKKDLIIKLPKYSLFELENGRKRMLASAGELQKGNELALPSKYVNFLYLASHYEKLKGSPEDNEQKQLFVEQHKHYLDEIIEQISEFSKRVILADANLDKVLSAYNKHRDKPIREQAENIIHLFTLTNLGAPAAFKYFDTTIDRKRYTSTKEVLDATLIHQSITGLYETRIDLSQLGGDGGGSSGSSGSSGSSGSSGGTLQLDDEYRLYSPLVKPDQNIQFWLEQFPQAWAETAGMGLAKQVPPQVIQLKASATPVSVRQYPLSKEAQEGIRPHVQRLIQQGILVPVQSPWNTPLLPVRKPGTNDYRPVQDLREVNKRVQDIHPTVPNPYNLLCALPPQRSWYTVLDLKDAFFCLRLHPTSQPLFAFEWRDPGTGRTGQLTWTRLPQGFKNSPTIFDEALHRDLANFRIQHPQVTLLQYVDDLLLAGATKQDCLEGTKALLLELSDLGYRASAKKAQICRREVTYLGYSLRDGQRWLTEARKKTVVQIPAPTTAKQVREFLGTAGFCRLWIPGFATLAAPLYPLTKEKGEFSWAPEHQKAFDAIKKALLSAPALALPDVTKPFTLYVDERKGVARGVLTQTLGPWRRPVAYLSKKLDPVASGWPVCLKAIAAVAILVKDADKLTLGQNITVIAPHALENIVRQPPDRWMTNARMTHYQSLLLTERVTFAPPAALNPATLLPEETDEPVTHDCHQLLIEETGVRKDLTDIPLTGEVLTWFTDGSSYVVEGKRMAGAAVVDGTRTIWASSLPEGTSAQKAELMALTQALRLAEGKSINIYTDSRYAFATAHVHGAIYKQRGLLTSAGREIKNKEEILSLLEALHLPKRLAIIHCPGHQKAKDPISRGNQMADRVAKQAAQGVNLLAGKRTADGSEFEKRTADGSEFESPKKKAKVE

SEQ ID NO: 100 - protein, 2085 aa, synthetic construct
  source 1..2085: note = Description of Artificial Sequence: Synthetic polypeptide
MPAAKRVKLDGGDKKYSIGLDIGTNSVGWAVITDEYKVPSKKFKVLGNTDRHSIKKNLIGALLFDSGETAEATRLKRTARRRYTRRKNRICYLQEIFSNEMAKVDDSFFHRLEESFLVEEDKKHERHPIFGNIVDEVAYHEKYPTIYHLRKKLVDSTDKADLRLIYLALAHMIKFRGHFLIEGDLNPDNSDVDKLFIQLVQTYNQLFEENPINASGVDAKAILSARLSKSRRLENLIAQLPGEKKNGLFGNLIALSLGLTPNFKSNFDLAEDAKLQLSKDTYDDDLDNLLAQIGDQYADLFLAAKNLSDAILLSDILRVNTEITKAPLSASMIKRYDEHHQDLTLLKALVRQQLPEKYKEIFFDQSKNGYAGYIDGGASQEEFYKFIKPILEKMDGTEELLVKLNREDLLRKQRTFDNGSIPHQIHLGELHAILRRQEDFYPFLKDNREKIEKILTFRIPYYVGPLARGNSRFAWMTRKSEETITPWNFEEVVDKGASAQSFIERMTNFDKNLPNEKVLPKHSLLYEYFTVYNELTKVKYVTEGMRKPAFLSGEQKKAIVDLLFKTNRKVTVKQLKEDYFKKIECFDSVEISGVEDRFNASLGTYHDLLKIIKDKDFLDNEENEDILEDIVLTLTLFEDREMIEERLKTYAHLFDDKVMKQLKRRRYTGWGRLSRKLINGIRDKQSGKTILDFLKSDGFANRNFMQLIHDDSLTFKEDIQKAQVSGQGDSLHEHIANLAGSPAIKKGILQTVKVVDELVKVMGRHKPENIVIEMARENQTTQKGQKNSRERMKRIEEGIKELGSQILKEHPVENTQLQNEKLYLYYLQNGRDMYVDQELDINRLSDYDVDHIVPQSFLKDDSIDNKVLTRSDKARGKSDNVPSEEVVKKMKNYWRQLLNAKLITQRKFDNLTKAERGGLSELDKAGFIKRQLVETRQITKHVAQILDSRMNTKYDENDKLIREVKVITLKSKLVSDFRKDFQFYKVREINNYHHAHDAYLNAVVGTALIKKYPKLESEFVYGDYKVYDVRKMIAKSEQEIGKATAKYFFYSNIMNFFKTEITLANGEIRKRPLIETNGETGEIVWDKGRDFATVRKVLSMPQVNIVKKTEVQTGGFSKESILPKRNSDKLIARKKDWDPKKYGGFDSPTVAYSVLVVAKVEKGKSKKLKSVKELLGITIMERSSFEKNPIDFLEAKGYKEVKKDLIIKLPKYSLFELENGRKRMLASAGELQKGNELALPSKYVNFLYLASHYEKLKGSPEDNEQKQLFVEQHKHYLDEIIEQISEFSKRVILADANLDKVLSAYNKHRDKPIREQAENIIHLFTLTNLGAPAAFKYFDTTIDRKRYTSTKEVLDATLIHQSITGLYETRIDLSQLGGDGGGGGGSSGGTLQLDDEYRLYSPLVKPDQNIQFWLEQFPQAWAETAGMGLAKQVPPQVIQLKASATPVSVRQYPLSKEAQEGIRPHVQRLIQQGILVPVQSPWNTPLLPVRKPGTNDYRPVQDLREVNKRVQDIHPTVPNPYNLLCALPPQRSWYTVLDLKDAFFCLRLHPTSQPLFAFEWRDPGTGRTGQLTWTRLPQGFKNSPTIFDEALHRDLANFRIQHPQVTLLQYVDDLLLAGATKQDCLEGTKALLLELSDLGYRASAKKAQICRREVTYLGYSLRDGQRWLTEARKKTVVQIPAPTTAKQVREFLGTAGFCRLWIPGFATLAAPLYPLTKEKGEFSWAPEHQKAFDAIKKALLSAPALALPDVTKPFTLYVDERKGVARGVLTQTLGPWRRPVAYLSKKLDPVASGWPVCLKAIAAVAILVKDADKLTLGQNITVIAPHALENIVRQPPDRWMTNARMTHYQSLLLTERVTFAPPAALNPATLLPEETDEPVTHDCHQLLIEETGVRKDLTDIPLTGEVLTWFTDGSSYVVEGKRMAGAAVVDGTRTIWASSLPEGTSAQKAELMALTQALRLAEGKSINIYTDSRYAFATAHVHGAIYKQRGLLTSAGREIKNKEEILSLLEALHLPKRLAIIHCPGHQKAKDPISRGNQMADRVAKQAAQGVNLLAGKRTADGSEFEKRTADGSEFESPKKKAKVE

SEQ ID NO: 101 - protein, 2088 aa, synthetic construct
  source 1..2088: note = Description of Artificial Sequence: Synthetic polypeptide
MPAAKRVKLDGGDKKYSIGLDIGTNSVGWAVITDEYKVPSKKFKVLGNTDRHSIKKNLIGALLFDSGETAEATRLKRTARRRYTRRKNRICYLQEIFSNEMAKVDDSFFHRLEESFLVEEDKKHERHPIFGNIVDEVAYHEKYPTIYHLRKKLVDSTDKADLRLIYLALAHMIKFRGHFLIEGDLNPDNSDVDKLFIQLVQTYNQLFEENPINASGVDAKAILSARLSKSRRLENLIAQLPGEKKNGLFGNLIALSLGLTPNFKSNFDLAEDAKLQLSKDTYDDDLDNLLAQIGDQYADLFLAAKNLSDAILLSDILRVNTEITKAPLSASMIKRYDEHHQDLTLLKALVRQQLPEKYKEIFFDQSKNGYAGYIDGGASQEEFYKFIKPILEKMDGTEELLVKLNREDLLRKQRTFDNGSIPHQIHLGELHAILRRQEDFYPFLKDNREKIEKILTFRIPYYVGPLARGNSRFAWMTRKSEETITPWNFEEVVDKGASAQSFIERMTNFDKNLPNEKVLPKHSLLYEYFTVYNELTKVKYVTEGMRKPAFLSGEQKKAIVDLLFKTNRKVTVKQLKEDYFKKIECFDSVEISGVEDRFNASLGTYHDLLKIIKDKDFLDNEENEDILEDIVLTLTLFEDREMIEERLKTYAHLFDDKVMKQLKRRRYTGWGRLSRKLINGIRDKQSGKTILDFLKSDGFANRNFMQLIHDDSLTFKEDIQKAQVSGQGDSLHEHIANLAGSPAIKKGILQTVKVVDELVKVMGRHKPENIVIEMARENQTTQKGQKNSRERMKRIEEGIKELGSQILKEHPVENTQLQNEKLYLYYLQNGRDMYVDQELDINRLSDYDVDHIVPQSFLKDDSIDNKVLTRSDKARGKSDNVPSEEVVKKMKNYWRQLLNAKLITQRKFDNLTKAERGGLSELDKAGFIKRQLVETRQITKHVAQILDSRMNTKYDENDKLIREVKVITLKSKLVSDFRKDFQFYKVREINNYHHAHDAYLNAVVGTALIKKYPKLESEFVYGDYKVYDVRKMIAKSEQEIGKATAKYFFYSNIMNFFKTEITLANGEIRKRPLIETNGETGEIVWDKGRDFATVRKVLSMPQVNIVKKTEVQTGGFSKESILPKRNSDKLIARKKDWDPKKYGGFDSPTVAYSVLVVAKVEKGKSKKLKSVKELLGITIMERSSFEKNPIDFLEAKGYKEVKKDLIIKLPKYSLFELENGRKRMLASAGELQKGNELALPSKYVNFLYLASHYEKLKGSPEDNEQKQLFVEQHKHYLDEIIEQISEFSKRVILADANLDKVLSAYNKHRDKPIREQAENIIHLFTLTNLGAPAAFKYFDTTIDRKRYTSTKEVLDATLIHQSITGLYETRIDLSQLGGDGGGSSGGSPAPGGTLQLDDEYRLYSPLVKPDQNIQFWLEQFPQAWAETAGMGLAKQVPPQVIQLKASATPVSVRQYPLSKEAQEGIRPHVQRLIQQGILVPVQSPWNTPLLPVRKPGTNDYRPVQDLREVNKRVQDIHPTVPNPYNLLCALPPQRSWYTVLDLKDAFFCLRLHPTSQPLFAFEWRDPGTGRTGQLTWTRLPQGFKNSPTIFDEALHRDLANFRIQHPQVTLLQYVDDLLLAGATKQDCLEGTKALLLELSDLGYRASAKKAQICRREVTYLGYSLRDGQRWLTEARKKTVVQIPAPTTAKQVREFLGTAGFCRLWIPGFATLAAPLYPLTKEKGEFSWAPEHQKAFDAIKKALLSAPALALPDVTKPFTLYVDERKGVARGVLTQTLGPWRRPVAYLSKKLDPVASGWPVCLKAIAAVAILVKDADKLTLGQNITVIAPHALENIVRQPPDRWMTNARMTHYQSLLLTERVTFAPPAALNPATLLPEETDEPVTHDCHQLLIEETGVRKDLTDIPLTGEVLTWFTDGSSYVVEGKRMAGAAVVDGTRTIWASSLPEGTSAQKAELMALTQALRLAEGKSINIYTDSRYAFATAHVHGAIYKQRGLLTSAGREIKNKEEILSLLEALHLPKRLAIIHCPGHQKAKDPISRGNQMADRVAKQAAQGVNLLAGKRTADGSEFEKRTADGSEFESPKKKAKVE

SEQ ID NO: 102 - protein, 2089 aa, synthetic construct
  source 1..2089: note = Description of Artificial Sequence: Synthetic polypeptide
MPAAKRVKLDGGDKKYSIGLDIGTNSVGWAVITDEYKVPSKKFKVLGNTDRHSIKKNLIGALLFDSGETAEATRLKRTARRRYTRRKNRICYLQEIFSNEMAKVDDSFFHRLEESFLVEEDKKHERHPIFGNIVDEVAYHEKYPTIYHLRKKLVDSTDKADLRLIYLALAHMIKFRGHFLIEGDLNPDNSDVDKLFIQLVQTYNQLFEENPINASGVDAKAILSARLSKSRRLENLIAQLPGEKKNGLFGNLIALSLGLTPNFKSNFDLAEDAKLQLSKDTYDDDLDNLLAQIGDQYADLFLAAKNLSDAILLSDILRVNTEITKAPLSASMIKRYDEHHQDLTLLKALVRQQLPEKYKEIFFDQSKNGYAGYIDGGASQEEFYKFIKPILEKMDGTEELLVKLNREDLLRKQRTFDNGSIPHQIHLGELHAILRRQEDFYPFLKDNREKIEKILTFRIPYYVGPLARGNSRFAWMTRKSEETITPWNFEEVVDKGASAQSFIERMTNFDKNLPNEKVLPKHSLLYEYFTVYNELTKVKYVTEGMRKPAFLSGEQKKAIVDLLFKTNRKVTVKQLKEDYFKKIECFDSVEISGVEDRFNASLGTYHDLLKIIKDKDFLDNEENEDILEDIVLTLTLFEDREMIEERLKTYAHLFDDKVMKQLKRRRYTGWGRLSRKLINGIRDKQSGKTILDFLKSDGFANRNFMQLIHDDSLTFKEDIQKAQVSGQGDSLHEHIANLAGSPAIKKGILQTVKVVDELVKVMGRHKPENIVIEMARENQTTQKGQKNSRERMKRIEEGIKELGSQILKEHPVENTQLQNEKLYLYYLQNGRDMYVDQELDINRLSDYDVDHIVPQSFLKDDSIDNKVLTRSDKARGKSDNVPSEEVVKKMKNYWRQLLNAKLITQRKFDNLTKAERGGLSELDKAGFIKRQLVETRQITKHVAQILDSRMNTKYDENDKLIREVKVITLKSKLVSDFRKDFQFYKVREINNYHHAHDAYLNAVVGTALIKKYPKLESEFVYGDYKVYDVRKMIAKSEQEIGKATAKYFFYSNIMNFFKTEITLANGEIRKRPLIETNGETGEIVWDKGRDFATVRKVLSMPQVNIVKKTEVQTGGFSKESILPKRNSDKLIARKKDWDPKKYGGFDSPTVAYSVLVVAKVEKGKSKKLKSVKELLGITIMERSSFEKNPIDFLEAKGYKEVKKDLIIKLPKYSLFELENGRKRMLASAGELQKGNELALPSKYVNFLYLASHYEKLKGSPEDNEQKQLFVEQHKHYLDEIIEQISEFSKRVILADANLDKVLSAYNKHRDKPIREQAENIIHLFTLTNLGAPAAFKYFDTTIDRKRYTSTKEVLDATLIHQSITGLYETRIDLSQLGGDGGGGGGSGGGGSGGTLQLDDEYRLYSPLVKPDQNIQFWLEQFPQAWAETAGMGLAKQVPPQVIQLKASATPVSVRQYPLSKEAQEGIRPHVQRLIQQGILVPVQSPWNTPLLPVRKPGTNDYRPVQDLREVNKRVQDIHPTVPNPYNLLCALPPQRSWYTVLDLKDAFFCLRLHPTSQPLFAFEWRDPGTGRTGQLTWTRLPQGFKNSPTIFDEALHRDLANFRIQHPQVTLLQYVDDLLLAGATKQDCLEGTKALLLELSDLGYRASAKKAQICRREVTYLGYSLRDGQRWLTEARKKTVVQIPAPTTAKQVREFLGTAGFCRLWIPGFATLAAPLYPLTKEKGEFSWAPEHQKAFDAIKKALLSAPALALPDVTKPFTLYVDERKGVARGVLTQTLGPWRRPVAYLSKKLDPVASGWPVCLKAIAAVAILVKDADKLTLGQNITVIAPHALENIVRQPPDRWMTNARMTHYQSLLLTERVTFAPPAALNPATLLPEETDEPVTHDCHQLLIEETGVRKDLTDIPLTGEVLTWFTDGSSYVVEGKRMAGAAVVDGTRTIWASSLPEGTSAQKAELMALTQALRLAEGKSINIYTDSRYAFATAHVHGAIYKQRGLLTSAGREIKNKEEILSLLEALHLPKRLAIIHCPGHQKAKDPISRGNQMADRVAKQAAQGVNLLAGKRTADGSEFEKRTADGSEFESPKKKAKVE

SEQ ID NO: 103 - protein, 2091 aa, synthetic construct
  source 1..2091: note = Description of Artificial Sequence: Synthetic polypeptide
MPAAKRVKLDGGDKKYSIGLDIGTNSVGWAVITDEYKVPSKKFKVLGNTDRHSIKKNLIGALLFDSGETAEATRLKRTARRRYTRRKNRICYLQEIFSNEMAKVDDSFFHRLEESFLVEEDKKHERHPIFGNIVDEVAYHEKYPTIYHLRKKLVDSTDKADLRLIYLALAHMIKFRGHFLIEGDLNPDNSDVDKLFIQLVQTYNQLFEENPINASGVDAKAILSARLSKSRRLENLIAQLPGEKKNGLFGNLIALSLGLTPNFKSNFDLAEDAKLQLSKDTYDDDLDNLLAQIGDQYADLFLAAKNLSDAILLSDILRVNTEITKAPLSASMIKRYDEHHQDLTLLKALVRQQLPEKYKEIFFDQSKNGYAGYIDGGASQEEFYKFIKPILEKMDGTEELLVKLNREDLLRKQRTFDNGSIPHQIHLGELHAILRRQEDFYPFLKDNREKIEKILTFRIPYYVGPLARGNSRFAWMTRKSEETITPWNFEEVVDKGASAQSFIERMTNFDKNLPNEKVLPKHSLLYEYFTVYNELTKVKYVTEGMRKPAFLSGEQKKAIVDLLFKTNRKVTVKQLKEDYFKKIECFDSVEISGVEDRFNASLGTYHDLLKIIKDKDFLDNEENEDILEDIVLTLTLFEDREMIEERLKTYAHLFDDKVMKQLKRRRYTGWGRLSRKLINGIRDKQSGKTILDFLKSDGFANRNFMQLIHDDSLTFKEDIQKAQVSGQGDSLHEHIANLAGSPAIKKGILQTVKVVDELVKVMGRHKPENIVIEMARENQTTQKGQKNSRERMKRIEEGIKELGSQILKEHPVENTQLQNEKLYLYYLQNGRDMYVDQELDINRLSDYDVDHIVPQSFLKDDSIDNKVLTRSDKARGKSDNVPSEEVVKKMKNYWRQLLNAKLITQRKFDNLTKAERGGLSELDKAGFIKRQLVETRQITKHVAQILDSRMNTKYDENDKLIREVKVITLKSKLVSDFRKDFQFYKVREINNYHHAHDAYLNAVVGTALIKKYPKLESEFVYGDYKVYDVRKMIAKSEQEIGKATAKYFFYSNIMNFFKTEITLANGEIRKRPLIETNGETGEIVWDKGRDFATVRKVLSMPQVNIVKKTEVQTGGFSKESILPKRNSDKLIARKKDWDPKKYGGFDSPTVAYSVLVVAKVEKGKSKKLKSVKELLGITIMERSSFEKNPIDFLEAKGYKEVKKDLIIKLPKYSLFELENGRKRMLASAGELQKGNELALPSKYVNFLYLASHYEKLKGSPEDNEQKQLFVEQHKHYLDEIIEQISEFSKRVILADANLDKVLSAYNKHRDKPIREQAENIIHLFTLTNLGAPAAFKYFDTTIDRKRYTSTKEVLDATLIHQSITGLYETRIDLSQLGGDGGGSSGSSGSSGSSGGTLQLDDEYRLYSPLVKPDQNIQFWLEQFPQAWAETAGMGLAKQVPPQVIQLKASATPVSVRQYPLSKEAQEGIRPHVQRLIQQGILVPVQSPWNTPLLPVRKPGTNDYRPVQDLREVNKRVQDIHPTVPNPYNLLCALPPQRSWYTVLDLKDAFFCLRLHPTSQPLFAFEWRDPGTGRTGQLTWTRLPQGFKNSPTIFDEALHRDLANFRIQHPQVTLLQYVDDLLLAGATKQDCLEGTKALLLELSDLGYRASAKKAQICRREVTYLGYSLRDGQRWLTEARKKTVVQIPAPTTAKQVREFLGTAGFCRLWIPGFATLAAPLYPLTKEKGEFSWAPEHQKAFDAIKKALLSAPALALPDVTKPFTLYVDERKGVARGVLTQTLGPWRRPVAYLSKKLDPVASGWPVCLKAIAAVAILVKDADKLTLGQNITVIAPHALENIVRQPPDRWMTNARMTHYQSLLLTERVTFAPPAALNPATLLPEETDEPVTHDCHQLLIEETGVRKDLTDIPLTGEVLTWFTDGSSYVVEGKRMAGAAVVDGTRTIWASSLPEGTSAQKAELMALTQALRLAEGKSINIYTDSRYAFATAHVHGAIYKQRGLLTSAGREIKNKEEILSLLEALHLPKRLAIIHCPGHQKAKDPISRGNQMADRVAKQAAQGVNLLAGKRTADGSEFEKRTADGSEFESPKKKAKVE

SEQ ID NO: 104 - protein, 2090 aa, synthetic construct
  source 1..2090: note = Description of Artificial Sequence: Synthetic polypeptide
MPAAKRVKLDGGDKKYSIGLDIGTNSVGWAVITDEYKVPSKKFKVLGNTDRHSIKKNLIGALLFDSGETAEATRLKRTARRRYTRRKNRICYLQEIFSNEMAKVDDSFFHRLEESFLVEEDKKHERHPIFGNIVDEVAYHEKYPTIYHLRKKLVDSTDKADLRLIYLALAHMIKFRGHFLIEGDLNPDNSDVDKLFIQLVQTYNQLFEENPINASGVDAKAILSARLSKSRRLENLIAQLPGEKKNGLFGNLIALSLGLTPNFKSNFDLAEDAKLQLSKDTYDDDLDNLLAQIGDQYADLFLAAKNLSDAILLSDILRVNTEITKAPLSASMIKRYDEHHQDLTLLKALVRQQLPEKYKEIFFDQSKNGYAGYIDGGASQEEFYKFIKPILEKMDGTEELLVKLNREDLLRKQRTFDNGSIPHQIHLGELHAILRRQEDFYPFLKDNREKIEKILTFRIPYYVGPLARGNSRFAWMTRKSEETITPWNFEEVVDKGASAQSFIERMTNFDKNLPNEKVLPKHSLLYEYFTVYNELTKVKYVTEGMRKPAFLSGEQKKAIVDLLFKTNRKVTVKQLKEDYFKKIECFDSVEISGVEDRFNASLGTYHDLLKIIKDKDFLDNEENEDILEDIVLTLTLFEDREMIEERLKTYAHLFDDKVMKQLKRRRYTGWGRLSRKLINGIRDKQSGKTILDFLKSDGFANRNFMQLIHDDSLTFKEDIQKAQVSGQGDSLHEHIANLAGSPAIKKGILQTVKVVDELVKVMGRHKPENIVIEMARENQTTQKGQKNSRERMKRIEEGIKELGSQILKEHPVENTQLQNEKLYLYYLQNGRDMYVDQELDINRLSDYDVDHIVPQSFLKDDSIDNKVLTRSDKARGKSDNVPSEEVVKKMKNYWRQLLNAKLITQRKFDNLTKAERGGLSELDKAGFIKRQLVETRQITKHVAQILDSRMNTKYDENDKLIREVKVITLKSKLVSDFRKDFQFYKVREINNYHHAHDAYLNAVVGTALIKKYPKLESEFVYGDYKVYDVRKMIAKSEQEIGKATAKYFFYSNIMNFFKTEITLANGEIRKRPLIETNGETGEIVWDKGRDFATVRKVLSMPQVNIVKKTEVQTGGFSKESILPKRNSDKLIARKKDWDPKKYGGFDSPTVAYSVLVVAKVEKGKSKKLKSVKELLGITIMERSSFEKNPIDFLEAKGYKEVKKDLIIKLPKYSLFELENGRKRMLASAGELQKGNELALPSKYVNFLYLASHYEKLKGSPEDNEQKQLFVEQHKHYLDEIIEQISEFSKRVILADANLDKVLSAYNKHRDKPIREQAENIIHLFTLTNLGAPAAFKYFDTTIDRKRYTSTKEVLDATLIHQSITGLYETRIDLSQLGGDGGPAPGSSEAAAKGGTLQLDDEYRLYSPLVKPDQNIQFWLEQFPQAWAETAGMGLAKQVPPQVIQLKASATPVSVRQYPLSKEAQEGIRPHVQRLIQQGILVPVQSPWNTPLLPVRKPGTNDYRPVQDLREVNKRVQDIHPTVPNPYNLLCALPPQRSWYTVLDLKDAFFCLRLHPTSQPLFAFEWRDPGTGRTGQLTWTRLPQGFKNSPTIFDEALHRDLANFRIQHPQVTLLQYVDDLLLAGATKQDCLEGTKALLLELSDLGYRASAKKAQICRREVTYLGYSLRDGQRWLTEARKKTVVQIPAPTTAKQVREFLGTAGFCRLWIPGFATLAAPLYPLTKEKGEFSWAPEHQKAFDAIKKALLSAPALALPDVTKPFTLYVDERKGVARGVLTQTLGPWRRPVAYLSKKLDPVASGWPVCLKAIAAVAILVKDADKLTLGQNITVIAPHALENIVRQPPDRWMTNARMTHYQSLLLTERVTFAPPAALNPATLLPEETDEPVTHDCHQLLIEETGVRKDLTDIPLTGEVLTWFTDGSSYVVEGKRMAGAAVVDGTRTIWASSLPEGTSAQKAELMALTQALRLAEGKSINIYTDSRYAFATAHVHGAIYKQRGLLTSAGREIKNKEEILSLLEALHLPKRLAIIHCPGHQKAKDPISRGNQMADRVAKQAAQGVNLLAGKRTADGSEFEKRTADGSEFESPKKKAKVE

SEQ ID NO: 105 - protein, 2085 aa, synthetic construct
  source 1..2085: note = Description of Artificial Sequence: Synthetic polypeptide
MPAAKRVKLDGGDKKYSIGLDIGTNSVGWAVITDEYKVPSKKFKVLGNTDRHSIKKNLIGALLFDSGETAEATRLKRTARRRYTRRKNRICYLQEIFSNEMAKVDDSFFHRLEESFLVEEDKKHERHPIFGNIVDEVAYHEKYPTIYHLRKKLVDSTDKADLRLIYLALAHMIKFRGHFLIEGDLNPDNSDVDKLFIQLVQTYNQLFEENPINASGVDAKAILSARLSKSRRLENLIAQLPGEKKNGLFGNLIALSLGLTPNFKSNFDLAEDAKLQLSKDTYDDDLDNLLAQIGDQYADLFLAAKNLSDAILLSDILRVNTEITKAPLSASMIKRYDEHHQDLTLLKALVRQQLPEKYKEIFFDQSKNGYAGYIDGGASQEEFYKFIKPILEKMDGTEELLVKLNREDLLRKQRTFDNGSIPHQIHLGELHAILRRQEDFYPFLKDNREKIEKILTFRIPYYVGPLARGNSRFAWMTRKSEETITPWNFEEVVDKGASAQSFIERMTNFDKNLPNEKVLPKHSLLYEYFTVYNELTKVKYVTEGMRKPAFLSGEQKKAIVDLLFKTNRKVTVKQLKEDYFKKIECFDSVEISGVEDRFNASLGTYHDLLKIIKDKDFLDNEENEDILEDIVLTLTLFEDREMIEERLKTYAHLFDDKVMKQLKRRRYTGWGRLSRKLINGIRDKQSGKTILDFLKSDGFANRNFMQLIHDDSLTFKEDIQKAQVSGQGDSLHEHIANLAGSPAIKKGILQTVKVVDELVKVMGRHKPENIVIEMARENQTTQKGQKNSRERMKRIEEGIKELGSQILKEHPVENTQLQNEKLYLYYLQNGRDMYVDQELDINRLSDYDVDHIVPQSFLKDDSIDNKVLTRSDKARGKSDNVPSEEVVKKMKNYWRQLLNAKLITQRKFDNLTKAERGGLSELDKAGFIKRQLVETRQITKHVAQILDSRMNTKYDENDKLIREVKVITLKSKLVSDFRKDFQFYKVREINNYHHAHDAYLNAVVGTALIKKYPKLESEFVYGDYKVYDVRKMIAKSEQEIGKATAKYFFYSNIMNFFKTEITLANGEIRKRPLIETNGETGEIVWDKGRDFATVRKVLSMPQVNIVKKTEVQTGGFSKESILPKRNSDKLIARKKDWDPKKYGGFDSPTVAYSVLVVAKVEKGKSKKLKSVKELLGITIMERSSFEKNPIDFLEAKGYKEVKKDLIIKLPKYSLFELENGRKRMLASAGELQKGNELALPSKYVNFLYLASHYEKLKGSPEDNEQKQLFVEQHKHYLDEIIEQISEFSKRVILADANLDKVLSAYNKHRDKPIREQAENIIHLFTLTNLGAPAAFKYFDTTIDRKRYTSTKEVLDATLIHQSITGLYETRIDLSQLGGDGGGGSGSSGGTLQLDDEYRLYSPLVKPDQNIQFWLEQFPQAWAETAGMGLAKQVPPQVIQLKASATPVSVRQYPLSKEAQEGIRPHVQRLIQQGILVPVQSPWNTPLLPVRKPGTNDYRPVQDLREVNKRVQDIHPTVPNPYNLLCALPPQRSWYTVLDLKDAFFCLRLHPTSQPLFAFEWRDPGTGRTGQLTWTRLPQGFKNSPTIFDEALHRDLANFRIQHPQVTLLQYVDDLLLAGATKQDCLEGTKALLLELSDLGYRASAKKAQICRREVTYLGYSLRDGQRWLTEARKKTVVQIPAPTTAKQVREFLGTAGFCRLWIPGFATLAAPLYPLTKEKGEFSWAPEHQKAFDAIKKALLSAPALALPDVTKPFTLYVDERKGVARGVLTQTLGPWRRPVAYLSKKLDPVASGWPVCLKAIAAVAILVKDADKLTLGQNITVIAPHALENIVRQPPDRWMTNARMTHYQSLLLTERVTFAPPAALNPATLLPEETDEPVTHDCHQLLIEETGVRKDLTDIPLTGEVLTWFTDGSSYVVEGKRMAGAAVVDGTRTIWASSLPEGTSAQKAELMALTQALRLAEGKSINIYTDSRYAFATAHVHGAIYKQRGLLTSAGREIKNKEEILSLLEALHLPKRLAIIHCPGHQKAKDPISRGNQMADRVAKQAAQGVNLLAGKRTADGSEFEKRTADGSEFESPKKKAKVE

SEQ ID NO: 106 - protein, 2088 aa, synthetic construct
  source 1..2088: note = Description of Artificial Sequence: Synthetic polypeptide
MPAAKRVKLDGGDKKYSIGLDIGTNSVGWAVITDEYKVPSKKFKVLGNTDRHSIKKNLIGALLFDSGETAEATRLKRTARRRYTRRKNRICYLQEIFSNEMAKVDDSFFHRLEESFLVEEDKKHERHPIFGNIVDEVAYHEKYPTIYHLRKKLVDSTDKADLRLIYLALAHMIKFRGHFLIEGDLNPDNSDVDKLFIQLVQTYNQLFEENPINASGVDAKAILSARLSKSRRLENLIAQLPGEKKNGLFGNLIALSLGLTPNFKSNFDLAEDAKLQLSKDTYDDDLDNLLAQIGDQYADLFLAAKNLSDAILLSDILRVNTEITKAPLSASMIKRYDEHHQDLTLLKALVRQQLPEKYKEIFFDQSKNGYAGYIDGGASQEEFYKFIKPILEKMDGTEELLVKLNREDLLRKQRTFDNGSIPHQIHLGELHAILRRQEDFYPFLKDNREKIEKILTFRIPYYVGPLARGNSRFAWMTRKSEETITPWNFEEVVDKGASAQSFIERMTNFDKNLPNEKVLPKHSLLYEYFTVYNELTKVKYVTEGMRKPAFLSGEQKKAIVDLLFKTNRKVTVKQLKEDYFKKIECFDSVEISGVEDRFNASLGTYHDLLKIIKDKDFLDNEENEDILEDIVLTLTLFEDREMIEERLKTYAHLFDDKVMKQLKRRRYTGWGRLSRKLINGIRDKQSGKTILDFLKSDGFANRNFMQLIHDDSLTFKEDIQKAQVSGQGDSLHEHIANLAGSPAIKKGILQTVKVVDELVKVMGRHKPENIVIEMARENQTTQKGQKNSRERMKRIEEGIKELGSQILKEHPVENTQLQNEKLYLYYLQNGRDMYVDQELDINRLSDYDVDHIVPQSFLKDDSIDNKVLTRSDKARGKSDNVPSEEVVKKMKNYWRQLLNAKLITQRKFDNLTKAERGGLSELDKAGFIKRQLVETRQITKHVAQILDSRMNTKYDENDKLIREVKVITLKSKLVSDFRKDFQFYKVREINNYHHAHDAYLNAVVGTALIKKYPKLESEFVYGDYKVYDVRKMIAKSEQEIGKATAKYFFYSNIMNFFKTEITLANGEIRKRPLIETNGETGEIVWDKGRDFATVRKVLSMPQVNIVKKTEVQTGGFSKESILPKRNSDKLIARKKDWDPKKYGGFDSPTVAYSVLVVAKVEKGKSKKLKSVKELLGITIMERSSFEKNPIDFLEAKGYKEVKKDLIIKLPKYSLFELENGRKRMLASAGELQKGNELALPSKYVNFLYLASHYEKLKGSPEDNEQKQLFVEQHKHYLDEIIEQISEFSKRVILADANLDKVLSAYNKHRDKPIREQAENIIHLFTLTNLGAPAAFKYFDTTIDRKRYTSTKEVLDATLIHQSITGLYETRIDLSQLGGDGGPAPGSSGGGGGTLQLDDEYRLYSPLVKPDQNIQFWLEQFPQAWAETAGMGLAKQVPPQVIQLKASATPVSVRQYPLSKEAQEGIRPHVQRLIQQGILVPVQSPWNTPLLPVRKPGTNDYRPVQDLREVNKRVQDIHPTVPNPYNLLCALPPQRSWYTVLDLKDAFFCLRLHPTSQPLFAFEWRDPGTGRTGQLTWTRLPQGFKNSPTIFDEALHRDLANFRIQHPQVTLLQYVDDLLLAGATKQDCLEGTKALLLELSDLGYRASAKKAQICRREVTYLGYSLRDGQRWLTEARKKTVVQIPAPTTAKQVREFLGTAGFCRLWIPGFATLAAPLYPLTKEKGEFSWAPEHQKAFDAIKKALLSAPALALPDVTKPFTLYVDERKGVARGVLTQTLGPWRRPVAYLSKKLDPVASGWPVCLKAIAAVAILVKDADKLTLGQNITVIAPHALENIVRQPPDRWMTNARMTHYQSLLLTERVTFAPPAALNPATLLPEETDEPVTHDCHQLLIEETGVRKDLTDIPLTGEVLTWFTDGSSYVVEGKRMAGAAVVDGTRTIWASSLPEGTSAQKAELMALTQALRLAEGKSINIYTDSRYAFATAHVHGAIYKQRGLLTSAGREIKNKEEILSLLEALHLPKRLAIIHCPGHQKAKDPISRGNQMADRVAKQAAQGVNLLAGKRTADGSEFEKRTADGSEFESPKKKAKVE

SEQ ID NO: 107 - protein, 2088 aa, synthetic construct
  source 1..2088: note = Description of Artificial Sequence: Synthetic polypeptide
MPAAKRVKLDGGDKKYSIGLDIGTNSVGWAVITDEYKVPSKKFKVLGNTDRHSIKKNLIGALLFDSGETAEATRLKRTARRRYTRRKNRICYLQEIFSNEMAKVDDSFFHRLEESFLVEEDKKHERHPIFGNIVDEVAYHEKYPTIYHLRKKLVDSTDKADLRLIYLALAHMIKFRGHFLIEGDLNPDNSDVDKLFIQLVQTYNQLFEENPINASGVDAKAILSARLSKSRRLENLIAQLPGEKKNGLFGNLIALSLGLTPNFKSNFDLAEDAKLQLSKDTYDDDLDNLLAQIGDQYADLFLAAKNLSDAILLSDILRVNTEITKAPLSASMIKRYDEHHQDLTLLKALVRQQLPEKYKEIFFDQSKNGYAGYIDGGASQEEFYKFIKPILEKMDGTEELLVKLNREDLLRKQRTFDNGSIPHQIHLGELHAILRRQEDFYPFLKDNREKIEKILTFRIPYYVGPLARGNSRFAWMTRKSEETITPWNFEEVVDKGASAQSFIERMTNFDKNLPNEKVLPKHSLLYEYFTVYNELTKVKYVTEGMRKPAFLSGEQKKAIVDLLFKTNRKVTVKQLKEDYFKKIECFDSVEISGVEDRFNASLGTYHDLLKIIKDKDFLDNEENEDILEDIVLTLTLFEDREMIEERLKTYAHLFDDKVMKQLKRRRYTGWGRLSRKLINGIRDKQSGKTILDFLKSDGFANRNFMQLIHDDSLTFKEDIQKAQVSGQGDSLHEHIANLAGSPAIKKGILQTVKVVDELVKVMGRHKPENIVIEMARENQTTQKGQKNSRERMKRIEEGIKELGSQILKEHPVENTQLQNEKLYLYYLQNGRDMYVDQELDINRLSDYDVDHIVPQSFLKDDSIDNKVLTRSDKARGKSDNVPSEEVVKKMKNYWRQLLNAKLITQRKFDNLTKAERGGLSELDKAGFIKRQLVETRQITKHVAQILDSRMNTKYDENDKLIREVKVITLKSKLVSDFRKDFQFYKVREINNYHHAHDAYLNAVVGTALIKKYPKLESEFVYGDYKVYDVRKMIAKSEQEIGKATAKYFFYSNIMNFFKTEITLANGEIRKRPLIETNGETGEIVWDKGRDFATVRKVLSMPQVNIVKKTEVQTGGFSKESILPKRNSDKLIARKKDWDPKKYGGFDSPTVAYSVLVVAKVEKGKSKKLKSVKELLGITIMERSSFEKNPIDFLEAKGYKEVKKDLIIKLPKYSLFELENGRKRMLASAGELQKGNELALPSKYVNFLYLASHYEKLKGSPEDNEQKQLFVEQHKHYLDEIIEQISEFSKRVILADANLDKVLSAYNKHRDKPIREQAENIIHLFTLTNLGAPAAFKYFDTTIDRKRYTSTKEVLDATLIHQSITGLYETRIDLSQLGGDGGGGGPAPGSSGGTLQLDDEYRLYSPLVKPDQNIQFWLEQFPQAWAETAGMGLAKQVPPQVIQLKASATPVSVRQYPLSKEAQEGIRPHVQRLIQQGILVPVQSPWNTPLLPVRKPGTNDYRPVQDLREVNKRVQDIHPTVPNPYNLLCALPPQRSWYTVLDLKDAFFCLRLHPTSQPLFAFEWRDPGTGRTGQLTWTRLPQGFKNSPTIFDEALHRDLANFRIQHPQVTLLQYVDDLLLAGATKQDCLEGTKALLLELSDLGYRASAKKAQICRREVTYLGYSLRDGQRWLTEARKKTVVQIPAPTTAKQVREFLGTAGFCRLWIPGFATLAAPLYPLTKEKGEFSWAPEHQKAFDAIKKALLSAPALALPDVTKPFTLYVDERKGVARGVLTQTLGPWRRPVAYLSKKLDPVASGWPVCLKAIAAVAILVKDADKLTLGQNITVIAPHALENIVRQPPDRWMTNARMTHYQSLLLTERVTFAPPAALNPATLLPEETDEPVTHDCHQLLIEETGVRKDLTDIPLTGEVLTWFTDGSSYVVEGKRMAGAAVVDGTRTIWASSLPEGTSAQKAELMALTQALRLAEGKSINIYTDSRYAFATAHVHGAIYKQRGLLTSAGREIKNKEEILSLLEALHLPKRLAIIHCPGHQKAKDPISRGNQMADRVAKQAAQGVNLLAGKRTADGSEFEKRTADGSEFESPKKKAKVE

SEQ ID NO: 108 - protein, 2090 aa, synthetic construct
  source 1..2090: note = Description of Artificial Sequence: Synthetic polypeptide
MPAAKRVKLDGGDKKYSIGLDIGTNSVGWAVITDEYKVPSKKFKVLGNTDRHSIKKNLIGALLFDSGETAEATRLKRTARRRYTRRKNRICYLQEIFSNEMAKVDDSFFHRLEESFLVEEDKKHERHPIFGNIVDEVAYHEKYPTIYHLRKKLVDSTDKADLRLIYLALAHMIKFRGHFLIEGDLNPDNSDVDKLFIQLVQTYNQLFEENPINASGVDAKAILSARLSKSRRLENLIAQLPGEKKNGLFGNLIALSLGLTPNFKSNFDLAEDAKLQLSKDTYDDDLDNLLAQIGDQYADLFLAAKNLSDAILLSDILRVNTEITKAPLSASMIKRYDEHHQDLTLLKALVRQQLPEKYKEIFFDQSKNGYAGYIDGGASQEEFYKFIKPILEKMDGTEELLVKLNREDLLRKQRTFDNGSIPHQIHLGELHAILRRQEDFYPFLKDNREKIEKILTFRIPYYVGPLARGNSRFAWMTRKSEETITPWNFEEVVDKGASAQSFIERMTNFDKNLPNEKVLPKHSLLYEYFTVYNELTKVKYVTEGMRKPAFLSGEQKKAIVDLLFKTNRKVTVKQLKEDYFKKIECFDSVEISGVEDRFNASLGTYHDLLKIIKDKDFLDNEENEDILEDIVLTLTLFEDREMIEERLKTYAHLFDDKVMKQLKRRRYTGWGRLSRKLINGIRDKQSGKTILDFLKSDGFANRNFMQLIHDDSLTFKEDIQKAQVSGQGDSLHEHIANLAGSPAIKKGILQTVKVVDELVKVMGRHKPENIVIEMARENQTTQKGQKNSRERMKRIEEGIKELGSQILKEHPVENTQLQNEKLYLYYLQNGRDMYVDQELDINRLSDYDVDHIVPQSFLKDDSIDNKVLTRSDKARGKSDNVPSEEVVKKMKNYWRQLLNAKLITQRKFDNLTKAERGGLSELDKAGFIKRQLVETRQITKHVAQILDSRMNTKYDENDKLIREVKVITLKSKLVSDFRKDFQFYKVREINNYHHAHDAYLNAVVGTALIKKYPKLESEFVYGDYKVYDVRKMIAKSEQEIGKATAKYFFYSNIMNFFKTEITLANGEIRKRPLIETNGETGEIVWDKGRDFATVRKVLSMPQVNIVKKTEVQTGGFSKESILPKRNSDKLIARKKDWDPKKYGGFDSPTVAYSVLVVAKVEKGKSKKLKSVKELLGITIMERSSFEKNPIDFLEAKGYKEVKKDLIIKLPKYSLFELENGRKRMLASAGELQKGNELALPSKYVNFLYLASHYEKLKGSPEDNEQKQLFVEQHKHYLDEIIEQISEFSKRVILADANLDKVLSAYNKHRDKPIREQAENIIHLFTLTNLGAPAAFKYFDTTIDRKRYTSTKEVLDATLIHQSITGLYETRIDLSQLGGDGGGGGEAAAKPAPGGTLQLDDEYRLYSPLVKPDQNIQFWLEQFPQAWAETAGMGLAKQVPPQVIQLKASATPVSVRQYPLSKEAQEGIRPHVQRLIQQGILVPVQSPWNTPLLPVRKPGTNDYRPVQDLREVNKRVQDIHPTVPNPYNLLCALPPQRSWYTVLDLKDAFFCLRLHPTSQPLFAFEWRDPGTGRTGQLTWTRLPQGFKNSPTIFDEALHRDLANFRIQHPQVTLLQYVDDLLLAGATKQDCLEGTKALLLELSDLGYRASAKKAQICRREVTYLGYSLRDGQRWLTEARKKTVVQIPAPTTAKQVREFLGTAGFCRLWIPGFATLAAPLYPLTKEKGEFSWAPEHQKAFDAIKKALLSAPALALPDVTKPFTLYVDERKGVARGVLTQTLGPWRRPVAYLSKKLDPVASGWPVCLKAIAAVAILVKDADKLTLGQNITVIAPHALENIVRQPPDRWMTNARMTHYQSLLLTERVTFAPPAALNPATLLPEETDEPVTHDCHQLLIEETGVRKDLTDIPLTGEVLTWFTDGSSYVVEGKRMAGAAVVDGTRTIWASSLPEGTSAQKAELMALTQALRLAEGKSINIYTDSRYAFATAHVHGAIYKQRGLLTSAGREIKNKEEILSLLEALHLPKRLAIIHCPGHQKAKDPISRGNQMADRVAKQAAQGVNLLAGKRTADGSEFEKRTADGSEFESPKKKAKVE

SEQ ID NO: 109 - protein, 2085 aa, synthetic construct
  source 1..2085: note = Description of Artificial Sequence: Synthetic polypeptide
MPAAKRVKLDGGDKKYSIGLDIGTNSVGWAVITDEYKVPSKKFKVLGNTDRHSIKKNLIGALLFDSGETAEATRLKRTARRRYTRRKNRICYLQEIFSNEMAKVDDSFFHRLEESFLVEEDKKHERHPIFGNIVDEVAYHEKYPTIYHLRKKLVDSTDKADLRLIYLALAHMIKFRGHFLIEGDLNPDNSDVDKLFIQLVQTYNQLFEENPINASGVDAKAILSARLSKSRRLENLIAQLPGEKKNGLFGNLIALSLGLTPNFKSNFDLAEDAKLQLSKDTYDDDLDNLLAQIGDQYADLFLAAKNLSDAILLSDILRVNTEITKAPLSASMIKRYDEHHQDLTLLKALVRQQLPEKYKEIFFDQSKNGYAGYIDGGASQEEFYKFIKPILEKMDGTEELLVKLNREDLLRKQRTFDNGSIPHQIHLGELHAILRRQEDFYPFLKDNREKIEKILTFRIPYYVGPLARGNSRFAWMTRKSEETITPWNFEEVVDKGASAQSFIERMTNFDKNLPNEKVLPKHSLLYEYFTVYNELTKVKYVTEGMRKPAFLSGEQKKAIVDLLFKTNRKVTVKQLKEDYFKKIECFDSVEISGVEDRFNASLGTYHDLLKIIKDKDFLDNEENEDILEDIVLTLTLFEDREMIEERLKTYAHLFDDKVMKQLKRRRYTGWGRLSRKLINGIRDKQSGKTILDFLKSDGFANRNFMQLIHDDSLTFKEDIQKAQVSGQGDSLHEHIANLAGSPAIKKGILQTVKVVDELVKVMGRHKPENIVIEMARENQTTQKGQKNSRERMKRIEEGIKELGSQILKEHPVENTQLQNEKLYLYYLQNGRDMYVDQELDINRLSDYDVDHIVPQSFLKDDSIDNKVLTRSDKARGKSDNVPSEEVVKKMKNYWRQLLNAKLITQRKFDNLTKAERGGLSELDKAGFIKRQLVETRQITKHVAQILDSRMNTKYDENDKLIREVKVITLKSKLVSDFRKDFQFYKVREINNYHHAHDAYLNAVVGTALIKKYPKLESEFVYGDYKVYDVRKMIAKSEQEIGKATAKYFFYSNIMNFFKTEITLANGEIRKRPLIETNGETGEIVWDKGRDFATVRKVLSMPQVNIVKKTEVQTGGFSKESILPKRNSDKLIARKKDWDPKKYGGFDSPTVAYSVLVVAKVEKGKSKKLKSVKELLGITIMERSSFEKNPIDFLEAKGYKEVKKDLIIKLPKYSLFELENGRKRMLASAGELQKGNELALPSKYVNFLYLASHYEKLKGSPEDNEQKQLFVEQHKHYLDEIIEQISEFSKRVILADANLDKVLSAYNKHRDKPIREQAENIIHLFTLTNLGAPAAFKYFDTTIDRKRYTSTKEVLDATLIHQSITGLYETRIDLSQLGGDGGGGSPAPGGTLQLDDEYRLYSPLVKPDQNIQFWLEQFPQAWAETAGMGLAKQVPPQVIQLKASATPVSVRQYPLSKEAQEGIRPHVQRLIQQGILVPVQSPWNTPLLPVRKPGTNDYRPVQDLREVNKRVQDIHPTVPNPYNLLCALPPQRSWYTVLDLKDAFFCLRLHPTSQPLFAFEWRDPGTGRTGQLTWTRLPQGFKNSPTIFDEALHRDLANFRIQHPQVTLLQYVDDLLLAGATKQDCLEGTKALLLELSDLGYRASAKKAQICRREVTYLGYSLRDGQRWLTEARKKTVVQIPAPTTAKQVREFLGTAGFCRLWIPGFATLAAPLYPLTKEKGEFSWAPEHQKAFDAIKKALLSAPALALPDVTKPFTLYVDERKGVARGVLTQTLGPWRRPVAYLSKKLDPVASGWPVCLKAIAAVAILVKDADKLTLGQNITVIAPHALENIVRQPPDRWMTNARMTHYQSLLLTERVTFAPPAALNPATLLPEETDEPVTHDCHQLLIEETGVRKDLTDIPLTGEVLTWFTDGSSYVVEGKRMAGAAVVDGTRTIWASSLPEGTSAQKAELMALTQALRLAEGKSINIYTDSRYAFATAHVHGAIYKQRGLLTSAGREIKNKEEILSLLEALHLPKRLAIIHCPGHQKAKDPISRGNQMADRVAKQAAQGVNLLAGKRTADGSEFEKRTADGSEFESPKKKAKVE

SEQ ID NO: 110 - protein, 2085 aa, synthetic construct
  source 1..2085: note = Description of Artificial Sequence: Synthetic polypeptide
MPAAKRVKLDGGDKKYSIGLDIGTNSVGWAVITDEYKVPSKKFKVLGNTDRHSIKKNLIGALLFDSGETAEATRLKRTARRRYTRRKNRICYLQEIFSNEMAKVDDSFFHRLEESFLVEEDKKHERHPIFGNIVDEVAYHEKYPTIYHLRKKLVDSTDKADLRLIYLALAHMIKFRGHFLIEGDLNPDNSDVDKLFIQLVQTYNQLFEENPINASGVDAKAILSARLSKSRRLENLIAQLPGEKKNGLFGNLIALSLGLTPNFKSNFDLAEDAKLQLSKDTYDDDLDNLLAQIGDQYADLFLAAKNLSDAILLSDILRVNTEITKAPLSASMIKRYDEHHQDLTLLKALVRQQLPEKYKEIFFDQSKNGYAGYIDGGASQEEFYKFIKPILEKMDGTEELLVKLNREDLLRKQRTFDNGSIPHQIHLGELHAILRRQEDFYPFLKDNREKIEKILTFRIPYYVGPLARGNSRFAWMTRKSEETITPWNFEEVVDKGASAQSFIERMTNFDKNLPNEKVLPKHSLLYEYFTVYNELTKVKYVTEGMRKPAFLSGEQKKAIVDLLFKTNRKVTVKQLKEDYFKKIECFDSVEISGVEDRFNASLGTYHDLLKIIKDKDFLDNEENEDILEDIVLTLTLFEDREMIEERLKTYAHLFDDKVMKQLKRRRYTGWGRLSRKLINGIRDKQSGKTILDFLKSDGFANRNFMQLIHDDSLTFKEDIQKAQVSGQGDSLHEHIANLAGSPAIKKGILQTVKVVDELVKVMGRHKPENIVIEMARENQTTQKGQKNSRERMKRIEEGIKELGSQILKEHPVENTQLQNEKLYLYYLQNGRDMYVDQELDINRLSDYDVDHIVPQSFLKDDSIDNKVLTRSDKARGKSDNVPSEEVVKKMKNYWRQLLNAKLITQRKFDNLTKAERGGLSELDKAGFIKRQLVETRQITKHVAQILDSRMNTKYDENDKLIREVKVITLKSKLVSDFRKDFQFYKVREINNYHHAHDAYLNAVVGTALIKKYPKLESEFVYGDYKVYDVRKMIAKSEQEIGKATAKYFFYSNIMNFFKTEITLANGEIRKRPLIETNGETGEIVWDKGRDFATVRKVLSMPQVNIVKKTEVQTGGFSKESILPKRNSDKLIARKKDWDPKKYGGFDSPTVAYSVLVVAKVEKGKSKKLKSVKELLGITIMERSSFEKNPIDFLEAKGYKEVKKDLIIKLPKYSLFELENGRKRMLASAGELQKGNELALPSKYVNFLYLASHYEKLKGSPEDNEQKQLFVEQHKHYLDEIIEQISEFSKRVILADANLDKVLSAYNKHRDKPIREQAENIIHLFTLTNLGAPAAFKYFDTTIDRKRYTSTKEVLDATLIHQSITGLYETRIDLSQLGGDGGGSSGSSGGTLQLDDEYRLYSPLVKPDQNIQFWLEQFPQAWAETAGMGLAKQVPPQVIQLKASATPVSVRQYPLSKEAQEGIRPHVQRLIQQGILVPVQSPWNTPLLPVRKPGTNDYRPVQDLREVNKRVQDIHPTVPNPYNLLCALPPQRSWYTVLDLKDAFFCLRLHPTSQPLFAFEWRDPGTGRTGQLTWTRLPQGFKNSPTIFDEALHRDLANFRIQHPQVTLLQYVDDLLLAGATKQDCLEGTKALLLELSDLGYRASAKKAQICRREVTYLGYSLRDGQRWLTEARKKTVVQIPAPTTAKQVREFLGTAGFCRLWIPGFATLAAPLYPLTKEKGEFSWAPEHQKAFDAIKKALLSAPALALPDVTKPFTLYVDERKGVARGVLTQTLGPWRRPVAYLSKKLDPVASGWPVCLKAIAAVAILVKDADKLTLGQNITVIAPHALENIVRQPPDRWMTNARMTHYQSLLLTERVTFAPPAALNPATLLPEETDEPVTHDCHQLLIEETGVRKDLTDIPLTGEVLTWFTDGSSYVVEGKRMAGAAVVDGTRTIWASSLPEGTSAQKAELMALTQALRLAEGKSINIYTDSRYAFATAHVHGAIYKQRGLLTSAGREIKNKEEILSLLEALHLPKRLAIIHCPGHQKAKDPISRGNQMADRVAKQAAQGVNLLAGKRTADGSEFEKRTADGSEFESPKKKAKVE

SEQ ID NO: 111 - protein, 2091 aa, synthetic construct
  source 1..2091: note = Description of Artificial Sequence: Synthetic polypeptide
MPAAKRVKLDGGDKKYSIGLDIGTNSVGWAVITDEYKVPSKKFKVLGNTDRHSIKKNLIGALLFDSGETAEATRLKRTARRRYTRRKNRICYLQEIFSNEMAKVDDSFFHRLEESFLVEEDKKHERHPIFGNIVDEVAYHEKYPTIYHLRKKLVDSTDKADLRLIYLALAHMIKFRGHFLIEGDLNPDNSDVDKLFIQLVQTYNQLFEENPINASGVDAKAILSARLSKSRRLENLIAQLPGEKKNGLFGNLIALSLGLTPNFKSNFDLAEDAKLQLSKDTYDDDLDNLLAQIGDQYADLFLAAKNLSDAILLSDILRVNTEITKAPLSASMIKRYDEHHQDLTLLKALVRQQLPEKYKEIFFDQSKNGYAGYIDGGASQEEFYKFIKPILEKMDGTEELLVKLNREDLLRKQRTFDNGSIPHQIHLGELHAILRRQEDFYPFLKDNREKIEKILTFRIPYYVGPLARGNSRFAWMTRKSEETITPWNFEEVVDKGASAQSFIERMTNFDKNLPNEKVLPKHSLLYEYFTVYNELTKVKYVTEGMRKPAFLSGEQKKAIVDLLFKTNRKVTVKQLKEDYFKKIECFDSVEISGVEDRFNASLGTYHDLLKIIKDKDFLDNEENEDILEDIVLTLTLFEDREMIEERLKTYAHLFDDKVMKQLKRRRYTGWGRLSRKLINGIRDKQSGKTILDFLKSDGFANRNFMQLIHDDSLTFKEDIQKAQVSGQGDSLHEHIANLAGSPAIKKGILQTVKVVDELVKVMGRHKPENIVIEMARENQTTQKGQKNSRERMKRIEEGIKELGSQILKEHPVENTQLQNEKLYLYYLQNGRDMYVDQELDINRLSDYDVDHIVPQSFLKDDSIDNKVLTRSDKARGKSDNVPSEEVVKKMKNYWRQLLNAKLITQRKFDNLTKAERGGLSELDKAGFIKRQLVETRQITKHVAQILDSRMNTKYDENDKLIREVKVITLKSKLVSDFRKDFQFYKVREINNYHHAHDAYLNAVVGTALIKKYPKLESEFVYGDYKVYDVRKMIAKSEQEIGKATAKYFFYSNIMNFFKTEITLANGEIRKRPLIETNGETGEIVWDKGRDFATVRKVLSMPQVNIVKKTEVQTGGFSKESILPKRNSDKLIARKKDWDPKKYGGFDSPTVAYSVLVVAKVEKGKSKKLKSVKELLGITIMERSSFEKNPIDFLEAKGYKEVKKDLIIKLPKYSLFELENGRKRMLASAGELQKGNELALPSKYVNFLYLASHYEKLKGSPEDNEQKQLFVEQHKHYLDEIIEQISEFSKRVILADANLDKVLSAYNKHRDKPIREQAENIIHLFTLTNLGAPAAFKYFDTTIDRKRYTSTKEVLDATLIHQSITGLYETRIDLSQLGGDGGGGSGGSGGSGGSGGTLQLDDEYRLYSPLVKPDQNIQFWLEQFPQAWAETAGMGLAKQVPPQVIQLKASATPVSVRQYPLSKEAQEGIRPHVQRLIQQGILVPVQSPWNTPLLPVRKPGTNDYRPVQDLREVNKRVQDIHPTVPNPYNLLCALPPQRSWYTVLDLKDAFFCLRLHPTSQPLFAFEWRDPGTGRTGQLTWTRLPQGFKNSPTIFDEALHRDLANFRIQHPQVTLLQYVDDLLLAGATKQDCLEGTKALLLELSDLGYRASAKKAQICRREVTYLGYSLRDGQRWLTEARKKTVVQIPAPTTAKQVREFLGTAGFCRLWIPGFATLAAPLYPLTKEKGEFSWAPEHQKAFDAIKKALLSAPALALPDVTKPFTLYVDERKGVARGVLTQTLGPWRRPVAYLSKKLDPVASGWPVCLKAIAAVAILVKDADKLTLGQNITVIAPHALENIVRQPPDRWMTNARMTHYQSLLLTERVTFAPPAALNPATLLPEETDEPVTHDCHQLLIEETGVRKDLTDIPLTGEVLTWFTDGSSYVVEGKRMAGAAVVDGTRTIWASSLPEGTSAQKAELMALTQALRLAEGKSINIYTDSRYAFATAHVHGAIYKQRGLLTSAGREIKNKEEILSLLEALHLPKRLAIIHCPGHQKAKDPISRGNQMADRVAKQAAQGVNLLAGKRTADGSEFEKRTADGSEFESPKKKAKVE

SEQ ID NO: 112 - protein, 2090 aa, synthetic construct
  source 1..2090: note = Description of Artificial Sequence: Synthetic polypeptide
MPAAKRVKLDGGDKKYSIGLDIGTNSVGWAVITDEYKVPSKKFKVLGNTDRHSIKKNLIGALLFDSGETAEATRLKRTARRRYTRRKNRICYLQEIFSNEMAKVDDSFFHRLEESFLVEEDKKHERHPIFGNIVDEVAYHEKYPTIYHLRKKLVDSTDKADLRLIYLALAHMIKFRGHFLIEGDLNPDNSDVDKLFIQLVQTYNQLFEENPINASGVDAKAILSARLSKSRRLENLIAQLPGEKKNGLFGNLIALSLGLTPNFKSNFDLAEDAKLQLSKDTYDDDLDNLLAQIGDQYADLFLAAKNLSDAILLSDILRVNTEITKAPLSASMIKRYDEHHQDLTLLKALVRQQLPEKYKEIFFDQSKNGYAGYIDGGASQEEFYKFIKPILEKMDGTEELLVKLNREDLLRKQRTFDNGSIPHQIHLGELHAILRRQEDFYPFLKDNREKIEKILTFRIPYYVGPLARGNSRFAWMTRKSEETITPWNFEEVVDKGASAQSFIERMTNFDKNLPNEKVLPKHSLLYEYFTVYNELTKVKYVTEGMRKPAFLSGEQKKAIVDLLFKTNRKVTVKQLKEDYFKKIECFDSVEISGVEDRFNASLGTYHDLLKIIKDKDFLDNEENEDILEDIVLTLTLFEDREMIEERLKTYAHLFDDKVMKQLKRRRYTGWGRLSRKLINGIRDKQSGKTILDFLKSDGFANRNFMQLIHDDSLTFKEDIQKAQVSGQGDSLHEHIANLAGSPAIKKGILQTVKVVDELVKVMGRHKPENIVIEMARENQTTQKGQKNSRERMKRIEEGIKELGSQILKEHPVENTQLQNEKLYLYYLQNGRDMYVDQELDINRLSDYDVDHIVPQSFLKDDSIDNKVLTRSDKARGKSDNVPSEEVVKKMKNYWRQLLNAKLITQRKFDNLTKAERGGLSELDKAGFIKRQLVETRQITKHVAQILDSRMNTKYDENDKLIREVKVITLKSKLVSDFRKDFQFYKVREINNYHHAHDAYLNAVVGTALIKKYPKLESEFVYGDYKVYDVRKMIAKSEQEIGKATAKYFFYSNIMNFFKTEITLANGEIRKRPLIETNGETGEIVWDKGRDFATVRKVLSMPQVNIVKKTEVQTGGFSKESILPKRNSDKLIARKKDWDPKKYGGFDSPTVAYSVLVVAKVEKGKSKKLKSVKELLGITIMERSSFEKNPIDFLEAKGYKEVKKDLIIKLPKYSLFELENGRKRMLASAGELQKGNELALPSKYVNFLYLASHYEKLKGSPEDNEQKQLFVEQHKHYLDEIIEQISEFSKRVILADANLDKVLSAYNKHRDKPIREQAENIIHLFTLTNLGAPAAFKYFDTTIDRKRYTSTKEVLDATLIHQSITGLYETRIDLSQLGGDGGEAAAKGGGPAPGGTLQLDDEYRLYSPLVKPDQNIQFWLEQFPQAWAETAGMGLAKQVPPQVIQLKASATPVSVRQYPLSKEAQEGIRPHVQRLIQQGILVPVQSPWNTPLLPVRKPGTNDYRPVQDLREVNKRVQDIHPTVPNPYNLLCALPPQRSWYTVLDLKDAFFCLRLHPTSQPLFAFEWRDPGTGRTGQLTWTRLPQGFKNSPTIFDEALHRDLANFRIQHPQVTLLQYVDDLLLAGATKQDCLEGTKALLLELSDLGYRASAKKAQICRREVTYLGYSLRDGQRWLTEARKKTVVQIPAPTTAKQVREFLGTAGFCRLWIPGFATLAAPLYPLTKEKGEFSWAPEHQKAFDAIKKALLSAPALALPDVTKPFTLYVDERKGVARGVLTQTLGPWRRPVAYLSKKLDPVASGWPVCLKAIAAVAILVKDADKLTLGQNITVIAPHALENIVRQPPDRWMTNARMTHYQSLLLTERVTFAPPAALNPATLLPEETDEPVTHDCHQLLIEETGVRKDLTDIPLTGEVLTWFTDGSSYVVEGKRMAGAAVVDGTRTIWASSLPEGTSAQKAELMALTQALRLAEGKSINIYTDSRYAFATAHVHGAIYKQRGLLTSAGREIKNKEEILSLLEALHLPKRLAIIHCPGHQKAKDPISRGNQMADRVAKQAAQGVNLLAGKRTADGSEFEKRTADGSEFESPKKKAKVE

SEQ ID NO: 113 - protein, 2097 aa, synthetic construct
  source 1..2097: note = Description of Artificial Sequence: Synthetic polypeptide
MPAAKRVKLDGGDKKYSIGLDIGTNSVGWAVITDEYKVPSKKFKVLGNTDRHSIKKNLIGALLFDSGETAEATRLKRTARRRYTRRKNRICYLQEIFSNEMAKVDDSFFHRLEESFLVEEDKKHERHPIFGNIVDEVAYHEKYPTIYHLRKKLVDSTDKADLRLIYLALAHMIKFRGHFLIEGDLNPDNSDVDKLFIQLVQTYNQLFEENPINASGVDAKAILSARLSKSRRLENLIAQLPGEKKNGLFGNLIALSLGLTPNFKSNFDLAEDAKLQLSKDTYDDDLDNLLAQIGDQYADLFLAAKNLSDAILLSDILRVNTEITKAPLSASMIKRYDEHHQDLTLLKALVRQQLPEKYKEIFFDQSKNGYAGYIDGGASQEEFYKFIKPILEKMDGTEELLVKLNREDLLRKQRTFDNGSIPHQIHLGELHAILRRQEDFYPFLKDNREKIEKILTFRIPYYVGPLARGNSRFAWMTRKSEETITPWNFEEVVDKGASAQSFIERMTNFDKNLPNEKVLPKHSLLYEYFTVYNELTKVKYVTEGMRKPAFLSGEQKKAIVDLLFKTNRKVTVKQLKEDYFKKIECFDSVEISGVEDRFNASLGTYHDLLKIIKDKDFLDNEENEDILEDIVLTLTLFEDREMIEERLKTYAHLFDDKVMKQLKRRRYTGWGRLSRKLINGIRDKQSGKTILDFLKSDGFANRNFMQLIHDDSLTFKEDIQKAQVSGQGDSLHEHIANLAGSPAIKKGILQTVKVVDELVKVMGRHKPENIVIEMARENQTTQKGQKNSRERMKRIEEGIKELGSQILKEHPVENTQLQNEKLYLYYLQNGRDMYVDQELDINRLSDYDVDHIVPQSFLKDDSIDNKVLTRSDKARGKSDNVPSEEVVKKMKNYWRQLLNAKLITQRKFDNLTKAERGGLSELDKAGFIKRQLVETRQITKHVAQILDSRMNTKYDENDKLIREVKVITLKSKLVSDFRKDFQFYKVREINNYHHAHDAYLNAVVGTALIKKYPKLESEFVYGDYKVYDVRKMIAKSEQEIGKATAKYFFYSNIMNFFKTEITLANGEIRKRPLIETNGETGEIVWDKGRDFATVRKVLSMPQVNIVKKTEVQTGGFSKESILPKRNSDKLIARKKDWDPKKYGGFDSPTVAYSVLVVAKVEKGKSKKLKSVKELLGITIMERSSFEKNPIDFLEAKGYKEVKKDLIIKLPKYSLFELENGRKRMLASAGELQKGNELALPSKYVNFLYLASHYEKLKGSPEDNEQKQLFVEQHKHYLDEIIEQISEFSKRVILADANLDKVLSAYNKHRDKPIREQAENIIHLFTLTNLGAPAAFKYFDTTIDRKRYTSTKEVLDATLIHQSITGLYETRIDLSQLGGDGGGSSGSSGSSGSSGSSGSSGGTLQLDDEYRLYSPLVKPDQNIQFWLEQFPQAWAETAGMGLAKQVPPQVIQLKASATPVSVRQYPLSKEAQEGIRPHVQRLIQQGILVPVQSPWNTPLLPVRKPGTNDYRPVQDLREVNKRVQDIHPTVPNPYNLLCALPPQRSWYTVLDLKDAFFCLRLHPTSQPLFAFEWRDPGTGRTGQLTWTRLPQGFKNSPTIFNEALHRDLANFRIQHPQVTLLQYVDDLLLAGATKQDCLEGTKALLLELSDLGYRASAKKAQICRREVTYLGYSLRDGQRWLTEARKKTVVQIPAPTTAKQVREFLGTAGFCRLWIPGFATLAAPLYPLTKPKGEFSWAPEHQKAFDAIKKALLSAPALALPDVTKPFTLYVDERKGVARGVLTQTLGPWRRPVAYLSKKLDPVASGWPVCLKAIAAVAILVKDADKLTLGQNITVIAPHALENIVRQPPDRWMTNARMTHYQSLLLTERVTFAPPAALNPATLLPEETDEPVTHDCHQLLIEETGVRKDLTDIPLTGEVLTWFTDGSSYVVEGKRMAGAAVVDGTRTIWASSLPEGTSAQKAELMALTQALRLAEGKSINIYTDSRYAFATAHVHGAIYKQRGWLTSAGREIKNKEEILSLLEALHLPKRLAIIHCPGHQKAKDPISRGNQMADRVAKQAAQGVNLLAGKRTADGSEFEKRTADGSEFESPKKKAKVE

SEQ ID NO: 114 - protein, 2087 aa, synthetic construct
  source 1..2087: note = Description of Artificial Sequence: Synthetic polypeptide
MPAAKRVKLDGGDKKYSIGLDIGTNSVGWAVITDEYKVPSKKFKVLGNTDRHSIKKNLIGALLFDSGETAEATRLKRTARRRYTRRKNRICYLQEIFSNEMAKVDDSFFHRLEESFLVEEDKKHERHPIFGNIVDEVAYHEKYPTIYHLRKKLVDSTDKADLRLIYLALAHMIKFRGHFLIEGDLNPDNSDVDKLFIQLVQTYNQLFEENPINASGVDAKAILSARLSKSRRLENLIAQLPGEKKNGLFGNLIALSLGLTPNFKSNFDLAEDAKLQLSKDTYDDDLDNLLAQIGDQYADLFLAAKNLSDAILLSDILRVNTEITKAPLSASMIKRYDEHHQDLTLLKALVRQQLPEKYKEIFFDQSKNGYAGYIDGGASQEEFYKFIKPILEKMDGTEELLVKLNREDLLRKQRTFDNGSIPHQIHLGELHAILRRQEDFYPFLKDNREKIEKILTFRIPYYVGPLARGNSRFAWMTRKSEETITPWNFEEVVDKGASAQSFIERMTNFDKNLPNEKVLPKHSLLYEYFTVYNELTKVKYVTEGMRKPAFLSGEQKKAIVDLLFKTNRKVTVKQLKEDYFKKIECFDSVEISGVEDRFNASLGTYHDLLKIIKDKDFLDNEENEDILEDIVLTLTLFEDREMIEERLKTYAHLFDDKVMKQLKRRRYTGWGRLSRKLINGIRDKQSGKTILDFLKSDGFANRNFMQLIHDDSLTFKEDIQKAQVSGQGDSLHEHIANLAGSPAIKKGILQTVKVVDELVKVMGRHKPENIVIEMARENQTTQKGQKNSRERMKRIEEGIKELGSQILKEHPVENTQLQNEKLYLYYLQNGRDMYVDQELDINRLSDYDVDHIVPQSFLKDDSIDNKVLTRSDKARGKSDNVPSEEVVKKMKNYWRQLLNAKLITQRKFDNLTKAERGGLSELDKAGFIKRQLVETRQITKHVAQILDSRMNTKYDENDKLIREVKVITLKSKLVSDFRKDFQFYKVREINNYHHAHDAYLNAVVGTALIKKYPKLESEFVYGDYKVYDVRKMIAKSEQEIGKATAKYFFYSNIMNFFKTEITLANGEIRKRPLIETNGETGEIVWDKGRDFATVRKVLSMPQVNIVKKTEVQTGGFSKESILPKRNSDKLIARKKDWDPKKYGGFDSPTVAYSVLVVAKVEKGKSKKLKSVKELLGITIMERSSFEKNPIDFLEAKGYKEVKKDLIIKLPKYSLFELENGRKRMLASAGELQKGNELALPSKYVNFLYLASHYEKLKGSPEDNEQKQLFVEQHKHYLDEIIEQISEFSKRVILADANLDKVLSAYNKHRDKPIREQAENIIHLFTLTNLGAPAAFKYFDTTIDRKRYTSTKEVLDATLIHQSITGLYETRIDLSQLGGDGGGGGGGGGGGGTLQLDDEYRLYSPLVKPDQNIQFWLEQFPQAWAETAGMGLAKQVPPQVIQLKASATPVSVRQYPLSKEAQEGIRPHVQRLIQQGILVPVQSPWNTPLLPVRKPGTNDYRPVQDLREVNKRVQDIHPTVPNPYNLLCALPPQRSWYTVLDLKDAFFCLRLHPTSQPLFAFEWRDPGTGRTGQLTWTRLPQGFKNSPTIFNEALHRDLANFRIQHPQVTLLQYVDDLLLAGATKQDCLEGTKALLLELSDLGYRASAKKAQICRREVTYLGYSLRDGQRWLTEARKKTVVQIPAPTTAKQVREFLGTAGFCRLWIPGFATLAAPLYPLTKPKGEFSWAPEHQKAFDAIKKALLSAPALALPDVTKPFTLYVDERKGVARGVLTQTLGPWRRPVAYLSKKLDPVASGWPVCLKAIAAVAILVKDADKLTLGQNITVIAPHALENIVRQPPDRWMTNARMTHYQSLLLTERVTFAPPAALNPATLLPEETDEPVTHDCHQLLIEETGVRKDLTDIPLTGEVLTWFTDGSSYVVEGKRMAGAAVVDGTRTIWASSLPEGTSAQKAELMALTQALRLAEGKSINIYTDSRYAFATAHVHGAIYKQRGWLTSAGREIKNKEEILSLLEALHLPKRLAIIHCPGHQKAKDPISRGNQMADRVAKQAAQGVNLLAGKRTADGSEFEKRTADGSEFESPKKKAKVE

SEQ ID NO: 115 - protein, 2090 aa, synthetic construct
  source 1..2090: note = Description of Artificial Sequence: Synthetic polypeptide
MPAAKRVKLDGGDKKYSIGLDIGTNSVGWAVITDEYKVPSKKFKVLGNTDRHSIKKNLIGALLFDSGETAEATRLKRTARRRYTRRKNRICYLQEIFSNEMAKVDDSFFHRLEESFLVEEDKKHERHPIFGNIVDEVAYHEKYPTIYHLRKKLVDSTDKADLRLIYLALAHMIKFRGHFLIEGDLNPDNSDVDKLFIQLVQTYNQLFEENPINASGVDAKAILSARLSKSRRLENLIAQLPGEKKNGLFGNLIALSLGLTPNFKSNFDLAEDAKLQLSKDTYDDDLDNLLAQIGDQYADLFLAAKNLSDAILLSDILRVNTEITKAPLSASMIKRYDEHHQDLTLLKALVRQQLPEKYKEIFFDQSKNGYAGYIDGGASQEEFYKFIKPILEKMDGTEELLVKLNREDLLRKQRTFDNGSIPHQIHLGELHAILRRQEDFYPFLKDNREKIEKILTFRIPYYVGPLARGNSRFAWMTRKSEETITPWNFEEVVDKGASAQSFIERMTNFDKNLPNEKVLPKHSLLYEYFTVYNELTKVKYVTEGMRKPAFLSGEQKKAIVDLLFKTNRKVTVKQLKEDYFKKIECFDSVEISGVEDRFNASLGTYHDLLKIIKDKDFLDNEENEDILEDIVLTLTLFEDREMIEERLKTYAHLFDDKVMKQLKRRRYTGWGRLSRKLINGIRDKQSGKTILDFLKSDGFANRNFMQLIHDDSLTFKEDIQKAQVSGQGDSLHEHIANLAGSPAIKKGILQTVKVVDELVKVMGRHKPENIVIEMARENQTTQKGQKNSRERMKRIEEGIKELGSQILKEHPVENTQLQNEKLYLYYLQNGRDMYVDQELDINRLSDYDVDHIVPQSFLKDDSIDNKVLTRSDKARGKSDNVPSEEVVKKMKNYWRQLLNAKLITQRKFDNLTKAERGGLSELDKAGFIKRQLVETRQITKHVAQILDSRMNTKYDENDKLIREVKVITLKSKLVSDFRKDFQFYKVREINNYHHAHDAYLNAVVGTALIKKYPKLESEFVYGDYKVYDVRKMIAKSEQEIGKATAKYFFYSNIMNFFKTEITLANGEIRKRPLIETNGETGEIVWDKGRDFATVRKVLSMPQVNIVKKTEVQTGGFSKESILPKRNSDKLIARKKDWDPKKYGGFDSPTVAYSVLVVAKVEKGKSKKLKSVKELLGITIMERSSFEKNPIDFLEAKGYKEVKKDLIIKLPKYSLFELENGRKRMLASAGELQKGNELALPSKYVNFLYLASHYEKLKGSPEDNEQKQLFVEQHKHYLDEIIEQISEFSKRVILADANLDKVLSAYNKHRDKPIREQAENIIHLFTLTNLGAPAAFKYFDTTIDRKRYTSTKEVLDATLIHQSITGLYETRIDLSQLGGDGGPAPAPAPAPAPGGTLQLDDEYRLYSPLVKPDQNIQFWLEQFPQAWAETAGMGLAKQVPPQVIQLKASATPVSVRQYPLSKEAQEGIRPHVQRLIQQGILVPVQSPWNTPLLPVRKPGTNDYRPVQDLREVNKRVQDIHPTVPNPYNLLCALPPQRSWYTVLDLKDAFFCLRLHPTSQPLFAFEWRDPGTGRTGQLTWTRLPQGFKNSPTIFNEALHRDLANFRIQHPQVTLLQYVDDLLLAGATKQDCLEGTKALLLELSDLGYRASAKKAQICRREVTYLGYSLRDGQRWLTEARKKTVVQIPAPTTAKQVREFLGTAGFCRLWIPGFATLAAPLYPLTKPKGEFSWAPEHQKAFDAIKKALLSAPALALPDVTKPFTLYVDERKGVARGVLTQTLGPWRRPVAYLSKKLDPVASGWPVCLKAIAAVAILVKDADKLTLGQNITVIAPHALENIVRQPPDRWMTNARMTHYQSLLLTERVTFAPPAALNPATLLPEETDEPVTHDCHQLLIEETGVRKDLTDIPLTGEVLTWFTDGSSYVVEGKRMAGAAVVDGTRTIWASSLPEGTSAQKAELMALTQALRLAEGKSINIYTDSRYAFATAHVHGAIYKQRGWLTSAGREIKNKEEILSLLEALHLPKRLAIIHCPGHQKAKDPISRGNQMADRVAKQAAQGVNLLAGKRTADGSEFEKRTADGSEFESPKKKAKVE

SEQ ID NO: 116 - protein, 2090 aa, synthetic construct
  source 1..2090: note = Description of Artificial Sequence: Synthetic polypeptide
MPAAKRVKLDGGDKKYSIGLDIGTNSVGWAVITDEYKVPSKKFKVLGNTDRHSIKKNLIGALLFDSGETAEATRLKRTARRRYTRRKNRICYLQEIFSNEMAKVDDSFFHRLEESFLVEEDKKHERHPIFGNIVDEVAYHEKYPTIYHLRKKLVDSTDKADLRLIYLALAHMIKFRGHFLIEGDLNPDNSDVDKLFIQLVQTYNQLFEENPINASGVDAKAILSARLSKSRRLENLIAQLPGEKKNGLFGNLIALSLGLTPNFKSNFDLAEDAKLQLSKDTYDDDLDNLLAQIGDQYADLFLAAKNLSDAILLSDILRVNTEITKAPLSASMIKRYDEHHQDLTLLKALVRQQLPEKYKEIFFDQSKNGYAGYIDGGASQEEFYKFIKPILEKMDGTEELLVKLNREDLLRKQRTFDNGSIPHQIHLGELHAILRRQEDFYPFLKDNREKIEKILTFRIPYYVGPLARGNSRFAWMTRKSEETITPWNFEEVVDKGASAQSFIERMTNFDKNLPNEKVLPKHSLLYEYFTVYNELTKVKYVTEGMRKPAFLSGEQKKAIVDLLFKTNRKVTVKQLKEDYFKKIECFDSVEISGVEDRFNASLGTYHDLLKIIKDKDFLDNEENEDILEDIVLTLTLFEDREMIEERLKTYAHLFDDKVMKQLKRRRYTGWGRLSRKLINGIRDKQSGKTILDFLKSDGFANRNFMQLIHDDSLTFKEDIQKAQVSGQGDSLHEHIANLAGSPAIKKGILQTVKVVDELVKVMGRHKPENIVIEMARENQTTQKGQKNSRERMKRIEEGIKELGSQILKEHPVENTQLQNEKLYLYYLQNGRDMYVDQELDINRLSDYDVDHIVPQSFLKDDSIDNKVLTRSDKARGKSDNVPSEEVVKKMKNYWRQLLNAKLITQRKFDNLTKAERGGLSELDKAGFIKRQLVETRQITKHVAQILDSRMNTKYDENDKLIREVKVITLKSKLVSDFRKDFQFYKVREINNYHHAHDAYLNAVVGTALIKKYPKLESEFVYGDYKVYDVRKMIAKSEQEIGKATAKYFFYSNIMNFFKTEITLANGEIRKRPLIETNGETGEIVWDKGRDFATVRKVLSMPQVNIVKKTEVQTGGFSKESILPKRNSDKLIARKKDWDPKKYGGFDSPTVAYSVLVVAKVEKGKSKKLKSVKELLGITIMERSSFEKNPIDFLEAKGYKEVKKDLIIKLPKYSLFELENGRKRMLASAGELQKGNELALPSKYVNFLYLASHYEKLKGSPEDNEQKQLFVEQHKHYLDEIIEQISEFSKRVILADANLDKVLSAYNKHRDKPIREQAENIIHLFTLTNLGAPAAFKYFDTTIDRKRYTSTKEVLDATLIHQSITGLYETRIDLSQLGGDGGGSSEAAAKPAPGGTLQLDDEYRLYSPLVKPDQNIQFWLEQFPQAWAETAGMGLAKQVPPQVIQLKASATPVSVRQYPLSKEAQEGIRPHVQRLIQQGILVPVQSPWNTPLLPVRKPGTNDYRPVQDLREVNKRVQDIHPTVPNPYNLLCALPPQRSWYTVLDLKDAFFCLRLHPTSQPLFAFEWRDPGTGRTGQLTWTRLPQGFKNSPTIFNEALHRDLANFRIQHPQVTLLQYVDDLLLAGATKQDCLEGTKALLLELSDLGYRASAKKAQICRREVTYLGYSLRDGQRWLTEARKKTVVQIPAPTTAKQVREFLGTAGFCRLWIPGFATLAAPLYPLTKPKGEFSWAPEHQKAFDAIKKALLSAPALALPDVTKPFTLYVDERKGVARGVLTQTLGPWRRPVAYLSKKLDPVASGWPVCLKAIAAVAILVKDADKLTLGQNITVIAPHALENIVRQPPDRWMTNARMTHYQSLLLTERVTFAPPAALNPATLLPEETDEPVTHDCHQLLIEETGVRKDLTDIPLTGEVLTWFTDGSSYVVEGKRMAGAAVVDGTRTIWASSLPEGTSAQKAELMALTQALRLAEGKSINIYTDSRYAFATAHVHGAIYKQRGWLTSAGREIKNKEEILSLLEALHLPKRLAIIHCPGHQKAKDPISRGNQMADRVAKQAAQGVNLLAGKRTADGSEFEKRTADGSEFESPKKKAKVE

SEQ ID NO: 117 - protein, 2109 aa, synthetic construct
  source 1..2109: note = Description of Artificial Sequence: Synthetic polypeptide
MPAAKRVKLDGGDKKYSIGLDIGTNSVGWAVITDEYKVPSKKFKVLGNTDRHSIKKNLIGALLFDSGETAEATRLKRTARRRYTRRKNRICYLQEIFSNEMAKVDDSFFHRLEESFLVEEDKKHERHPIFGNIVDEVAYHEKYPTIYHLRKKLVDSTDKADLRLIYLALAHMIKFRGHFLIEGDLNPDNSDVDKLFIQLVQTYNQLFEENPINASGVDAKAILSARLSKSRRLENLIAQLPGEKKNGLFGNLIALSLGLTPNFKSNFDLAEDAKLQLSKDTYDDDLDNLLAQIGDQYADLFLAAKNLSDAILLSDILRVNTEITKAPLSASMIKRYDEHHQDLTLLKALVRQQLPEKYKEIFFDQSKNGYAGYIDGGASQEEFYKFIKPILEKMDGTEELLVKLNREDLLRKQRTFDNGSIPHQIHLGELHAILRRQEDFYPFLKDNREKIEKILTFRIPYYVGPLARGNSRFAWMTRKSEETITPWNFEEVVDKGASAQSFIERMTNFDKNLPNEKVLPKHSLLYEYFTVYNELTKVKYVTEGMRKPAFLSGEQKKAIVDLLFKTNRKVTVKQLKEDYFKKIECFDSVEISGVEDRFNASLGTYHDLLKIIKDKDFLDNEENEDILEDIVLTLTLFEDREMIEERLKTYAHLFDDKVMKQLKRRRYTGWGRLSRKLINGIRDKQSGKTILDFLKSDGFANRNFMQLIHDDSLTFKEDIQKAQVSGQGDSLHEHIANLAGSPAIKKGILQTVKVVDELVKVMGRHKPENIVIEMARENQTTQKGQKNSRERMKRIEEGIKELGSQILKEHPVENTQLQNEKLYLYYLQNGRDMYVDQELDINRLSDYDVDHIVPQSFLKDDSIDNKVLTRSDKARGKSDNVPSEEVVKKMKNYWRQLLNAKLITQRKFDNLTKAERGGLSELDKAGFIKRQLVETRQITKHVAQILDSRMNTKYDENDKLIREVKVITLKSKLVSDFRKDFQFYKVREINNYHHAHDAYLNAVVGTALIKKYPKLESEFVYGDYKVYDVRKMIAKSEQEIGKATAKYFFYSNIMNFFKTEITLANGEIRKRPLIETNGETGEIVWDKGRDFATVRKVLSMPQVNIVKKTEVQTGGFSKESILPKRNSDKLIARKKDWDPKKYGGFDSPTVAYSVLVVAKVEKGKSKKLKSVKELLGITIMERSSFEKNPIDFLEAKGYKEVKKDLIIKLPKYSLFELENGRKRMLASAGELQKGNELALPSKYVNFLYLASHYEKLKGSPEDNEQKQLFVEQHKHYLDEIIEQISEFSKRVILADANLDKVLSAYNKHRDKPIREQAENIIHLFTLTNLGAPAAFKYFDTTIDRKRYTSTKEVLDATLIHQSITGLYETRIDLSQLGGDGGEAAAKEAAAKEAAAKEAAAKEAAAKEAAAKGGTLQLDDEYRLYSPLVKPDQNIQFWLEQFPQAWAETAGMGLAKQVPPQVIQLKASATPVSVRQYPLSKEAQEGIRPHVQRLIQQGILVPVQSPWNTPLLPVRKPGTNDYRPVQDLREVNKRVQDIHPTVPNPYNLLCALPPQRSWYTVLDLKDAFFCLRLHPTSQPLFAFEWRDPGTGRTGQLTWTRLPQGFKNSPTIFNEALHRDLANFRIQHPQVTLLQYVDDLLLAGATKQDCLEGTKALLLELSDLGYRASAKKAQICRREVTYLGYSLRDGQRWLTEARKKTVVQIPAPTTAKQVREFLGTAGFCRLWIPGFATLAAPLYPLTKPKGEFSWAPEHQKAFDAIKKALLSAPALALPDVTKPFTLYVDERKGVARGVLTQTLGPWRRPVAYLSKKLDPVASGWPVCLKAIAAVAILVKDADKLTLGQNITVIAPHALENIVRQPPDRWMTNARMTHYQSLLLTERVTFAPPAALNPATLLPEETDEPVTHDCHQLLIEETGVRKDLTDIPLTGEVLTWFTDGSSYVVEGKRMAGAAVVDGTRTIWASSLPEGTSAQKAELMALTQALRLAEGKSINIYTDSRYAFATAHVHGAIYKQRGWLTSAGREIKNKEEILSLLEALHLPKRLAIIHCPGHQKAKDPISRGNQMADRVAKQAAQGVNLLAGKRTADGSEFEKRTADGSEFESPKKKAKVE

SEQ ID NO: 118 - protein, 2094 aa, synthetic construct
  source 1..2094: note = Description of Artificial Sequence: Synthetic polypeptide
MPAAKRVKLDGGDKKYSIGLDIGTNSVGWAVITDEYKVPSKKFKVLGNTDRHSIKKNLIGALLFDSGETAEATRLKRTARRRYTRRKNRICYLQEIFSNEMAKVDDSFFHRLEESFLVEEDKKHERHPIFGNIVDEVAYHEKYPTIYHLRKKLVDSTDKADLRLIYLALAHMIKFRGHFLIEGDLNPDNSDVDKLFIQLVQTYNQLFEENPINASGVDAKAILSARLSKSRRLENLIAQLPGEKKNGLFGNLIALSLGLTPNFKSNFDLAEDAKLQLSKDTYDDDLDNLLAQIGDQYADLFLAAKNLSDAILLSDILRVNTEITKAPLSASMIKRYDEHHQDLTLLKALVRQQLPEKYKEIFFDQSKNGYAGYIDGGASQEEFYKFIKPILEKMDGTEELLVKLNREDLLRKQRTFDNGSIPHQIHLGELHAILRRQEDFYPFLKDNREKIEKILTFRIPYYVGPLARGNSRFAWMTRKSEETITPWNFEEVVDKGASAQSFIERMTNFDKNLPNEKVLPKHSLLYEYFTVYNELTKVKYVTEGMRKPAFLSGEQKKAIVDLLFKTNRKVTVKQLKEDYFKKIECFDSVEISGVEDRFNASLGTYHDLLKIIKDKDFLDNEENEDILEDIVLTLTLFEDREMIEERLKTYAHLFDDKVMKQLKRRRYTGWGRLSRKLINGIRDKQSGKTILDFLKSDGFANRNFMQLIHDDSLTFKEDIQKAQVSGQGDSLHEHIANLAGSPAIKKGILQTVKVVDELVKVMGRHKPENIVIEMARENQTTQKGQKNSRERMKRIEEGIKELGSQILKEHPVENTQLQNEKLYLYYLQNGRDMYVDQELDINRLSDYDVDHIVPQSFLKDDSIDNKVLTRSDKARGKSDNVPSEEVVKKMKNYWRQLLNAKLITQRKFDNLTKAERGGLSELDKAGFIKRQLVETRQITKHVAQILDSRMNTKYDENDKLIREVKVITLKSKLVSDFRKDFQFYKVREINNYHHAHDAYLNAVVGTALIKKYPKLESEFVYGDYKVYDVRKMIAKSEQEIGKATAKYFFYSNIMNFFKTEITLANGEIRKRPLIETNGETGEIVWDKGRDFATVRKVLSMPQVNIVKKTEVQTGGFSKESILPKRNSDKLIARKKDWDPKKYGGFDSPTVAYSVLVVAKVEKGKSKKLKSVKELLGITIMERSSFEKNPIDFLEAKGYKEVKKDLIIKLPKYSLFELENGRKRMLASAGELQKGNELALPSKYVNFLYLASHYEKLKGSPEDNEQKQLFVEQHKHYLDEIIEQISEFSKRVILADANLDKVLSAYNKHRDKPIREQAENIIHLFTLTNLGAPAAFKYFDTTIDRKRYTSTKEVLDATLIHQSITGLYETRIDLSQLGGDGGGSSGSSGSSGSSGSSGGTLQLDDEYRLYSPLVKPDQNIQFWLEQFPQAWAETAGMGLAKQVPPQVIQLKASATPVSVRQYPLSKEAQEGIRPHVQRLIQQGILVPVQSPWNTPLLPVRKPGTNDYRPVQDLREVNKRVQDIHPTVPNPYNLLCALPPQRSWYTVLDLKDAFFCLRLHPTSQPLFAFEWRDPGTGRTGQLTWTRLPQGFKNSPTIFNEALHRDLANFRIQHPQVTLLQYVDDLLLAGATKQDCLEGTKALLLELSDLGYRASAKKAQICRREVTYLGYSLRDGQRWLTEARKKTVVQIPAPTTAKQVREFLGTAGFCRLWIPGFATLAAPLYPLTKPKGEFSWAPEHQKAFDAIKKALLSAPALALPDVTKPFTLYVDERKGVARGVLTQTLGPWRRPVAYLSKKLDPVASGWPVCLKAIAAVAILVKDADKLTLGQNITVIAPHALENIVRQPPDRWMTNARMTHYQSLLLTERVTFAPPAALNPATLLPEETDEPVTHDCHQLLIEETGVRKDLTDIPLTGEVLTWFTDGSSYVVEGKRMAGAAVVDGTRTIWASSLPEGTSAQKAELMALTQALRLAEGKSINIYTDSRYAFATAHVHGAIYKQRGWLTSAGREIKNKEEILSLLEALHLPKRLAIIHCPGHQKAKDPISRGNQMADRVAKQAAQGVNLLAGKRTADGSEFEKRTADGSEFESPKKKAKVE

SEQ ID NO: 119 - protein, 2090 aa, synthetic construct
  source 1..2090: note = Description of Artificial Sequence: Synthetic polypeptide
MPAAKRVKLDGGDKKYSIGLDIGTNSVGWAVITDEYKVPSKKFKVLGNTDRHSIKKNLIGALLFDSGETAEATRLKRTARRRYTRRKNRICYLQEIFSNEMAKVDDSFFHRLEESFLVEEDKKHERHPIFGNIVDEVAYHEKYPTIYHLRKKLVDSTDKADLRLIYLALAHMIKFRGHFLIEGDLNPDNSDVDKLFIQLVQTYNQLFEENPINASGVDAKAILSARLSKSRRLENLIAQLPGEKKNGLFGNLIALSLGLTPNFKSNFDLAEDAKLQLSKDTYDDDLDNLLAQIGDQYADLFLAAKNLSDAILLSDILRVNTEITKAPLSASMIKRYDEHHQDLTLLKALVRQQLPEKYKEIFFDQSKNGYAGYIDGGASQEEFYKFIKPILEKMDGTEELLVKLNREDLLRKQRTFDNGSIPHQIHLGELHAILRRQEDFYPFLKDNREKIEKILTFRIPYYVGPLARGNSRFAWMTRKSEETITPWNFEEVVDKGASAQSFIERMTNFDKNLPNEKVLPKHSLLYEYFTVYNELTKVKYVTEGMRKPAFLSGEQKKAIVDLLFKTNRKVTVKQLKEDYFKKIECFDSVEISGVEDRFNASLGTYHDLLKIIKDKDFLDNEENEDILEDIVLTLTLFEDREMIEERLKTYAHLFDDKVMKQLKRRRYTGWGRLSRKLINGIRDKQSGKTILDFLKSDGFANRNFMQLIHDDSLTFKEDIQKAQVSGQGDSLHEHIANLAGSPAIKKGILQTVKVVDELVKVMGRHKPENIVIEMARENQTTQKGQKNSRERMKRIEEGIKELGSQILKEHPVENTQLQNEKLYLYYLQNGRDMYVDQELDINRLSDYDVDHIVPQSFLKDDSIDNKVLTRSDKARGKSDNVPSEEVVKKMKNYWRQLLNAKLITQRKFDNLTKAERGGLSELDKAGFIKRQLVETRQITKHVAQILDSRMNTKYDENDKLIREVKVITLKSKLVSDFRKDFQFYKVREINNYHHAHDAYLNAVVGTALIKKYPKLESEFVYGDYKVYDVRKMIAKSEQEIGKATAKYFFYSNIMNFFKTEITLANGEIRKRPLIETNGETGEIVWDKGRDFATVRKVLSMPQVNIVKKTEVQTGGFSKESILPKRNSDKLIARKKDWDPKKYGGFDSPTVAYSVLVVAKVEKGKSKKLKSVKELLGITIMERSSFEKNPIDFLEAKGYKEVKKDLIIKLPKYSLFELENGRKRMLASAGELQKGNELALPSKYVNFLYLASHYEKLKGSPEDNEQKQLFVEQHKHYLDEIIEQISEFSKRVILADANLDKVLSAYNKHRDKPIREQAENIIHLFTLTNLGAPAAFKYFDTTIDRKRYTSTKEVLDATLIHQSITGLYETRIDLSQLGGDGGEAAAKGSSGGSGGTLQLDDEYRLYSPLVKPDQNIQFWLEQFPQAWAETAGMGLAKQVPPQVIQLKASATPVSVRQYPLSKEAQEGIRPHVQRLIQQGILVPVQSPWNTPLLPVRKPGTNDYRPVQDLREVNKRVQDIHPTVPNPYNLLCALPPQRSWYTVLDLKDAFFCLRLHPTSQPLFAFEWRDPGTGRTGQLTWTRLPQGFKNSPTIFNEALHRDLANFRIQHPQVTLLQYVDDLLLAGATKQDCLEGTKALLLELSDLGYRASAKKAQICRREVTYLGYSLRDGQRWLTEARKKTVVQIPAPTTAKQVREFLGTAGFCRLWIPGFATLAAPLYPLTKPKGEFSWAPEHQKAFDAIKKALLSAPALALPDVTKPFTLYVDERKGVARGVLTQTLGPWRRPVAYLSKKLDPVASGWPVCLKAIAAVAILVKDADKLTLGQNITVIAPHALENIVRQPPDRWMTNARMTHYQSLLLTERVTFAPPAALNPATLLPEETDEPVTHDCHQLLIEETGVRKDLTDIPLTGEVLTWFTDGSSYVVEGKRMAGAAVVDGTRTIWASSLPEGTSAQKAELMALTQALRLAEGKSINIYTDSRYAFATAHVHGAIYKQRGWLTSAGREIKNKEEILSLLEALHLPKRLAIIHCPGHQKAKDPISRGNQMADRVAKQAAQGVNLLAGKRTADGSEFEKRTADGSEFESPKKKAKVE

SEQ ID NO: 120 - protein, 2082 aa, synthetic construct
  source 1..2082: note = Description of Artificial Sequence: Synthetic polypeptide
MPAAKRVKLDGGDKKYSIGLDIGTNSVGWAVITDEYKVPSKKFKVLGNTDRHSIKKNLIGALLFDSGETAEATRLKRTARRRYTRRKNRICYLQEIFSNEMAKVDDSFFHRLEESFLVEEDKKHERHPIFGNIVDEVAYHEKYPTIYHLRKKLVDSTDKADLRLIYLALAHMIKFRGHFLIEGDLNPDNSDVDKLFIQLVQTYNQLFEENPINASGVDAKAILSARLSKSRRLENLIAQLPGEKKNGLFGNLIALSLGLTPNFKSNFDLAEDAKLQLSKDTYDDDLDNLLAQIGDQYADLFLAAKNLSDAILLSDILRVNTEITKAPLSASMIKRYDEHHQDLTLLKALVRQQLPEKYKEIFFDQSKNGYAGYIDGGASQEEFYKFIKPILEKMDGTEELLVKLNREDLLRKQRTFDNGSIPHQIHLGELHAILRRQEDFYPFLKDNREKIEKILTFRIPYYVGPLARGNSRFAWMTRKSEETITPWNFEEVVDKGASAQSFIERMTNFDKNLPNEKVLPKHSLLYEYFTVYNELTKVKYVTEGMRKPAFLSGEQKKAIVDLLFKTNRKVTVKQLKEDYFKKIECFDSVEISGVEDRFNASLGTYHDLLKIIKDKDFLDNEENEDILEDIVLTLTLFEDREMIEERLKTYAHLFDDKVMKQLKRRRYTGWGRLSRKLINGIRDKQSGKTILDFLKSDGFANRNFMQLIHDDSLTFKEDIQKAQVSGQGDSLHEHIANLAGSPAIKKGILQTVKVVDELVKVMGRHKPENIVIEMARENQTTQKGQKNSRERMKRIEEGIKELGSQILKEHPVENTQLQNEKLYLYYLQNGRDMYVDQELDINRLSDYDVDHIVPQSFLKDDSIDNKVLTRSDKARGKSDNVPSEEVVKKMKNYWRQLLNAKLITQRKFDNLTKAERGGLSELDKAGFIKRQLVETRQITKHVAQILDSRMNTKYDENDKLIREVKVITLKSKLVSDFRKDFQFYKVREINNYHHAHDAYLNAVVGTALIKKYPKLESEFVYGDYKVYDVRKMIAKSEQEIGKATAKYFFYSNIMNFFKTEITLANGEIRKRPLIETNGETGEIVWDKGRDFATVRKVLSMPQVNIVKKTEVQTGGFSKESILPKRNSDKLIARKKDWDPKKYGGFDSPTVAYSVLVVAKVEKGKSKKLKSVKELLGITIMERSSFEKNPIDFLEAKGYKEVKKDLIIKLPKYSLFELENGRKRMLASAGELQKGNELALPSKYVNFLYLASHYEKLKGSPEDNEQKQLFVEQHKHYLDEIIEQISEFSKRVILADANLDKVLSAYNKHRDKPIREQAENIIHLFTLTNLGAPAAFKYFDTTIDRKRYTSTKEVLDATLIHQSITGLYETRIDLSQLGGDGGGSSGGTLQLDDEYRLYSPLVKPDQNIQFWLEQFPQAWAETAGMGLAKQVPPQVIQLKASATPVSVRQYPLSKEAQEGIRPHVQRLIQQGILVPVQSPWNTPLLPVRKPGTNDYRPVQDLREVNKRVQDIHPTVPNPYNLLCALPPQRSWYTVLDLKDAFFCLRLHPTSQPLFAFEWRDPGTGRTGQLTWTRLPQGFKNSPTIFNEALHRDLANFRIQHPQVTLLQYVDDLLLAGATKQDCLEGTKALLLELSDLGYRASAKKAQICRREVTYLGYSLRDGQRWLTEARKKTVVQIPAPTTAKQVREFLGTAGFCRLWIPGFATLAAPLYPLTKPKGEFSWAPEHQKAFDAIKKALLSAPALALPDVTKPFTLYVDERKGVARGVLTQTLGPWRRPVAYLSKKLDPVASGWPVCLKAIAAVAILVKDADKLTLGQNITVIAPHALENIVRQPPDRWMTNARMTHYQSLLLTERVTFAPPAALNPATLLPEETDEPVTHDCHQLLIEETGVRKDLTDIPLTGEVLTWFTDGSSYVVEGKRMAGAAVVDGTRTIWASSLPEGTSAQKAELMALTQALRLAEGKSINIYTDSRYAFATAHVHGAIYKQRGWLTSAGREIKNKEEILSLLEALHLPKRLAIIHCPGHQKAKDPISRGNQMADRVAKQAAQGVNLLAGKRTADGSEFEKRTADGSEFESPKKKAKVE

SEQ ID NO: 121 - protein, 2090 aa, synthetic construct
  source 1..2090: note = Description of Artificial Sequence: Synthetic polypeptide
MPAAKRVKLDGGDKKYSIGLDIGTNSVGWAVITDEYKVPSKKFKVLGNTDRHSIKKNLIGALLFDSGETAEATRLKRTARRRYTRRKNRICYLQEIFSNEMAKVDDSFFHRLEESFLVEEDKKHERHPIFGNIVDEVAYHEKYPTIYHLRKKLVDSTDKADLRLIYLALAHMIKFRGHFLIEGDLNPDNSDVDKLFIQLVQTYNQLFEENPINASGVDAKAILSARLSKSRRLENLIAQLPGEKKNGLFGNLIALSLGLTPNFKSNFDLAEDAKLQLSKDTYDDDLDNLLAQIGDQYADLFLAAKNLSDAILLSDILRVNTEITKAPLSASMIKRYDEHHQDLTLLKALVRQQLPEKYKEIFFDQSKNGYAGYIDGGASQEEFYKFIKPILEKMDGTEELLVKLNREDLLRKQRTFDNGSIPHQIHLGELHAILRRQEDFYPFLKDNREKIEKILTFRIPYYVGPLARGNSRFAWMTRKSEETITPWNFEEVVDKGASAQSFIERMTNFDKNLPNEKVLPKHSLLYEYFTVYNELTKVKYVTEGMRKPAFLSGEQKKAIVDLLFKTNRKVTVKQLKEDYFKKIECFDSVEISGVEDRFNASLGTYHDLLKIIKDKDFLDNEENEDILEDIVLTLTLFEDREMIEERLKTYAHLFDDKVMKQLKRRRYTGWGRLSRKLINGIRDKQSGKTILDFLKSDGFANRNFMQLIHDDSLTFKEDIQKAQVSGQGDSLHEHIANLAGSPAIKKGILQTVKVVDELVKVMGRHKPENIVIEMARENQTTQKGQKNSRERMKRIEEGIKELGSQILKEHPVENTQLQNEKLYLYYLQNGRDMYVDQELDINRLSDYDVDHIVPQSFLKDDSIDNKVLTRSDKARGKSDNVPSEEVVKKMKNYWRQLLNAKLITQRKFDNLTKAERGGLSELDKAGFIKRQLVETRQITKHVAQILDSRMNTKYDENDKLIREVKVITLKSKLVSDFRKDFQFYKVREINNYHHAHDAYLNAVVGTALIKKYPKLESEFVYGDYKVYDVRKMIAKSEQEIGKATAKYFFYSNIMNFFKTEITLANGEIRKRPLIETNGETGEIVWDKGRDFATVRKVLSMPQVNIVKKTEVQTGGFSKESILPKRNSDKLIARKKDWDPKKYGGFDSPTVAYSVLVVAKVEKGKSKKLKSVKELLGITIMERSSFEKNPIDFLEAKGYKEVKKDLIIKLPKYSLFELENGRKRMLASAGELQKGNELALPSKYVNFLYLASHYEKLKGSPEDNEQKQLFVEQHKHYLDEIIEQISEFSKRVILADANLDKVLSAYNKHRDKPIREQAENIIHLFTLTNLGAPAAFKYFDTTIDRKRYTSTKEVLDATLIHQSITGLYETRIDLSQLGGDGGGGGGSSEAAAKGGTLQLDDEYRLYSPLVKPDQNIQFWLEQFPQAWAETAGMGLAKQVPPQVIQLKASATPVSVRQYPLSKEAQEGIRPHVQRLIQQGILVPVQSPWNTPLLPVRKPGTNDYRPVQDLREVNKRVQDIHPTVPNPYNLLCALPPQRSWYTVLDLKDAFFCLRLHPTSQPLFAFEWRDPGTGRTGQLTWTRLPQGFKNSPTIFNEALHRDLANFRIQHPQVTLLQYVDDLLLAGATKQDCLEGTKALLLELSDLGYRASAKKAQICRREVTYLGYSLRDGQRWLTEARKKTVVQIPAPTTAKQVREFLGTAGFCRLWIPGFATLAAPLYPLTKPKGEFSWAPEHQKAFDAIKKALLSAPALALPDVTKPFTLYVDERKGVARGVLTQTLGPWRRPVAYLSKKLDPVASGWPVCLKAIAAVAILVKDADKLTLGQNITVIAPHALENIVRQPPDRWMTNARMTHYQSLLLTERVTFAPPAALNPATLLPEETDEPVTHDCHQLLIEETGVRKDLTDIPLTGEVLTWFTDGSSYVVEGKRMAGAAVVDGTRTIWASSLPEGTSAQKAELMALTQALRLAEGKSINIYTDSRYAFATAHVHGAIYKQRGWLTSAGREIKNKEEILSLLEALHLPKRLAIIHCPGHQKAKDPISRGNQMADRVAKQAAQGVNLLAGKRTADGSEFEKRTADGSEFESPKKKAKVE

SEQ ID NO: 122 - protein, 2095 aa, synthetic construct
  source 1..2095: note = Description of Artificial Sequence: Synthetic polypeptide
MPAAKRVKLDGGDKKYSIGLDIGTNSVGWAVITDEYKVPSKKFKVLGNTDRHSIKKNLIGALLFDSGETAEATRLKRTARRRYTRRKNRICYLQEIFSNEMAKVDDSFFHRLEESFLVEEDKKHERHPIFGNIVDEVAYHEKYPTIYHLRKKLVDSTDKADLRLIYLALAHMIKFRGHFLIEGDLNPDNSDVDKLFIQLVQTYNQLFEENPINASGVDAKAILSARLSKSRRLENLIAQLPGEKKNGLFGNLIALSLGLTPNFKSNFDLAEDAKLQLSKDTYDDDLDNLLAQIGDQYADLFLAAKNLSDAILLSDILRVNTEITKAPLSASMIKRYDEHHQDLTLLKALVRQQLPEKYKEIFFDQSKNGYAGYIDGGASQEEFYKFIKPILEKMDGTEELLVKLNREDLLRKQRTFDNGSIPHQIHLGELHAILRRQEDFYPFLKDNREKIEKILTFRIPYYVGPLARGNSRFAWMTRKSEETITPWNFEEVVDKGASAQSFIERMTNFDKNLPNEKVLPKHSLLYEYFTVYNELTKVKYVTEGMRKPAFLSGEQKKAIVDLLFKTNRKVTVKQLKEDYFKKIECFDSVEISGVEDRFNASLGTYHDLLKIIKDKDFLDNEENEDILEDIVLTLTLFEDREMIEERLKTYAHLFDDKVMKQLKRRRYTGWGRLSRKLINGIRDKQSGKTILDFLKSDGFANRNFMQLIHDDSLTFKEDIQKAQVSGQGDSLHEHIANLAGSPAIKKGILQTVKVVDELVKVMGRHKPENIVIEMARENQTTQKGQKNSRERMKRIEEGIKELGSQILKEHPVENTQLQNEKLYLYYLQNGRDMYVDQELDINRLSDYDVDHIVPQSFLKDDSIDNKVLTRSDKARGKSDNVPSEEVVKKMKNYWRQLLNAKLITQRKFDNLTKAERGGLSELDKAGFIKRQLVETRQITKHVAQILDSRMNTKYDENDKLIREVKVITLKSKLVSDFRKDFQFYKVREINNYHHAHDAYLNAVVGTALIKKYPKLESEFVYGDYKVYDVRKMIAKSEQEIGKATAKYFFYSNIMNFFKTEITLANGEIRKRPLIETNGETGEIVWDKGRDFATVRKVLSMPQVNIVKKTEVQTGGFSKESILPKRNSDKLIARKKDWDPKKYGGFDSPTVAYSVLVVAKVEKGKSKKLKSVKELLGITIMERSSFEKNPIDFLEAKGYKEVKKDLIIKLPKYSLFELENGRKRMLASAGELQKGNELALPSKYVNFLYLASHYEKLKGSPEDNEQKQLFVEQHKHYLDEIIEQISEFSKRVILADANLDKVLSAYNKHRDKPIREQAENIIHLFTLTNLGAPAAFKYFDTTIDRKRYTSTKEVLDATLIHQSITGLYETRIDLSQLGGDGGSGSETPGTSESATPESGGTLQLDDEYRLYSPLVKPDQNIQFWLEQFPQAWAETAGMGLAKQVPPQVIQLKASATPVSVRQYPLSKEAQEGIRPHVQRLIQQGILVPVQSPWNTPLLPVRKPGTNDYRPVQDLREVNKRVQDIHPTVPNPYNLLCALPPQRSWYTVLDLKDAFFCLRLHPTSQPLFAFEWRDPGTGRTGQLTWTRLPQGFKNSPTIFNEALHRDLANFRIQHPQVTLLQYVDDLLLAGATKQDCLEGTKALLLELSDLGYRASAKKAQICRREVTYLGYSLRDGQRWLTEARKKTVVQIPAPTTAKQVREFLGTAGFCRLWIPGFATLAAPLYPLTKPKGEFSWAPEHQKAFDAIKKALLSAPALALPDVTKPFTLYVDERKGVARGVLTQTLGPWRRPVAYLSKKLDPVASGWPVCLKAIAAVAILVKDADKLTLGQNITVIAPHALENIVRQPPDRWMTNARMTHYQSLLLTERVTFAPPAALNPATLLPEETDEPVTHDCHQLLIEETGVRKDLTDIPLTGEVLTWFTDGSSYVVEGKRMAGAAVVDGTRTIWASSLPEGTSAQKAELMALTQALRLAEGKSINIYTDSRYAFATAHVHGAIYKQRGWLTSAGREIKNKEEILSLLEALHLPKRLAIIHCPGHQKAKDPISRGNQMADRVAKQAAQGVNLLAGKRTADGSEFEKRTADGSEFESPKKKAKVE

SEQ ID NO: 123 - protein, 2085 aa, synthetic construct
  source 1..2085: note = Description of Artificial Sequence: Synthetic polypeptide
MPAAKRVKLDGGDKKYSIGLDIGTNSVGWAVITDEYKVPSKKFKVLGNTDRHSIKKNLIGALLFDSGETAEATRLKRTARRRYTRRKNRICYLQEIFSNEMAKVDDSFFHRLEESFLVEEDKKHERHPIFGNIVDEVAYHEKYPTIYHLRKKLVDSTDKADLRLIYLALAHMIKFRGHFLIEGDLNPDNSDVDKLFIQLVQTYNQLFEENPINASGVDAKAILSARLSKSRRLENLIAQLPGEKKNGLFGNLIALSLGLTPNFKSNFDLAEDAKLQLSKDTYDDDLDNLLAQIGDQYADLFLAAKNLSDAILLSDILRVNTEITKAPLSASMIKRYDEHHQDLTLLKALVRQQLPEKYKEIFFDQSKNGYAGYIDGGASQEEFYKFIKPILEKMDGTEELLVKLNREDLLRKQRTFDNGSIPHQIHLGELHAILRRQEDFYPFLKDNREKIEKILTFRIPYYVGPLARGNSRFAWMTRKSEETITPWNFEEVVDKGASAQSFIERMTNFDKNLPNEKVLPKHSLLYEYFTVYNELTKVKYVTEGMRKPAFLSGEQKKAIVDLLFKTNRKVTVKQLKEDYFKKIECFDSVEISGVEDRFNASLGTYHDLLKIIKDKDFLDNEENEDILEDIVLTLTLFEDREMIEERLKTYAHLFDDKVMKQLKRRRYTGWGRLSRKLINGIRDKQSGKTILDFLKSDGFANRNFMQLIHDDSLTFKEDIQKAQVSGQGDSLHEHIANLAGSPAIKKGILQTVKVVDELVKVMGRHKPENIVIEMARENQTTQKGQKNSRERMKRIEEGIKELGSQILKEHPVENTQLQNEKLYLYYLQNGRDMYVDQELDINRLSDYDVDHIVPQSFLKDDSIDNKVLTRSDKARGKSDNVPSEEVVKKMKNYWRQLLNAKLITQRKFDNLTKAERGGLSELDKAGFIKRQLVETRQITKHVAQILDSRMNTKYDENDKLIREVKVITLKSKLVSDFRKDFQFYKVREINNYHHAHDAYLNAVVGTALIKKYPKLESEFVYGDYKVYDVRKMIAKSEQEIGKATAKYFFYSNIMNFFKTEITLANGEIRKRPLIETNGETGEIVWDKGRDFATVRKVLSMPQVNIVKKTEVQTGGFSKESILPKRNSDKLIARKKDWDPKKYGGFDSPTVAYSVLVVAKVEKGKSKKLKSVKELLGITIMERSSFEKNPIDFLEAKGYKEVKKDLIIKLPKYSLFELENGRKRMLASAGELQKGNELALPSKYVNFLYLASHYEKLKGSPEDNEQKQLFVEQHKHYLDEIIEQISEFSKRVILADANLDKVLSAYNKHRDKPIREQAENIIHLFTLTNLGAPAAFKYFDTTIDRKRYTSTKEVLDATLIHQSITGLYETRIDLSQLGGDGGPAPGSSGGTLQLDDEYRLYSPLVKPDQNIQFWLEQFPQAWAETAGMGLAKQVPPQVIQLKASATPVSVRQYPLSKEAQEGIRPHVQRLIQQGILVPVQSPWNTPLLPVRKPGTNDYRPVQDLREVNKRVQDIHPTVPNPYNLLCALPPQRSWYTVLDLKDAFFCLRLHPTSQPLFAFEWRDPGTGRTGQLTWTRLPQGFKNSPTIFNEALHRDLANFRIQHPQVTLLQYVDDLLLAGATKQDCLEGTKALLLELSDLGYRASAKKAQICRREVTYLGYSLRDGQRWLTEARKKTVVQIPAPTTAKQVREFLGTAGFCRLWIPGFATLAAPLYPLTKPKGEFSWAPEHQKAFDAIKKALLSAPALALPDVTKPFTLYVDERKGVARGVLTQTLGPWRRPVAYLSKKLDPVASGWPVCLKAIAAVAILVKDADKLTLGQNITVIAPHALENIVRQPPDRWMTNARMTHYQSLLLTERVTFAPPAALNPATLLPEETDEPVTHDCHQLLIEETGVRKDLTDIPLTGEVLTWFTDGSSYVVEGKRMAGAAVVDGTRTIWASSLPEGTSAQKAELMALTQALRLAEGKSINIYTDSRYAFATAHVHGAIYKQRGWLTSAGREIKNKEEILSLLEALHLPKRLAIIHCPGHQKAKDPISRGNQMADRVAKQAAQGVNLLAGKRTADGSEFEKRTADGSEFESPKKKAKVE

SEQ ID NO: 124 - protein, 2090 aa, synthetic construct
  source 1..2090: note = Description of Artificial Sequence: Synthetic polypeptide
MPAAKRVKLDGGDKKYSIGLDIGTNSVGWAVITDEYKVPSKKFKVLGNTDRHSIKKNLIGALLFDSGETAEATRLKRTARRRYTRRKNRICYLQEIFSNEMAKVDDSFFHRLEESFLVEEDKKHERHPIFGNIVDEVAYHEKYPTIYHLRKKLVDSTDKADLRLIYLALAHMIKFRGHFLIEGDLNPDNSDVDKLFIQLVQTYNQLFEENPINASGVDAKAILSARLSKSRRLENLIAQLPGEKKNGLFGNLIALSLGLTPNFKSNFDLAEDAKLQLSKDTYDDDLDNLLAQIGDQYADLFLAAKNLSDAILLSDILRVNTEITKAPLSASMIKRYDEHHQDLTLLKALVRQQLPEKYKEIFFDQSKNGYAGYIDGGASQEEFYKFIKPILEKMDGTEELLVKLNREDLLRKQRTFDNGSIPHQIHLGELHAILRRQEDFYPFLKDNREKIEKILTFRIPYYVGPLARGNSRFAWMTRKSEETITPWNFEEVVDKGASAQSFIERMTNFDKNLPNEKVLPKHSLLYEYFTVYNELTKVKYVTEGMRKPAFLSGEQKKAIVDLLFKTNRKVTVKQLKEDYFKKIECFDSVEISGVEDRFNASLGTYHDLLKIIKDKDFLDNEENEDILEDIVLTLTLFEDREMIEERLKTYAHLFDDKVMKQLKRRRYTGWGRLSRKLINGIRDKQSGKTILDFLKSDGFANRNFMQLIHDDSLTFKEDIQKAQVSGQGDSLHEHIANLAGSPAIKKGILQTVKVVDELVKVMGRHKPENIVIEMARENQTTQKGQKNSRERMKRIEEGIKELGSQILKEHPVENTQLQNEKLYLYYLQNGRDMYVDQELDINRLSDYDVDHIVPQSFLKDDSIDNKVLTRSDKARGKSDNVPSEEVVKKMKNYWRQLLNAKLITQRKFDNLTKAERGGLSELDKAGFIKRQLVETRQITKHVAQILDSRMNTKYDENDKLIREVKVITLKSKLVSDFRKDFQFYKVREINNYHHAHDAYLNAVVGTALIKKYPKLESEFVYGDYKVYDVRKMIAKSEQEIGKATAKYFFYSNIMNFFKTEITLANGEIRKRPLIETNGETGEIVWDKGRDFATVRKVLSMPQVNIVKKTEVQTGGFSKESILPKRNSDKLIARKKDWDPKKYGGFDSPTVAYSVLVVAKVEKGKSKKLKSVKELLGITIMERSSFEKNPIDFLEAKGYKEVKKDLIIKLPKYSLFELENGRKRMLASAGELQKGNELALPSKYVNFLYLASHYEKLKGSPEDNEQKQLFVEQHKHYLDEIIEQISEFSKRVILADANLDKVLSAYNKHRDKPIREQAENIIHLFTLTNLGAPAAFKYFDTTIDRKRYTSTKEVLDATLIHQSITGLYETRIDLSQLGGDGGPAPEAAAKGGGGGTLQLDDEYRLYSPLVKPDQNIQFWLEQFPQAWAETAGMGLAKQVPPQVIQLKASATPVSVRQYPLSKEAQEGIRPHVQRLIQQGILVPVQSPWNTPLLPVRKPGTNDYRPVQDLREVNKRVQDIHPTVPNPYNLLCALPPQRSWYTVLDLKDAFFCLRLHPTSQPLFAFEWRDPGTGRTGQLTWTRLPQGFKNSPTIFNEALHRDLANFRIQHPQVTLLQYVDDLLLAGATKQDCLEGTKALLLELSDLGYRASAKKAQICRREVTYLGYSLRDGQRWLTEARKKTVVQIPAPTTAKQVREFLGTAGFCRLWIPGFATLAAPLYPLTKPKGEFSWAPEHQKAFDAIKKALLSAPALALPDVTKPFTLYVDERKGVARGVLTQTLGPWRRPVAYLSKKLDPVASGWPVCLKAIAAVAILVKDADKLTLGQNITVIAPHALENIVRQPPDRWMTNARMTHYQSLLLTERVTFAPPAALNPATLLPEETDEPVTHDCHQLLIEETGVRKDLTDIPLTGEVLTWFTDGSSYVVEGKRMAGAAVVDGTRTIWASSLPEGTSAQKAELMALTQALRLAEGKSINIYTDSRYAFATAHVHGAIYKQRGWLTSAGREIKNKEEILSLLEALHLPKRLAIIHCPGHQKAKDPISRGNQMADRVAKQAAQGVNLLAGKRTADGSEFEKRTADGSEFESPKKKAKVE

SEQ ID NO: 125 - protein, 2085 aa, synthetic construct
  source 1..2085: note = Description of Artificial Sequence: Synthetic polypeptide
MPAAKRVKLDGGDKKYSIGLDIGTNSVGWAVITDEYKVPSKKFKVLGNTDRHSIKKNLIGALLFDSGETAEATRLKRTARRRYTRRKNRICYLQEIFSNEMAKVDDSFFHRLEESFLVEEDKKHERHPIFGNIVDEVAYHEKYPTIYHLRKKLVDSTDKADLRLIYLALAHMIKFRGHFLIEGDLNPDNSDVDKLFIQLVQTYNQLFEENPINASGVDAKAILSARLSKSRRLENLIAQLPGEKKNGLFGNLIALSLGLTPNFKSNFDLAEDAKLQLSKDTYDDDLDNLLAQIGDQYADLFLAAKNLSDAILLSDILRVNTEITKAPLSASMIKRYDEHHQDLTLLKALVRQQLPEKYKEIFFDQSKNGYAGYIDGGASQEEFYKFIKPILEKMDGTEELLVKLNREDLLRKQRTFDNGSIPHQIHLGELHAILRRQEDFYPFLKDNREKIEKILTFRIPYYVGPLARGNSRFAWMTRKSEETITPWNFEEVVDKGASAQSFIERMTNFDKNLPNEKVLPKHSLLYEYFTVYNELTKVKYVTEGMRKPAFLSGEQKKAIVDLLFKTNRKVTVKQLKEDYFKKIECFDSVEISGVEDRFNASLGTYHDLLKIIKDKDFLDNEENEDILEDIVLTLTLFEDREMIEERLKTYAHLFDDKVMKQLKRRRYTGWGRLSRKLINGIRDKQSGKTILDFLKSDGFANRNFMQLIHDDSLTFKEDIQKAQVSGQGDSLHEHIANLAGSPAIKKGILQTVKVVDELVKVMGRHKPENIVIEMARENQTTQKGQKNSRERMKRIEEGIKELGSQILKEHPVENTQLQNEKLYLYYLQNGRDMYVDQELDINRLSDYDVDHIVPQSFLKDDSIDNKVLTRSDKARGKSDNVPSEEVVKKMKNYWRQLLNAKLITQRKFDNLTKAERGGLSELDKAGFIKRQLVETRQITKHVAQILDSRMNTKYDENDKLIREVKVITLKSKLVSDFRKDFQFYKVREINNYHHAHDAYLNAVVGTALIKKYPKLESEFVYGDYKVYDVRKMIAKSEQEIGKATAKYFFYSNIMNFFKTEITLANGEIRKRPLIETNGETGEIVWDKGRDFATVRKVLSMPQVNIVKKTEVQTGGFSKESILPKRNSDKLIARKKDWDPKKYGGFDSPTVAYSVLVVAKVEKGKSKKLKSVKELLGITIMERSSFEKNPIDFLEAKGYKEVKKDLIIKLPKYSLFELENGRKRMLASAGELQKGNELALPSKYVNFLYLASHYEKLKGSPEDNEQKQLFVEQHKHYLDEIIEQISEFSKRVILADANLDKVLSAYNKHRDKPIREQAENIIHLFTLTNLGAPAAFKYFDTTIDRKRYTSTKEVLDATLIHQSITGLYETRIDLSQLGGDGGPAPGGSGGTLQLDDEYRLYSPLVKPDQNIQFWLEQFPQAWAETAGMGLAKQVPPQVIQLKASATPVSVRQYPLSKEAQEGIRPHVQRLIQQGILVPVQSPWNTPLLPVRKPGTNDYRPVQDLREVNKRVQDIHPTVPNPYNLLCALPPQRSWYTVLDLKDAFFCLRLHPTSQPLFAFEWRDPGTGRTGQLTWTRLPQGFKNSPTIFNEALHRDLANFRIQHPQVTLLQYVDDLLLAGATKQDCLEGTKALLLELSDLGYRASAKKAQICRREVTYLGYSLRDGQRWLTEARKKTVVQIPAPTTAKQVREFLGTAGFCRLWIPGFATLAAPLYPLTKPKGEFSWAPEHQKAFDAIKKALLSAPALALPDVTKPFTLYVDERKGVARGVLTQTLGPWRRPVAYLSKKLDPVASGWPVCLKAIAAVAILVKDADKLTLGQNITVIAPHALENIVRQPPDRWMTNARMTHYQSLLLTERVTFAPPAALNPATLLPEETDEPVTHDCHQLLIEETGVRKDLTDIPLTGEVLTWFTDGSSYVVEGKRMAGAAVVDGTRTIWASSLPEGTSAQKAELMALTQALRLAEGKSINIYTDSRYAFATAHVHGAIYKQRGWLTSAGREIKNKEEILSLLEALHLPKRLAIIHCPGHQKAKDPISRGNQMADRVAKQAAQGVNLLAGKRTADGSEFEKRTADGSEFESPKKKAKVE

SEQ ID NO: 126 - protein, 2087 aa, synthetic construct
  source 1..2087: note = Description of Artificial Sequence: Synthetic polypeptide
MPAAKRVKLDGGDKKYSIGLDIGTNSVGWAVITDEYKVPSKKFKVLGNTDRHSIKKNLIGALLFDSGETAEATRLKRTARRRYTRRKNRICYLQEIFSNEMAKVDDSFFHRLEESFLVEEDKKHERHPIFGNIVDEVAYHEKYPTIYHLRKKLVDSTDKADLRLIYLALAHMIKFRGHFLIEGDLNPDNSDVDKLFIQLVQTYNQLFEENPINASGVDAKAILSARLSKSRRLENLIAQLPGEKKNGLFGNLIALSLGLTPNFKSNFDLAEDAKLQLSKDTYDDDLDNLLAQIGDQYADLFLAAKNLSDAILLSDILRVNTEITKAPLSASMIKRYDEHHQDLTLLKALVRQQLPEKYKEIFFDQSKNGYAGYIDGGASQEEFYKFIKPILEKMDGTEELLVKLNREDLLRKQRTFDNGSIPHQIHLGELHAILRRQEDFYPFLKDNREKIEKILTFRIPYYVGPLARGNSRFAWMTRKSEETITPWNFEEVVDKGASAQSFIERMTNFDKNLPNEKVLPKHSLLYEYFTVYNELTKVKYVTEGMRKPAFLSGEQKKAIVDLLFKTNRKVTVKQLKEDYFKKIECFDSVEISGVEDRFNASLGTYHDLLKIIKDKDFLDNEENEDILEDIVLTLTLFEDREMIEERLKTYAHLFDDKVMKQLKRRRYTGWGRLSRKLINGIRDKQSGKTILDFLKSDGFANRNFMQLIHDDSLTFKEDIQKAQVSGQGDSLHEHIANLAGSPAIKKGILQTVKVVDELVKVMGRHKPENIVIEMARENQTTQKGQKNSRERMKRIEEGIKELGSQILKEHPVENTQLQNEKLYLYYLQNGRDMYVDQELDINRLSDYDVDHIVPQSFLKDDSIDNKVLTRSDKARGKSDNVPSEEVVKKMKNYWRQLLNAKLITQRKFDNLTKAERGGLSELDKAGFIKRQLVETRQITKHVAQILDSRMNTKYDENDKLIREVKVITLKSKLVSDFRKDFQFYKVREINNYHHAHDAYLNAVVGTALIKKYPKLESEFVYGDYKVYDVRKMIAKSEQEIGKATAKYFFYSNIMNFFKTEITLANGEIRKRPLIETNGETGEIVWDKGRDFATVRKVLSMPQVNIVKKTEVQTGGFSKESILPKRNSDKLIARKKDWDPKKYGGFDSPTVAYSVLVVAKVEKGKSKKLKSVKELLGITIMERSSFEKNPIDFLEAKGYKEVKKDLIIKLPKYSLFELENGRKRMLASAGELQKGNELALPSKYVNFLYLASHYEKLKGSPEDNEQKQLFVEQHKHYLDEIIEQISEFSKRVILADANLDKVLSAYNKHRDKPIREQAENIIHLFTLTNLGAPAAFKYFDTTIDRKRYTSTKEVLDATLIHQSITGLYETRIDLSQLGGDGGEAAAKGGGGGTLQLDDEYRLYSPLVKPDQNIQFWLEQFPQAWAETAGMGLAKQVPPQVIQLKASATPVSVRQYPLSKEAQEGIRPHVQRLIQQGILVPVQSPWNTPLLPVRKPGTNDYRPVQDLREVNKRVQDIHPTVPNPYNLLCALPPQRSWYTVLDLKDAFFCLRLHPTSQPLFAFEWRDPGTGRTGQLTWTRLPQGFKNSPTIFNEALHRDLANFRIQHPQVTLLQYVDDLLLAGATKQDCLEGTKALLLELSDLGYRASAKKAQICRREVTYLGYSLRDGQRWLTEARKKTVVQIPAPTTAKQVREFLGTAGFCRLWIPGFATLAAPLYPLTKPKGEFSWAPEHQKAFDAIKKALLSAPALALPDVTKPFTLYVDERKGVARGVLTQTLGPWRRPVAYLSKKLDPVASGWPVCLKAIAAVAILVKDADKLTLGQNITVIAPHALENIVRQPPDRWMTNARMTHYQSLLLTERVTFAPPAALNPATLLPEETDEPVTHDCHQLLIEETGVRKDLTDIPLTGEVLTWFTDGSSYVVEGKRMAGAAVVDGTRTIWASSLPEGTSAQKAELMALTQALRLAEGKSINIYTDSRYAFATAHVHGAIYKQRGWLTSAGREIKNKEEILSLLEALHLPKRLAIIHCPGHQKAKDPISRGNQMADRVAKQAAQGVNLLAGKRTADGSEFEKRTADGSEFESPKKKAKVE

SEQ ID NO: 127 - protein, 2090 aa, synthetic construct
  source 1..2090: note = Description of Artificial Sequence: Synthetic polypeptide
MPAAKRVKLDGGDKKYSIGLDIGTNSVGWAVITDEYKVPSKKFKVLGNTDRHSIKKNLIGALLFDSGETAEATRLKRTARRRYTRRKNRICYLQEIFSNEMAKVDDSFFHRLEESFLVEEDKKHERHPIFGNIVDEVAYHEKYPTIYHLRKKLVDSTDKADLRLIYLALAHMIKFRGHFLIEGDLNPDNSDVDKLFIQLVQTYNQLFEENPINASGVDAKAILSARLSKSRRLENLIAQLPGEKKNGLFGNLIALSLGLTPNFKSNFDLAEDAKLQLSKDTYDDDLDNLLAQIGDQYADLFLAAKNLSDAILLSDILRVNTEITKAPLSASMIKRYDEHHQDLTLLKALVRQQLPEKYKEIFFDQSKNGYAGYIDGGASQEEFYKFIKPILEKMDGTEELLVKLNREDLLRKQRTFDNGSIPHQIHLGELHAILRRQEDFYPFLKDNREKIEKILTFRIPYYVGPLARGNSRFAWMTRKSEETITPWNFEEVVDKGASAQSFIERMTNFDKNLPNEKVLPKHSLLYEYFTVYNELTKVKYVTEGMRKPAFLSGEQKKAIVDLLFKTNRKVTVKQLKEDYFKKIECFDSVEISGVEDRFNASLGTYHDLLKIIKDKDFLDNEENEDILEDIVLTLTLFEDREMIEERLKTYAHLFDDKVMKQLKRRRYTGWGRLSRKLINGIRDKQSGKTILDFLKSDGFANRNFMQLIHDDSLTFKEDIQKAQVSGQGDSLHEHIANLAGSPAIKKGILQTVKVVDELVKVMGRHKPENIVIEMARENQTTQKGQKNSRERMKRIEEGIKELGSQILKEHPVENTQLQNEKLYLYYLQNGRDMYVDQELDINRLSDYDVDHIVPQSFLKDDSIDNKVLTRSDKARGKSDNVPSEEVVKKMKNYWRQLLNAKLITQRKFDNLTKAERGGLSELDKAGFIKRQLVETRQITKHVAQILDSRMNTKYDENDKLIREVKVITLKSKLVSDFRKDFQFYKVREINNYHHAHDAYLNAVVGTALIKKYPKLESEFVYGDYKVYDVRKMIAKSEQEIGKATAKYFFYSNIMNFFKTEITLANGEIRKRPLIETNGETGEIVWDKGRDFATVRKVLSMPQVNIVKKTEVQTGGFSKESILPKRNSDKLIARKKDWDPKKYGGFDSPTVAYSVLVVAKVEKGKSKKLKSVKELLGITIMERSSFEKNPIDFLEAKGYKEVKKDLIIKLPKYSLFELENGRKRMLASAGELQKGNELALPSKYVNFLYLASHYEKLKGSPEDNEQKQLFVEQHKHYLDEIIEQISEFSKRVILADANLDKVLSAYNKHRDKPIREQAENIIHLFTLTNLGAPAAFKYFDTTIDRKRYTSTKEVLDATLIHQSITGLYETRIDLSQLGGDGGPAPGGGEAAAKGGTLQLDDEYRLYSPLVKPDQNIQFWLEQFPQAWAETAGMGLAKQVPPQVIQLKASATPVSVRQYPLSKEAQEGIRPHVQRLIQQGILVPVQSPWNTPLLPVRKPGTNDYRPVQDLREVNKRVQDIHPTVPNPYNLLCALPPQRSWYTVLDLKDAFFCLRLHPTSQPLFAFEWRDPGTGRTGQLTWTRLPQGFKNSPTIFNEALHRDLANFRIQHPQVTLLQYVDDLLLAGATKQDCLEGTKALLLELSDLGYRASAKKAQICRREVTYLGYSLRDGQRWLTEARKKTVVQIPAPTTAKQVREFLGTAGFCRLWIPGFATLAAPLYPLTKPKGEFSWAPEHQKAFDAIKKALLSAPALALPDVTKPFTLYVDERKGVARGVLTQTLGPWRRPVAYLSKKLDPVASGWPVCLKAIAAVAILVKDADKLTLGQNITVIAPHALENIVRQPPDRWMTNARMTHYQSLLLTERVTFAPPAALNPATLLPEETDEPVTHDCHQLLIEETGVRKDLTDIPLTGEVLTWFTDGSSYVVEGKRMAGAAVVDGTRTIWASSLPEGTSAQKAELMALTQALRLAEGKSINIYTDSRYAFATAHVHGAIYKQRGWLTSAGREIKNKEEILSLLEALHLPKRLAIIHCPGHQKAKDPISRGNQMADRVAKQAAQGVNLLAGKRTADGSEFEKRTADGSEFESPKKKAKVE

SEQ ID NO: 128 - protein, 2087 aa, synthetic construct
  source 1..2087: note = Description of Artificial Sequence: Synthetic polypeptide
MPAAKRVKLDGGDKKYSIGLDIGTNSVGWAVITDEYKVPSKKFKVLGNTDRHSIKKNLIGALLFDSGETAEATRLKRTARRRYTRRKNRICYLQEIFSNEMAKVDDSFFHRLEESFLVEEDKKHERHPIFGNIVDEVAYHEKYPTIYHLRKKLVDSTDKADLRLIYLALAHMIKFRGHFLIEGDLNPDNSDVDKLFIQLVQTYNQLFEENPINASGVDAKAILSARLSKSRRLENLIAQLPGEKKNGLFGNLIALSLGLTPNFKSNFDLAEDAKLQLSKDTYDDDLDNLLAQIGDQYADLFLAAKNLSDAILLSDILRVNTEITKAPLSASMIKRYDEHHQDLTLLKALVRQQLPEKYKEIFFDQSKNGYAGYIDGGASQEEFYKFIKPILEKMDGTEELLVKLNREDLLRKQRTFDNGSIPHQIHLGELHAILRRQEDFYPFLKDNREKIEKILTFRIPYYVGPLARGNSRFAWMTRKSEETITPWNFEEVVDKGASAQSFIERMTNFDKNLPNEKVLPKHSLLYEYFTVYNELTKVKYVTEGMRKPAFLSGEQKKAIVDLLFKTNRKVTVKQLKEDYFKKIECFDSVEISGVEDRFNASLGTYHDLLKIIKDKDFLDNEENEDILEDIVLTLTLFEDREMIEERLKTYAHLFDDKVMKQLKRRRYTGWGRLSRKLINGIRDKQSGKTILDFLKSDGFANRNFMQLIHDDSLTFKEDIQKAQVSGQGDSLHEHIANLAGSPAIKKGILQTVKVVDELVKVMGRHKPENIVIEMARENQTTQKGQKNSRERMKRIEEGIKELGSQILKEHPVENTQLQNEKLYLYYLQNGRDMYVDQELDINRLSDYDVDHIVPQSFLKDDSIDNKVLTRSDKARGKSDNVPSEEVVKKMKNYWRQLLNAKLITQRKFDNLTKAERGGLSELDKAGFIKRQLVETRQITKHVAQILDSRMNTKYDENDKLIREVKVITLKSKLVSDFRKDFQFYKVREINNYHHAHDAYLNAVVGTALIKKYPKLESEFVYGDYKVYDVRKMIAKSEQEIGKATAKYFFYSNIMNFFKTEITLANGEIRKRPLIETNGETGEIVWDKGRDFATVRKVLSMPQVNIVKKTEVQTGGFSKESILPKRNSDKLIARKKDWDPKKYGGFDSPTVAYSVLVVAKVEKGKSKKLKSVKELLGITIMERSSFEKNPIDFLEAKGYKEVKKDLIIKLPKYSLFELENGRKRMLASAGELQKGNELALPSKYVNFLYLASHYEKLKGSPEDNEQKQLFVEQHKHYLDEIIEQISEFSKRVILADANLDKVLSAYNKHRDKPIREQAENIIHLFTLTNLGAPAAFKYFDTTIDRKRYTSTKEVLDATLIHQSITGLYETRIDLSQLGGDGGGSSEAAAKGGTLQLDDEYRLYSPLVKPDQNIQFWLEQFPQAWAETAGMGLAKQVPPQVIQLKASATPVSVRQYPLSKEAQEGIRPHVQRLIQQGILVPVQSPWNTPLLPVRKPGTNDYRPVQDLREVNKRVQDIHPTVPNPYNLLCALPPQRSWYTVLDLKDAFFCLRLHPTSQPLFAFEWRDPGTGRTGQLTWTRLPQGFKNSPTIFNEALHRDLANFRIQHPQVTLLQYVDDLLLAGATKQDCLEGTKALLLELSDLGYRASAKKAQICRREVTYLGYSLRDGQRWLTEARKKTVVQIPAPTTAKQVREFLGTAGFCRLWIPGFATLAAPLYPLTKPKGEFSWAPEHQKAFDAIKKALLSAPALALPDVTKPFTLYVDERKGVARGVLTQTLGPWRRPVAYLSKKLDPVASGWPVCLKAIAAVAILVKDADKLTLGQNITVIAPHALENIVRQPPDRWMTNARMTHYQSLLLTERVTFAPPAALNPATLLPEETDEPVTHDCHQLLIEETGVRKDLTDIPLTGEVLTWFTDGSSYVVEGKRMAGAAVVDGTRTIWASSLPEGTSAQKAELMALTQALRLAEGKSINIYTDSRYAFATAHVHGAIYKQRGWLTSAGREIKNKEEILSLLEALHLPKRLAIIHCPGHQKAKDPISRGNQMADRVAKQAAQGVNLLAGKRTADGSEFEKRTADGSEFESPKKKAKVE

SEQ ID NO: 129 - protein, 2088 aa, synthetic construct
  source 1..2088: note = Description of Artificial Sequence: Synthetic polypeptide
MPAAKRVKLDGGDKKYSIGLDIGTNSVGWAVITDEYKVPSKKFKVLGNTDRHSIKKNLIGALLFDSGETAEATRLKRTARRRYTRRKNRICYLQEIFSNEMAKVDDSFFHRLEESFLVEEDKKHERHPIFGNIVDEVAYHEKYPTIYHLRKKLVDSTDKADLRLIYLALAHMIKFRGHFLIEGDLNPDNSDVDKLFIQLVQTYNQLFEENPINASGVDAKAILSARLSKSRRLENLIAQLPGEKKNGLFGNLIALSLGLTPNFKSNFDLAEDAKLQLSKDTYDDDLDNLLAQIGDQYADLFLAAKNLSDAILLSDILRVNTEITKAPLSASMIKRYDEHHQDLTLLKALVRQQLPEKYKEIFFDQSKNGYAGYIDGGASQEEFYKFIKPILEKMDGTEELLVKLNREDLLRKQRTFDNGSIPHQIHLGELHAILRRQEDFYPFLKDNREKIEKILTFRIPYYVGPLARGNSRFAWMTRKSEETITPWNFEEVVDKGASAQSFIERMTNFDKNLPNEKVLPKHSLLYEYFTVYNELTKVKYVTEGMRKPAFLSGEQKKAIVDLLFKTNRKVTVKQLKEDYFKKIECFDSVEISGVEDRFNASLGTYHDLLKIIKDKDFLDNEENEDILEDIVLTLTLFEDREMIEERLKTYAHLFDDKVMKQLKRRRYTGWGRLSRKLINGIRDKQSGKTILDFLKSDGFANRNFMQLIHDDSLTFKEDIQKAQVSGQGDSLHEHIANLAGSPAIKKGILQTVKVVDELVKVMGRHKPENIVIEMARENQTTQKGQKNSRERMKRIEEGIKELGSQILKEHPVENTQLQNEKLYLYYLQNGRDMYVDQELDINRLSDYDVDHIVPQSFLKDDSIDNKVLTRSDKARGKSDNVPSEEVVKKMKNYWRQLLNAKLITQRKFDNLTKAERGGLSELDKAGFIKRQLVETRQITKHVAQILDSRMNTKYDENDKLIREVKVITLKSKLVSDFRKDFQFYKVREINNYHHAHDAYLNAVVGTALIKKYPKLESEFVYGDYKVYDVRKMIAKSEQEIGKATAKYFFYSNIMNFFKTEITLANGEIRKRPLIETNGETGEIVWDKGRDFATVRKVLSMPQVNIVKKTEVQTGGFSKESILPKRNSDKLIARKKDWDPKKYGGFDSPTVAYSVLVVAKVEKGKSKKLKSVKELLGITIMERSSFEKNPIDFLEAKGYKEVKKDLIIKLPKYSLFELENGRKRMLASAGELQKGNELALPSKYVNFLYLASHYEKLKGSPEDNEQKQLFVEQHKHYLDEIIEQISEFSKRVILADANLDKVLSAYNKHRDKPIREQAENIIHLFTLTNLGAPAAFKYFDTTIDRKRYTSTKEVLDATLIHQSITGLYETRIDLSQLGGDGGPAPGSSGGGGGTLQLDDEYRLYSPLVKPDQNIQFWLEQFPQAWAETAGMGLAKQVPPQVIQLKASATPVSVRQYPLSKEAQEGIRPHVQRLIQQGILVPVQSPWNTPLLPVRKPGTNDYRPVQDLREVNKRVQDIHPTVPNPYNLLCALPPQRSWYTVLDLKDAFFCLRLHPTSQPLFAFEWRDPGTGRTGQLTWTRLPQGFKNSPTIFNEALHRDLANFRIQHPQVTLLQYVDDLLLAGATKQDCLEGTKALLLELSDLGYRASAKKAQICRREVTYLGYSLRDGQRWLTEARKKTVVQIPAPTTAKQVREFLGTAGFCRLWIPGFATLAAPLYPLTKPKGEFSWAPEHQKAFDAIKKALLSAPALALPDVTKPFTLYVDERKGVARGVLTQTLGPWRRPVAYLSKKLDPVASGWPVCLKAIAAVAILVKDADKLTLGQNITVIAPHALENIVRQPPDRWMTNARMTHYQSLLLTERVTFAPPAALNPATLLPEETDEPVTHDCHQLLIEETGVRKDLTDIPLTGEVLTWFTDGSSYVVEGKRMAGAAVVDGTRTIWASSLPEGTSAQKAELMALTQALRLAEGKSINIYTDSRYAFATAHVHGAIYKQRGWLTSAGREIKNKEEILSLLEALHLPKRLAIIHCPGHQKAKDPISRGNQMADRVAKQAAQGVNLLAGKRTADGSEFEKRTADGSEFESPKKKAKVE

SEQ ID NO: 130 - protein, 2088 aa, synthetic construct
  source 1..2088: note = Description of Artificial Sequence: Synthetic polypeptide
MPAAKRVKLDGGDKKYSIGLDIGTNSVGWAVITDEYKVPSKKFKVLGNTDRHSIKKNLIGALLFDSGETAEATRLKRTARRRYTRRKNRICYLQEIFSNEMAKVDDSFFHRLEESFLVEEDKKHERHPIFGNIVDEVAYHEKYPTIYHLRKKLVDSTDKADLRLIYLALAHMIKFRGHFLIEGDLNPDNSDVDKLFIQLVQTYNQLFEENPINASGVDAKAILSARLSKSRRLENLIAQLPGEKKNGLFGNLIALSLGLTPNFKSNFDLAEDAKLQLSKDTYDDDLDNLLAQIGDQYADLFLAAKNLSDAILLSDILRVNTEITKAPLSASMIKRYDEHHQDLTLLKALVRQQLPEKYKEIFFDQSKNGYAGYIDGGASQEEFYKFIKPILEKMDGTEELLVKLNREDLLRKQRTFDNGSIPHQIHLGELHAILRRQEDFYPFLKDNREKIEKILTFRIPYYVGPLARGNSRFAWMTRKSEETITPWNFEEVVDKGASAQSFIERMTNFDKNLPNEKVLPKHSLLYEYFTVYNELTKVKYVTEGMRKPAFLSGEQKKAIVDLLFKTNRKVTVKQLKEDYFKKIECFDSVEISGVEDRFNASLGTYHDLLKIIKDKDFLDNEENEDILEDIVLTLTLFEDREMIEERLKTYAHLFDDKVMKQLKRRRYTGWGRLSRKLINGIRDKQSGKTILDFLKSDGFANRNFMQLIHDDSLTFKEDIQKAQVSGQGDSLHEHIANLAGSPAIKKGILQTVKVVDELVKVMGRHKPENIVIEMARENQTTQKGQKNSRERMKRIEEGIKELGSQILKEHPVENTQLQNEKLYLYYLQNGRDMYVDQELDINRLSDYDVDHIVPQSFLKDDSIDNKVLTRSDKARGKSDNVPSEEVVKKMKNYWRQLLNAKLITQRKFDNLTKAERGGLSELDKAGFIKRQLVETRQITKHVAQILDSRMNTKYDENDKLIREVKVITLKSKLVSDFRKDFQFYKVREINNYHHAHDAYLNAVVGTALIKKYPKLESEFVYGDYKVYDVRKMIAKSEQEIGKATAKYFFYSNIMNFFKTEITLANGEIRKRPLIETNGETGEIVWDKGRDFATVRKVLSMPQVNIVKKTEVQTGGFSKESILPKRNSDKLIARKKDWDPKKYGGFDSPTVAYSVLVVAKVEKGKSKKLKSVKELLGITIMERSSFEKNPIDFLEAKGYKEVKKDLIIKLPKYSLFELENGRKRMLASAGELQKGNELALPSKYVNFLYLASHYEKLKGSPEDNEQKQLFVEQHKHYLDEIIEQISEFSKRVILADANLDKVLSAYNKHRDKPIREQAENIIHLFTLTNLGAPAAFKYFDTTIDRKRYTSTKEVLDATLIHQSITGLYETRIDLSQLGGDGGGGSGGSGGSGGTLQLDDEYRLYSPLVKPDQNIQFWLEQFPQAWAETAGMGLAKQVPPQVIQLKASATPVSVRQYPLSKEAQEGIRPHVQRLIQQGILVPVQSPWNTPLLPVRKPGTNDYRPVQDLREVNKRVQDIHPTVPNPYNLLCALPPQRSWYTVLDLKDAFFCLRLHPTSQPLFAFEWRDPGTGRTGQLTWTRLPQGFKNSPTIFNEALHRDLANFRIQHPQVTLLQYVDDLLLAGATKQDCLEGTKALLLELSDLGYRASAKKAQICRREVTYLGYSLRDGQRWLTEARKKTVVQIPAPTTAKQVREFLGTAGFCRLWIPGFATLAAPLYPLTKPKGEFSWAPEHQKAFDAIKKALLSAPALALPDVTKPFTLYVDERKGVARGVLTQTLGPWRRPVAYLSKKLDPVASGWPVCLKAIAAVAILVKDADKLTLGQNITVIAPHALENIVRQPPDRWMTNARMTHYQSLLLTERVTFAPPAALNPATLLPEETDEPVTHDCHQLLIEETGVRKDLTDIPLTGEVLTWFTDGSSYVVEGKRMAGAAVVDGTRTIWASSLPEGTSAQKAELMALTQALRLAEGKSINIYTDSRYAFATAHVHGAIYKQRGWLTSAGREIKNKEEILSLLEALHLPKRLAIIHCPGHQKAKDPISRGNQMADRVAKQAAQGVNLLAGKRTADGSEFEKRTADGSEFESPKKKAKVE

SEQ ID NO: 131 - protein, 2088 aa, synthetic construct
  source 1..2088: note = Description of Artificial Sequence: Synthetic polypeptide
MPAAKRVKLDGGDKKYSIGLDIGTNSVGWAVITDEYKVPSKKFKVLGNTDRHSIKKNLIGALLFDSGETAEATRLKRTARRRYTRRKNRICYLQEIFSNEMAKVDDSFFHRLEESFLVEEDKKHERHPIFGNIVDEVAYHEKYPTIYHLRKKLVDSTDKADLRLIYLALAHMIKFRGHFLIEGDLNPDNSDVDKLFIQLVQTYNQLFEENPINASGVDAKAILSARLSKSRRLENLIAQLPGEKKNGLFGNLIALSLGLTPNFKSNFDLAEDAKLQLSKDTYDDDLDNLLAQIGDQYADLFLAAKNLSDAILLSDILRVNTEITKAPLSASMIKRYDEHHQDLTLLKALVRQQLPEKYKEIFFDQSKNGYAGYIDGGASQEEFYKFIKPILEKMDGTEELLVKLNREDLLRKQRTFDNGSIPHQIHLGELHAILRRQEDFYPFLKDNREKIEKILTFRIPYYVGPLARGNSRFAWMTRKSEETITPWNFEEVVDKGASAQSFIERMTNFDKNLPNEKVLPKHSLLYEYFTVYNELTKVKYVTEGMRKPAFLSGEQKKAIVDLLFKTNRKVTVKQLKEDYFKKIECFDSVEISGVEDRFNASLGTYHDLLKIIKDKDFLDNEENEDILEDIVLTLTLFEDREMIEERLKTYAHLFDDKVMKQLKRRRYTGWGRLSRKLINGIRDKQSGKTILDFLKSDGFANRNFMQLIHDDSLTFKEDIQKAQVSGQGDSLHEHIANLAGSPAIKKGILQTVKVVDELVKVMGRHKPENIVIEMARENQTTQKGQKNSRERMKRIEEGIKELGSQILKEHPVENTQLQNEKLYLYYLQNGRDMYVDQELDINRLSDYDVDHIVPQSFLKDDSIDNKVLTRSDKARGKSDNVPSEEVVKKMKNYWRQLLNAKLITQRKFDNLTKAERGGLSELDKAGFIKRQLVETRQITKHVAQILDSRMNTKYDENDKLIREVKVITLKSKLVSDFRKDFQFYKVREINNYHHAHDAYLNAVVGTALIKKYPKLESEFVYGDYKVYDVRKMIAKSEQEIGKATAKYFFYSNIMNFFKTEITLANGEIRKRPLIETNGETGEIVWDKGRDFATVRKVLSMPQVNIVKKTEVQTGGFSKESILPKRNSDKLIARKKDWDPKKYGGFDSPTVAYSVLVVAKVEKGKSKKLKSVKELLGITIMERSSFEKNPIDFLEAKGYKEVKKDLIIKLPKYSLFELENGRKRMLASAGELQKGNELALPSKYVNFLYLASHYEKLKGSPEDNEQKQLFVEQHKHYLDEIIEQISEFSKRVILADANLDKVLSAYNKHRDKPIREQAENIIHLFTLTNLGAPAAFKYFDTTIDRKRYTSTKEVLDATLIHQSITGLYETRIDLSQLGGDGGGGSPAPGGGGGTLQLDDEYRLYSPLVKPDQNIQFWLEQFPQAWAETAGMGLAKQVPPQVIQLKASATPVSVRQYPLSKEAQEGIRPHVQRLIQQGILVPVQSPWNTPLLPVRKPGTNDYRPVQDLREVNKRVQDIHPTVPNPYNLLCALPPQRSWYTVLDLKDAFFCLRLHPTSQPLFAFEWRDPGTGRTGQLTWTRLPQGFKNSPTIFNEALHRDLANFRIQHPQVTLLQYVDDLLLAGATKQDCLEGTKALLLELSDLGYRASAKKAQICRREVTYLGYSLRDGQRWLTEARKKTVVQIPAPTTAKQVREFLGTAGFCRLWIPGFATLAAPLYPLTKPKGEFSWAPEHQKAFDAIKKALLSAPALALPDVTKPFTLYVDERKGVARGVLTQTLGPWRRPVAYLSKKLDPVASGWPVCLKAIAAVAILVKDADKLTLGQNITVIAPHALENIVRQPPDRWMTNARMTHYQSLLLTERVTFAPPAALNPATLLPEETDEPVTHDCHQLLIEETGVRKDLTDIPLTGEVLTWFTDGSSYVVEGKRMAGAAVVDGTRTIWASSLPEGTSAQKAELMALTQALRLAEGKSINIYTDSRYAFATAHVHGAIYKQRGWLTSAGREIKNKEEILSLLEALHLPKRLAIIHCPGHQKAKDPISRGNQMADRVAKQAAQGVNLLAGKRTADGSEFEKRTADGSEFESPKKKAKVE

SEQ ID NO: 132 - protein, 2090 aa, synthetic construct
  source 1..2090: note = Description of Artificial Sequence: Synthetic polypeptide
MPAAKRVKLDGGDKKYSIGLDIGTNSVGWAVITDEYKVPSKKFKVLGNTDRHSIKKNLIGALLFDSGETAEATRLKRTARRRYTRRKNRICYLQEIFSNEMAKVDDSFFHRLEESFLVEEDKKHERHPIFGNIVDEVAYHEKYPTIYHLRKKLVDSTDKADLRLIYLALAHMIKFRGHFLIEGDLNPDNSDVDKLFIQLVQTYNQLFEENPINASGVDAKAILSARLSKSRRLENLIAQLPGEKKNGLFGNLIALSLGLTPNFKSNFDLAEDAKLQLSKDTYDDDLDNLLAQIGDQYADLFLAAKNLSDAILLSDILRVNTEITKAPLSASMIKRYDEHHQDLTLLKALVRQQLPEKYKEIFFDQSKNGYAGYIDGGASQEEFYKFIKPILEKMDGTEELLVKLNREDLLRKQRTFDNGSIPHQIHLGELHAILRRQEDFYPFLKDNREKIEKILTFRIPYYVGPLARGNSRFAWMTRKSEETITPWNFEEVVDKGASAQSFIERMTNFDKNLPNEKVLPKHSLLYEYFTVYNELTKVKYVTEGMRKPAFLSGEQKKAIVDLLFKTNRKVTVKQLKEDYFKKIECFDSVEISGVEDRFNASLGTYHDLLKIIKDKDFLDNEENEDILEDIVLTLTLFEDREMIEERLKTYAHLFDDKVMKQLKRRRYTGWGRLSRKLINGIRDKQSGKTILDFLKSDGFANRNFMQLIHDDSLTFKEDIQKAQVSGQGDSLHEHIANLAGSPAIKKGILQTVKVVDELVKVMGRHKPENIVIEMARENQTTQKGQKNSRERMKRIEEGIKELGSQILKEHPVENTQLQNEKLYLYYLQNGRDMYVDQELDINRLSDYDVDHIVPQSFLKDDSIDNKVLTRSDKARGKSDNVPSEEVVKKMKNYWRQLLNAKLITQRKFDNLTKAERGGLSELDKAGFIKRQLVETRQITKHVAQILDSRMNTKYDENDKLIREVKVITLKSKLVSDFRKDFQFYKVREINNYHHAHDAYLNAVVGTALIKKYPKLESEFVYGDYKVYDVRKMIAKSEQEIGKATAKYFFYSNIMNFFKTEITLANGEIRKRPLIETNGETGEIVWDKGRDFATVRKVLSMPQVNIVKKTEVQTGGFSKESILPKRNSDKLIARKKDWDPKKYGGFDSPTVAYSVLVVAKVEKGKSKKLKSVKELLGITIMERSSFEKNPIDFLEAKGYKEVKKDLIIKLPKYSLFELENGRKRMLASAGELQKGNELALPSKYVNFLYLASHYEKLKGSPEDNEQKQLFVEQHKHYLDEIIEQISEFSKRVILADANLDKVLSAYNKHRDKPIREQAENIIHLFTLTNLGAPAAFKYFDTTIDRKRYTSTKEVLDATLIHQSITGLYETRIDLSQLGGDGGPAPEAAAKGSSGGTLQLDDEYRLYSPLVKPDQNIQFWLEQFPQAWAETAGMGLAKQVPPQVIQLKASATPVSVRQYPLSKEAQEGIRPHVQRLIQQGILVPVQSPWNTPLLPVRKPGTNDYRPVQDLREVNKRVQDIHPTVPNPYNLLCALPPQRSWYTVLDLKDAFFCLRLHPTSQPLFAFEWRDPGTGRTGQLTWTRLPQGFKNSPTIFNEALHRDLANFRIQHPQVTLLQYVDDLLLAGATKQDCLEGTKALLLELSDLGYRASAKKAQICRREVTYLGYSLRDGQRWLTEARKKTVVQIPAPTTAKQVREFLGTAGFCRLWIPGFATLAAPLYPLTKPKGEFSWAPEHQKAFDAIKKALLSAPALALPDVTKPFTLYVDERKGVARGVLTQTLGPWRRPVAYLSKKLDPVASGWPVCLKAIAAVAILVKDADKLTLGQNITVIAPHALENIVRQPPDRWMTNARMTHYQSLLLTERVTFAPPAALNPATLLPEETDEPVTHDCHQLLIEETGVRKDLTDIPLTGEVLTWFTDGSSYVVEGKRMAGAAVVDGTRTIWASSLPEGTSAQKAELMALTQALRLAEGKSINIYTDSRYAFATAHVHGAIYKQRGWLTSAGREIKNKEEILSLLEALHLPKRLAIIHCPGHQKAKDPISRGNQMADRVAKQAAQGVNLLAGKRTADGSEFEKRTADGSEFESPKKKAKVE

SEQ ID NO: 133 - protein, 2090 aa, synthetic construct
  source 1..2090: note = Description of Artificial Sequence: Synthetic polypeptide
MPAAKRVKLDGGDKKYSIGLDIGTNSVGWAVITDEYKVPSKKFKVLGNTDRHSIKKNLIGALLFDSGETAEATRLKRTARRRYTRRKNRICYLQEIFSNEMAKVDDSFFHRLEESFLVEEDKKHERHPIFGNIVDEVAYHEKYPTIYHLRKKLVDSTDKADLRLIYLALAHMIKFRGHFLIEGDLNPDNSDVDKLFIQLVQTYNQLFEENPINASGVDAKAILSARLSKSRRLENLIAQLPGEKKNGLFGNLIALSLGLTPNFKSNFDLAEDAKLQLSKDTYDDDLDNLLAQIGDQYADLFLAAKNLSDAILLSDILRVNTEITKAPLSASMIKRYDEHHQDLTLLKALVRQQLPEKYKEIFFDQSKNGYAGYIDGGASQEEFYKFIKPILEKMDGTEELLVKLNREDLLRKQRTFDNGSIPHQIHLGELHAILRRQEDFYPFLKDNREKIEKILTFRIPYYVGPLARGNSRFAWMTRKSEETITPWNFEEVVDKGASAQSFIERMTNFDKNLPNEKVLPKHSLLYEYFTVYNELTKVKYVTEGMRKPAFLSGEQKKAIVDLLFKTNRKVTVKQLKEDYFKKIECFDSVEISGVEDRFNASLGTYHDLLKIIKDKDFLDNEENEDILEDIVLTLTLFEDREMIEERLKTYAHLFDDKVMKQLKRRRYTGWGRLSRKLINGIRDKQSGKTILDFLKSDGFANRNFMQLIHDDSLTFKEDIQKAQVSGQGDSLHEHIANLAGSPAIKKGILQTVKVVDELVKVMGRHKPENIVIEMARENQTTQKGQKNSRERMKRIEEGIKELGSQILKEHPVENTQLQNEKLYLYYLQNGRDMYVDQELDINRLSDYDVDHIVPQSFLKDDSIDNKVLTRSDKARGKSDNVPSEEVVKKMKNYWRQLLNAKLITQRKFDNLTKAERGGLSELDKAGFIKRQLVETRQITKHVAQILDSRMNTKYDENDKLIREVKVITLKSKLVSDFRKDFQFYKVREINNYHHAHDAYLNAVVGTALIKKYPKLESEFVYGDYKVYDVRKMIAKSEQEIGKATAKYFFYSNIMNFFKTEITLANGEIRKRPLIETNGETGEIVWDKGRDFATVRKVLSMPQVNIVKKTEVQTGGFSKESILPKRNSDKLIARKKDWDPKKYGGFDSPTVAYSVLVVAKVEKGKSKKLKSVKELLGITIMERSSFEKNPIDFLEAKGYKEVKKDLIIKLPKYSLFELENGRKRMLASAGELQKGNELALPSKYVNFLYLASHYEKLKGSPEDNEQKQLFVEQHKHYLDEIIEQISEFSKRVILADANLDKVLSAYNKHRDKPIREQAENIIHLFTLTNLGAPAAFKYFDTTIDRKRYTSTKEVLDATLIHQSITGLYETRIDLSQLGGDGGGSSEAAAKGGGGGTLQLDDEYRLYSPLVKPDQNIQFWLEQFPQAWAETAGMGLAKQVPPQVIQLKASATPVSVRQYPLSKEAQEGIRPHVQRLIQQGILVPVQSPWNTPLLPVRKPGTNDYRPVQDLREVNKRVQDIHPTVPNPYNLLCALPPQRSWYTVLDLKDAFFCLRLHPTSQPLFAFEWRDPGTGRTGQLTWTRLPQGFKNSPTIFNEALHRDLANFRIQHPQVTLLQYVDDLLLAGATKQDCLEGTKALLLELSDLGYRASAKKAQICRREVTYLGYSLRDGQRWLTEARKKTVVQIPAPTTAKQVREFLGTAGFCRLWIPGFATLAAPLYPLTKPKGEFSWAPEHQKAFDAIKKALLSAPALALPDVTKPFTLYVDERKGVARGVLTQTLGPWRRPVAYLSKKLDPVASGWPVCLKAIAAVAILVKDADKLTLGQNITVIAPHALENIVRQPPDRWMTNARMTHYQSLLLTERVTFAPPAALNPATLLPEETDEPVTHDCHQLLIEETGVRKDLTDIPLTGEVLTWFTDGSSYVVEGKRMAGAAVVDGTRTIWASSLPEGTSAQKAELMALTQALRLAEGKSINIYTDSRYAFATAHVHGAIYKQRGWLTSAGREIKNKEEILSLLEALHLPKRLAIIHCPGHQKAKDPISRGNQMADRVAKQAAQGVNLLAGKRTADGSEFEKRTADGSEFESPKKKAKVE

SEQ ID NO: 134 - protein, 2088 aa, synthetic construct
  source 1..2088: note = Description of Artificial Sequence: Synthetic polypeptide
MPAAKRVKLDGGDKKYSIGLDIGTNSVGWAVITDEYKVPSKKFKVLGNTDRHSIKKNLIGALLFDSGETAEATRLKRTARRRYTRRKNRICYLQEIFSNEMAKVDDSFFHRLEESFLVEEDKKHERHPIFGNIVDEVAYHEKYPTIYHLRKKLVDSTDKADLRLIYLALAHMIKFRGHFLIEGDLNPDNSDVDKLFIQLVQTYNQLFEENPINASGVDAKAILSARLSKSRRLENLIAQLPGEKKNGLFGNLIALSLGLTPNFKSNFDLAEDAKLQLSKDTYDDDLDNLLAQIGDQYADLFLAAKNLSDAILLSDILRVNTEITKAPLSASMIKRYDEHHQDLTLLKALVRQQLPEKYKEIFFDQSKNGYAGYIDGGASQEEFYKFIKPILEKMDGTEELLVKLNREDLLRKQRTFDNGSIPHQIHLGELHAILRRQEDFYPFLKDNREKIEKILTFRIPYYVGPLARGNSRFAWMTRKSEETITPWNFEEVVDKGASAQSFIERMTNFDKNLPNEKVLPKHSLLYEYFTVYNELTKVKYVTEGMRKPAFLSGEQKKAIVDLLFKTNRKVTVKQLKEDYFKKIECFDSVEISGVEDRFNASLGTYHDLLKIIKDKDFLDNEENEDILEDIVLTLTLFEDREMIEERLKTYAHLFDDKVMKQLKRRRYTGWGRLSRKLINGIRDKQSGKTILDFLKSDGFANRNFMQLIHDDSLTFKEDIQKAQVSGQGDSLHEHIANLAGSPAIKKGILQTVKVVDELVKVMGRHKPENIVIEMARENQTTQKGQKNSRERMKRIEEGIKELGSQILKEHPVENTQLQNEKLYLYYLQNGRDMYVDQELDINRLSDYDVDHIVPQSFLKDDSIDNKVLTRSDKARGKSDNVPSEEVVKKMKNYWRQLLNAKLITQRKFDNLTKAERGGLSELDKAGFIKRQLVETRQITKHVAQILDSRMNTKYDENDKLIREVKVITLKSKLVSDFRKDFQFYKVREINNYHHAHDAYLNAVVGTALIKKYPKLESEFVYGDYKVYDVRKMIAKSEQEIGKATAKYFFYSNIMNFFKTEITLANGEIRKRPLIETNGETGEIVWDKGRDFATVRKVLSMPQVNIVKKTEVQTGGFSKESILPKRNSDKLIARKKDWDPKKYGGFDSPTVAYSVLVVAKVEKGKSKKLKSVKELLGITIMERSSFEKNPIDFLEAKGYKEVKKDLIIKLPKYSLFELENGRKRMLASAGELQKGNELALPSKYVNFLYLASHYEKLKGSPEDNEQKQLFVEQHKHYLDEIIEQISEFSKRVILADANLDKVLSAYNKHRDKPIREQAENIIHLFTLTNLGAPAAFKYFDTTIDRKRYTSTKEVLDATLIHQSITGLYETRIDLSQLGGDGGPAPGSSGGSGGTLQLDDEYRLYSPLVKPDQNIQFWLEQFPQAWAETAGMGLAKQVPPQVIQLKASATPVSVRQYPLSKEAQEGIRPHVQRLIQQGILVPVQSPWNTPLLPVRKPGTNDYRPVQDLREVNKRVQDIHPTVPNPYNLLCALPPQRSWYTVLDLKDAFFCLRLHPTSQPLFAFEWRDPGTGRTGQLTWTRLPQGFKNSPTIFNEALHRDLANFRIQHPQVTLLQYVDDLLLAGATKQDCLEGTKALLLELSDLGYRASAKKAQICRREVTYLGYSLRDGQRWLTEARKKTVVQIPAPTTAKQVREFLGTAGFCRLWIPGFATLAAPLYPLTKPKGEFSWAPEHQKAFDAIKKALLSAPALALPDVTKPFTLYVDERKGVARGVLTQTLGPWRRPVAYLSKKLDPVASGWPVCLKAIAAVAILVKDADKLTLGQNITVIAPHALENIVRQPPDRWMTNARMTHYQSLLLTERVTFAPPAALNPATLLPEETDEPVTHDCHQLLIEETGVRKDLTDIPLTGEVLTWFTDGSSYVVEGKRMAGAAVVDGTRTIWASSLPEGTSAQKAELMALTQALRLAEGKSINIYTDSRYAFATAHVHGAIYKQRGWLTSAGREIKNKEEILSLLEALHLPKRLAIIHCPGHQKAKDPISRGNQMADRVAKQAAQGVNLLAGKRTADGSEFEKRTADGSEFESPKKKAKVE

SEQ ID NO: 135 - protein, 2088 aa, synthetic construct
  source 1..2088: note = Description of Artificial Sequence: Synthetic polypeptide
MPAAKRVKLDGGDKKYSIGLDIGTNSVGWAVITDEYKVPSKKFKVLGNTDRHSIKKNLIGALLFDSGETAEATRLKRTARRRYTRRKNRICYLQEIFSNEMAKVDDSFFHRLEESFLVEEDKKHERHPIFGNIVDEVAYHEKYPTIYHLRKKLVDSTDKADLRLIYLALAHMIKFRGHFLIEGDLNPDNSDVDKLFIQLVQTYNQLFEENPINASGVDAKAILSARLSKSRRLENLIAQLPGEKKNGLFGNLIALSLGLTPNFKSNFDLAEDAKLQLSKDTYDDDLDNLLAQIGDQYADLFLAAKNLSDAILLSDILRVNTEITKAPLSASMIKRYDEHHQDLTLLKALVRQQLPEKYKEIFFDQSKNGYAGYIDGGASQEEFYKFIKPILEKMDGTEELLVKLNREDLLRKQRTFDNGSIPHQIHLGELHAILRRQEDFYPFLKDNREKIEKILTFRIPYYVGPLARGNSRFAWMTRKSEETITPWNFEEVVDKGASAQSFIERMTNFDKNLPNEKVLPKHSLLYEYFTVYNELTKVKYVTEGMRKPAFLSGEQKKAIVDLLFKTNRKVTVKQLKEDYFKKIECFDSVEISGVEDRFNASLGTYHDLLKIIKDKDFLDNEENEDILEDIVLTLTLFEDREMIEERLKTYAHLFDDKVMKQLKRRRYTGWGRLSRKLINGIRDKQSGKTILDFLKSDGFANRNFMQLIHDDSLTFKEDIQKAQVSGQGDSLHEHIANLAGSPAIKKGILQTVKVVDELVKVMGRHKPENIVIEMARENQTTQKGQKNSRERMKRIEEGIKELGSQILKEHPVENTQLQNEKLYLYYLQNGRDMYVDQELDINRLSDYDVDHIVPQSFLKDDSIDNKVLTRSDKARGKSDNVPSEEVVKKMKNYWRQLLNAKLITQRKFDNLTKAERGGLSELDKAGFIKRQLVETRQITKHVAQILDSRMNTKYDENDKLIREVKVITLKSKLVSDFRKDFQFYKVREINNYHHAHDAYLNAVVGTALIKKYPKLESEFVYGDYKVYDVRKMIAKSEQEIGKATAKYFFYSNIMNFFKTEITLANGEIRKRPLIETNGETGEIVWDKGRDFATVRKVLSMPQVNIVKKTEVQTGGFSKESILPKRNSDKLIARKKDWDPKKYGGFDSPTVAYSVLVVAKVEKGKSKKLKSVKELLGITIMERSSFEKNPIDFLEAKGYKEVKKDLIIKLPKYSLFELENGRKRMLASAGELQKGNELALPSKYVNFLYLASHYEKLKGSPEDNEQKQLFVEQHKHYLDEIIEQISEFSKRVILADANLDKVLSAYNKHRDKPIREQAENIIHLFTLTNLGAPAAFKYFDTTIDRKRYTSTKEVLDATLIHQSITGLYETRIDLSQLGGDGGPAPGGSGSSGGTLQLDDEYRLYSPLVKPDQNIQFWLEQFPQAWAETAGMGLAKQVPPQVIQLKASATPVSVRQYPLSKEAQEGIRPHVQRLIQQGILVPVQSPWNTPLLPVRKPGTNDYRPVQDLREVNKRVQDIHPTVPNPYNLLCALPPQRSWYTVLDLKDAFFCLRLHPTSQPLFAFEWRDPGTGRTGQLTWTRLPQGFKNSPTIFNEALHRDLANFRIQHPQVTLLQYVDDLLLAGATKQDCLEGTKALLLELSDLGYRASAKKAQICRREVTYLGYSLRDGQRWLTEARKKTVVQIPAPTTAKQVREFLGTAGFCRLWIPGFATLAAPLYPLTKPKGEFSWAPEHQKAFDAIKKALLSAPALALPDVTKPFTLYVDERKGVARGVLTQTLGPWRRPVAYLSKKLDPVASGWPVCLKAIAAVAILVKDADKLTLGQNITVIAPHALENIVRQPPDRWMTNARMTHYQSLLLTERVTFAPPAALNPATLLPEETDEPVTHDCHQLLIEETGVRKDLTDIPLTGEVLTWFTDGSSYVVEGKRMAGAAVVDGTRTIWASSLPEGTSAQKAELMALTQALRLAEGKSINIYTDSRYAFATAHVHGAIYKQRGWLTSAGREIKNKEEILSLLEALHLPKRLAIIHCPGHQKAKDPISRGNQMADRVAKQAAQGVNLLAGKRTADGSEFEKRTADGSEFESPKKKAKVE

SEQ ID NO: 136 - protein, 2090 aa, synthetic construct
  source 1..2090: note = Description of Artificial Sequence: Synthetic polypeptide
MPAAKRVKLDGGDKKYSIGLDIGTNSVGWAVITDEYKVPSKKFKVLGNTDRHSIKKNLIGALLFDSGETAEATRLKRTARRRYTRRKNRICYLQEIFSNEMAKVDDSFFHRLEESFLVEEDKKHERHPIFGNIVDEVAYHEKYPTIYHLRKKLVDSTDKADLRLIYLALAHMIKFRGHFLIEGDLNPDNSDVDKLFIQLVQTYNQLFEENPINASGVDAKAILSARLSKSRRLENLIAQLPGEKKNGLFGNLIALSLGLTPNFKSNFDLAEDAKLQLSKDTYDDDLDNLLAQIGDQYADLFLAAKNLSDAILLSDILRVNTEITKAPLSASMIKRYDEHHQDLTLLKALVRQQLPEKYKEIFFDQSKNGYAGYIDGGASQEEFYKFIKPILEKMDGTEELLVKLNREDLLRKQRTFDNGSIPHQIHLGELHAILRRQEDFYPFLKDNREKIEKILTFRIPYYVGPLARGNSRFAWMTRKSEETITPWNFEEVVDKGASAQSFIERMTNFDKNLPNEKVLPKHSLLYEYFTVYNELTKVKYVTEGMRKPAFLSGEQKKAIVDLLFKTNRKVTVKQLKEDYFKKIECFDSVEISGVEDRFNASLGTYHDLLKIIKDKDFLDNEENEDILEDIVLTLTLFEDREMIEERLKTYAHLFDDKVMKQLKRRRYTGWGRLSRKLINGIRDKQSGKTILDFLKSDGFANRNFMQLIHDDSLTFKEDIQKAQVSGQGDSLHEHIANLAGSPAIKKGILQTVKVVDELVKVMGRHKPENIVIEMARENQTTQKGQKNSRERMKRIEEGIKELGSQILKEHPVENTQLQNEKLYLYYLQNGRDMYVDQELDINRLSDYDVDHIVPQSFLKDDSIDNKVLTRSDKARGKSDNVPSEEVVKKMKNYWRQLLNAKLITQRKFDNLTKAERGGLSELDKAGFIKRQLVETRQITKHVAQILDSRMNTKYDENDKLIREVKVITLKSKLVSDFRKDFQFYKVREINNYHHAHDAYLNAVVGTALIKKYPKLESEFVYGDYKVYDVRKMIAKSEQEIGKATAKYFFYSNIMNFFKTEITLANGEIRKRPLIETNGETGEIVWDKGRDFATVRKVLSMPQVNIVKKTEVQTGGFSKESILPKRNSDKLIARKKDWDPKKYGGFDSPTVAYSVLVVAKVEKGKSKKLKSVKELLGITIMERSSFEKNPIDFLEAKGYKEVKKDLIIKLPKYSLFELENGRKRMLASAGELQKGNELALPSKYVNFLYLASHYEKLKGSPEDNEQKQLFVEQHKHYLDEIIEQISEFSKRVILADANLDKVLSAYNKHRDKPIREQAENIIHLFTLTNLGAPAAFKYFDTTIDRKRYTSTKEVLDATLIHQSITGLYETRIDLSQLGGDGGEAAAKGGSGSSGGTLQLDDEYRLYSPLVKPDQNIQFWLEQFPQAWAETAGMGLAKQVPPQVIQLKASATPVSVRQYPLSKEAQEGIRPHVQRLIQQGILVPVQSPWNTPLLPVRKPGTNDYRPVQDLREVNKRVQDIHPTVPNPYNLLCALPPQRSWYTVLDLKDAFFCLRLHPTSQPLFAFEWRDPGTGRTGQLTWTRLPQGFKNSPTIFNEALHRDLANFRIQHPQVTLLQYVDDLLLAGATKQDCLEGTKALLLELSDLGYRASAKKAQICRREVTYLGYSLRDGQRWLTEARKKTVVQIPAPTTAKQVREFLGTAGFCRLWIPGFATLAAPLYPLTKPKGEFSWAPEHQKAFDAIKKALLSAPALALPDVTKPFTLYVDERKGVARGVLTQTLGPWRRPVAYLSKKLDPVASGWPVCLKAIAAVAILVKDADKLTLGQNITVIAPHALENIVRQPPDRWMTNARMTHYQSLLLTERVTFAPPAALNPATLLPEETDEPVTHDCHQLLIEETGVRKDLTDIPLTGEVLTWFTDGSSYVVEGKRMAGAAVVDGTRTIWASSLPEGTSAQKAELMALTQALRLAEGKSINIYTDSRYAFATAHVHGAIYKQRGWLTSAGREIKNKEEILSLLEALHLPKRLAIIHCPGHQKAKDPISRGNQMADRVAKQAAQGVNLLAGKRTADGSEFEKRTADGSEFESPKKKAKVE

SEQ ID NO: 137 - protein, 2099 aa, synthetic construct
  source 1..2099: note = Description of Artificial Sequence: Synthetic polypeptide
MPAAKRVKLDGGDKKYSIGLDIGTNSVGWAVITDEYKVPSKKFKVLGNTDRHSIKKNLIGALLFDSGETAEATRLKRTARRRYTRRKNRICYLQEIFSNEMAKVDDSFFHRLEESFLVEEDKKHERHPIFGNIVDEVAYHEKYPTIYHLRKKLVDSTDKADLRLIYLALAHMIKFRGHFLIEGDLNPDNSDVDKLFIQLVQTYNQLFEENPINASGVDAKAILSARLSKSRRLENLIAQLPGEKKNGLFGNLIALSLGLTPNFKSNFDLAEDAKLQLSKDTYDDDLDNLLAQIGDQYADLFLAAKNLSDAILLSDILRVNTEITKAPLSASMIKRYDEHHQDLTLLKALVRQQLPEKYKEIFFDQSKNGYAGYIDGGASQEEFYKFIKPILEKMDGTEELLVKLNREDLLRKQRTFDNGSIPHQIHLGELHAILRRQEDFYPFLKDNREKIEKILTFRIPYYVGPLARGNSRFAWMTRKSEETITPWNFEEVVDKGASAQSFIERMTNFDKNLPNEKVLPKHSLLYEYFTVYNELTKVKYVTEGMRKPAFLSGEQKKAIVDLLFKTNRKVTVKQLKEDYFKKIECFDSVEISGVEDRFNASLGTYHDLLKIIKDKDFLDNEENEDILEDIVLTLTLFEDREMIEERLKTYAHLFDDKVMKQLKRRRYTGWGRLSRKLINGIRDKQSGKTILDFLKSDGFANRNFMQLIHDDSLTFKEDIQKAQVSGQGDSLHEHIANLAGSPAIKKGILQTVKVVDELVKVMGRHKPENIVIEMARENQTTQKGQKNSRERMKRIEEGIKELGSQILKEHPVENTQLQNEKLYLYYLQNGRDMYVDQELDINRLSDYDVDHIVPQSFLKDDSIDNKVLTRSDKARGKSDNVPSEEVVKKMKNYWRQLLNAKLITQRKFDNLTKAERGGLSELDKAGFIKRQLVETRQITKHVAQILDSRMNTKYDENDKLIREVKVITLKSKLVSDFRKDFQFYKVREINNYHHAHDAYLNAVVGTALIKKYPKLESEFVYGDYKVYDVRKMIAKSEQEIGKATAKYFFYSNIMNFFKTEITLANGEIRKRPLIETNGETGEIVWDKGRDFATVRKVLSMPQVNIVKKTEVQTGGFSKESILPKRNSDKLIARKKDWDPKKYGGFDSPTVAYSVLVVAKVEKGKSKKLKSVKELLGITIMERSSFEKNPIDFLEAKGYKEVKKDLIIKLPKYSLFELENGRKRMLASAGELQKGNELALPSKYVNFLYLASHYEKLKGSPEDNEQKQLFVEQHKHYLDEIIEQISEFSKRVILADANLDKVLSAYNKHRDKPIREQAENIIHLFTLTNLGAPAAFKYFDTTIDRKRYTSTKEVLDATLIHQSITGLYETRIDLSQLGGDGGEAAAKEAAAKEAAAKEAAAKGGTLQLDDEYRLYSPLVKPDQNIQFWLEQFPQAWAETAGMGLAKQVPPQVIQLKASATPVSVRQYPLSKEAQEGIRPHVQRLIQQGILVPVQSPWNTPLLPVRKPGTNDYRPVQDLREVNKRVQDIHPTVPNPYNLLCALPPQRSWYTVLDLKDAFFCLRLHPTSQPLFAFEWRDPGTGRTGQLTWTRLPQGFKNSPTIFNEALHRDLANFRIQHPQVTLLQYVDDLLLAGATKQDCLEGTKALLLELSDLGYRASAKKAQICRREVTYLGYSLRDGQRWLTEARKKTVVQIPAPTTAKQVREFLGTAGFCRLWIPGFATLAAPLYPLTKPKGEFSWAPEHQKAFDAIKKALLSAPALALPDVTKPFTLYVDERKGVARGVLTQTLGPWRRPVAYLSKKLDPVASGWPVCLKAIAAVAILVKDADKLTLGQNITVIAPHALENIVRQPPDRWMTNARMTHYQSLLLTERVTFAPPAALNPATLLPEETDEPVTHDCHQLLIEETGVRKDLTDIPLTGEVLTWFTDGSSYVVEGKRMAGAAVVDGTRTIWASSLPEGTSAQKAELMALTQALRLAEGKSINIYTDSRYAFATAHVHGAIYKQRGWLTSAGREIKNKEEILSLLEALHLPKRLAIIHCPGHQKAKDPISRGNQMADRVAKQAAQGVNLLAGKRTADGSEFEKRTADGSEFESPKKKAKVE

SEQ ID NO: 138 - protein, 2090 aa, synthetic construct
  source 1..2090: note = Description of Artificial Sequence: Synthetic polypeptide
MPAAKRVKLDGGDKKYSIGLDIGTNSVGWAVITDEYKVPSKKFKVLGNTDRHSIKKNLIGALLFDSGETAEATRLKRTARRRYTRRKNRICYLQEIFSNEMAKVDDSFFHRLEESFLVEEDKKHERHPIFGNIVDEVAYHEKYPTIYHLRKKLVDSTDKADLRLIYLALAHMIKFRGHFLIEGDLNPDNSDVDKLFIQLVQTYNQLFEENPINASGVDAKAILSARLSKSRRLENLIAQLPGEKKNGLFGNLIALSLGLTPNFKSNFDLAEDAKLQLSKDTYDDDLDNLLAQIGDQYADLFLAAKNLSDAILLSDILRVNTEITKAPLSASMIKRYDEHHQDLTLLKALVRQQLPEKYKEIFFDQSKNGYAGYIDGGASQEEFYKFIKPILEKMDGTEELLVKLNREDLLRKQRTFDNGSIPHQIHLGELHAILRRQEDFYPFLKDNREKIEKILTFRIPYYVGPLARGNSRFAWMTRKSEETITPWNFEEVVDKGASAQSFIERMTNFDKNLPNEKVLPKHSLLYEYFTVYNELTKVKYVTEGMRKPAFLSGEQKKAIVDLLFKTNRKVTVKQLKEDYFKKIECFDSVEISGVEDRFNASLGTYHDLLKIIKDKDFLDNEENEDILEDIVLTLTLFEDREMIEERLKTYAHLFDDKVMKQLKRRRYTGWGRLSRKLINGIRDKQSGKTILDFLKSDGFANRNFMQLIHDDSLTFKEDIQKAQVSGQGDSLHEHIANLAGSPAIKKGILQTVKVVDELVKVMGRHKPENIVIEMARENQTTQKGQKNSRERMKRIEEGIKELGSQILKEHPVENTQLQNEKLYLYYLQNGRDMYVDQELDINRLSDYDVDHIVPQSFLKDDSIDNKVLTRSDKARGKSDNVPSEEVVKKMKNYWRQLLNAKLITQRKFDNLTKAERGGLSELDKAGFIKRQLVETRQITKHVAQILDSRMNTKYDENDKLIREVKVITLKSKLVSDFRKDFQFYKVREINNYHHAHDAYLNAVVGTALIKKYPKLESEFVYGDYKVYDVRKMIAKSEQEIGKATAKYFFYSNIMNFFKTEITLANGEIRKRPLIETNGETGEIVWDKGRDFATVRKVLSMPQVNIVKKTEVQTGGFSKESILPKRNSDKLIARKKDWDPKKYGGFDSPTVAYSVLVVAKVEKGKSKKLKSVKELLGITIMERSSFEKNPIDFLEAKGYKEVKKDLIIKLPKYSLFELENGRKRMLASAGELQKGNELALPSKYVNFLYLASHYEKLKGSPEDNEQKQLFVEQHKHYLDEIIEQISEFSKRVILADANLDKVLSAYNKHRDKPIREQAENIIHLFTLTNLGAPAAFKYFDTTIDRKRYTSTKEVLDATLIHQSITGLYETRIDLSQLGGDGGPAPGGSEAAAKGGTLQLDDEYRLYSPLVKPDQNIQFWLEQFPQAWAETAGMGLAKQVPPQVIQLKASATPVSVRQYPLSKEAQEGIRPHVQRLIQQGILVPVQSPWNTPLLPVRKPGTNDYRPVQDLREVNKRVQDIHPTVPNPYNLLCALPPQRSWYTVLDLKDAFFCLRLHPTSQPLFAFEWRDPGTGRTGQLTWTRLPQGFKNSPTIFNEALHRDLANFRIQHPQVTLLQYVDDLLLAGATKQDCLEGTKALLLELSDLGYRASAKKAQICRREVTYLGYSLRDGQRWLTEARKKTVVQIPAPTTAKQVREFLGTAGFCRLWIPGFATLAAPLYPLTKPKGEFSWAPEHQKAFDAIKKALLSAPALALPDVTKPFTLYVDERKGVARGVLTQTLGPWRRPVAYLSKKLDPVASGWPVCLKAIAAVAILVKDADKLTLGQNITVIAPHALENIVRQPPDRWMTNARMTHYQSLLLTERVTFAPPAALNPATLLPEETDEPVTHDCHQLLIEETGVRKDLTDIPLTGEVLTWFTDGSSYVVEGKRMAGAAVVDGTRTIWASSLPEGTSAQKAELMALTQALRLAEGKSINIYTDSRYAFATAHVHGAIYKQRGWLTSAGREIKNKEEILSLLEALHLPKRLAIIHCPGHQKAKDPISRGNQMADRVAKQAAQGVNLLAGKRTADGSEFEKRTADGSEFESPKKKAKVE

SEQ ID NO: 139 - protein, 2090 aa, synthetic construct
  source 1..2090: note = Description of Artificial Sequence: Synthetic polypeptide
MPAAKRVKLDGGDKKYSIGLDIGTNSVGWAVITDEYKVPSKKFKVLGNTDRHSIKKNLIGALLFDSGETAEATRLKRTARRRYTRRKNRICYLQEIFSNEMAKVDDSFFHRLEESFLVEEDKKHERHPIFGNIVDEVAYHEKYPTIYHLRKKLVDSTDKADLRLIYLALAHMIKFRGHFLIEGDLNPDNSDVDKLFIQLVQTYNQLFEENPINASGVDAKAILSARLSKSRRLENLIAQLPGEKKNGLFGNLIALSLGLTPNFKSNFDLAEDAKLQLSKDTYDDDLDNLLAQIGDQYADLFLAAKNLSDAILLSDILRVNTEITKAPLSASMIKRYDEHHQDLTLLKALVRQQLPEKYKEIFFDQSKNGYAGYIDGGASQEEFYKFIKPILEKMDGTEELLVKLNREDLLRKQRTFDNGSIPHQIHLGELHAILRRQEDFYPFLKDNREKIEKILTFRIPYYVGPLARGNSRFAWMTRKSEETITPWNFEEVVDKGASAQSFIERMTNFDKNLPNEKVLPKHSLLYEYFTVYNELTKVKYVTEGMRKPAFLSGEQKKAIVDLLFKTNRKVTVKQLKEDYFKKIECFDSVEISGVEDRFNASLGTYHDLLKIIKDKDFLDNEENEDILEDIVLTLTLFEDREMIEERLKTYAHLFDDKVMKQLKRRRYTGWGRLSRKLINGIRDKQSGKTILDFLKSDGFANRNFMQLIHDDSLTFKEDIQKAQVSGQGDSLHEHIANLAGSPAIKKGILQTVKVVDELVKVMGRHKPENIVIEMARENQTTQKGQKNSRERMKRIEEGIKELGSQILKEHPVENTQLQNEKLYLYYLQNGRDMYVDQELDINRLSDYDVDHIVPQSFLKDDSIDNKVLTRSDKARGKSDNVPSEEVVKKMKNYWRQLLNAKLITQRKFDNLTKAERGGLSELDKAGFIKRQLVETRQITKHVAQILDSRMNTKYDENDKLIREVKVITLKSKLVSDFRKDFQFYKVREINNYHHAHDAYLNAVVGTALIKKYPKLESEFVYGDYKVYDVRKMIAKSEQEIGKATAKYFFYSNIMNFFKTEITLANGEIRKRPLIETNGETGEIVWDKGRDFATVRKVLSMPQVNIVKKTEVQTGGFSKESILPKRNSDKLIARKKDWDPKKYGGFDSPTVAYSVLVVAKVEKGKSKKLKSVKELLGITIMERSSFEKNPIDFLEAKGYKEVKKDLIIKLPKYSLFELENGRKRMLASAGELQKGNELALPSKYVNFLYLASHYEKLKGSPEDNEQKQLFVEQHKHYLDEIIEQISEFSKRVILADANLDKVLSAYNKHRDKPIREQAENIIHLFTLTNLGAPAAFKYFDTTIDRKRYTSTKEVLDATLIHQSITGLYETRIDLSQLGGDGGGGSGSSEAAAKGGTLQLDDEYRLYSPLVKPDQNIQFWLEQFPQAWAETAGMGLAKQVPPQVIQLKASATPVSVRQYPLSKEAQEGIRPHVQRLIQQGILVPVQSPWNTPLLPVRKPGTNDYRPVQDLREVNKRVQDIHPTVPNPYNLLCALPPQRSWYTVLDLKDAFFCLRLHPTSQPLFAFEWRDPGTGRTGQLTWTRLPQGFKNSPTIFNEALHRDLANFRIQHPQVTLLQYVDDLLLAGATKQDCLEGTKALLLELSDLGYRASAKKAQICRREVTYLGYSLRDGQRWLTEARKKTVVQIPAPTTAKQVREFLGTAGFCRLWIPGFATLAAPLYPLTKPKGEFSWAPEHQKAFDAIKKALLSAPALALPDVTKPFTLYVDERKGVARGVLTQTLGPWRRPVAYLSKKLDPVASGWPVCLKAIAAVAILVKDADKLTLGQNITVIAPHALENIVRQPPDRWMTNARMTHYQSLLLTERVTFAPPAALNPATLLPEETDEPVTHDCHQLLIEETGVRKDLTDIPLTGEVLTWFTDGSSYVVEGKRMAGAAVVDGTRTIWASSLPEGTSAQKAELMALTQALRLAEGKSINIYTDSRYAFATAHVHGAIYKQRGWLTSAGREIKNKEEILSLLEALHLPKRLAIIHCPGHQKAKDPISRGNQMADRVAKQAAQGVNLLAGKRTADGSEFEKRTADGSEFESPKKKAKVE

SEQ ID NO: 140 - protein, 2112 aa, synthetic construct
  source 1..2112: note = Description of Artificial Sequence: Synthetic polypeptide
MPAAKRVKLDGGDKKYSIGLDIGTNSVGWAVITDEYKVPSKKFKVLGNTDRHSIKKNLIGALLFDSGETAEATRLKRTARRRYTRRKNRICYLQEIFSNEMAKVDDSFFHRLEESFLVEEDKKHERHPIFGNIVDEVAYHEKYPTIYHLRKKLVDSTDKADLRLIYLALAHMIKFRGHFLIEGDLNPDNSDVDKLFIQLVQTYNQLFEENPINASGVDAKAILSARLSKSRRLENLIAQLPGEKKNGLFGNLIALSLGLTPNFKSNFDLAEDAKLQLSKDTYDDDLDNLLAQIGDQYADLFLAAKNLSDAILLSDILRVNTEITKAPLSASMIKRYDEHHQDLTLLKALVRQQLPEKYKEIFFDQSKNGYAGYIDGGASQEEFYKFIKPILEKMDGTEELLVKLNREDLLRKQRTFDNGSIPHQIHLGELHAILRRQEDFYPFLKDNREKIEKILTFRIPYYVGPLARGNSRFAWMTRKSEETITPWNFEEVVDKGASAQSFIERMTNFDKNLPNEKVLPKHSLLYEYFTVYNELTKVKYVTEGMRKPAFLSGEQKKAIVDLLFKTNRKVTVKQLKEDYFKKIECFDSVEISGVEDRFNASLGTYHDLLKIIKDKDFLDNEENEDILEDIVLTLTLFEDREMIEERLKTYAHLFDDKVMKQLKRRRYTGWGRLSRKLINGIRDKQSGKTILDFLKSDGFANRNFMQLIHDDSLTFKEDIQKAQVSGQGDSLHEHIANLAGSPAIKKGILQTVKVVDELVKVMGRHKPENIVIEMARENQTTQKGQKNSRERMKRIEEGIKELGSQILKEHPVENTQLQNEKLYLYYLQNGRDMYVDQELDINRLSDYDVDHIVPQSFLKDDSIDNKVLTRSDKARGKSDNVPSEEVVKKMKNYWRQLLNAKLITQRKFDNLTKAERGGLSELDKAGFIKRQLVETRQITKHVAQILDSRMNTKYDENDKLIREVKVITLKSKLVSDFRKDFQFYKVREINNYHHAHDAYLNAVVGTALIKKYPKLESEFVYGDYKVYDVRKMIAKSEQEIGKATAKYFFYSNIMNFFKTEITLANGEIRKRPLIETNGETGEIVWDKGRDFATVRKVLSMPQVNIVKKTEVQTGGFSKESILPKRNSDKLIARKKDWDPKKYGGFDSPTVAYSVLVVAKVEKGKSKKLKSVKELLGITIMERSSFEKNPIDFLEAKGYKEVKKDLIIKLPKYSLFELENGRKRMLASAGELQKGNELALPSKYVNFLYLASHYEKLKGSPEDNEQKQLFVEQHKHYLDEIIEQISEFSKRVILADANLDKVLSAYNKHRDKPIREQAENIIHLFTLTNLGAPAAFKYFDTTIDRKRYTSTKEVLDATLIHQSITGLYETRIDLSQLGGDGGSGGSSGGSSGSETPGTSESATPESSGGSSGGSSGGTLQLDDEYRLYSPLVKPDQNIQFWLEQFPQAWAETAGMGLAKQVPPQVIQLKASATPVSVRQYPLSKEAQEGIRPHVQRLIQQGILVPVQSPWNTPLLPVRKPGTNDYRPVQDLREVNKRVQDIHPTVPNPYNLLCALPPQRSWYTVLDLKDAFFCLRLHPTSQPLFAFEWRDPGTGRTGQLTWTRLPQGFKNSPTIFNEALHRDLANFRIQHPQVTLLQYVDDLLLAGATKQDCLEGTKALLLELSDLGYRASAKKAQICRREVTYLGYSLRDGQRWLTEARKKTVVQIPAPTTAKQVREFLGTAGFCRLWIPGFATLAAPLYPLTKPKGEFSWAPEHQKAFDAIKKALLSAPALALPDVTKPFTLYVDERKGVARGVLTQTLGPWRRPVAYLSKKLDPVASGWPVCLKAIAAVAILVKDADKLTLGQNITVIAPHALENIVRQPPDRWMTNARMTHYQSLLLTERVTFAPPAALNPATLLPEETDEPVTHDCHQLLIEETGVRKDLTDIPLTGEVLTWFTDGSSYVVEGKRMAGAAVVDGTRTIWASSLPEGTSAQKAELMALTQALRLAEGKSINIYTDSRYAFATAHVHGAIYKQRGWLTSAGREIKNKEEILSLLEALHLPKRLAIIHCPGHQKAKDPISRGNQMADRVAKQAAQGVNLLAGKRTADGSEFEKRTADGSEFESPKKKAKVE

SEQ ID NO: 141 - protein, 2090 aa, synthetic construct
  source 1..2090: note = Description of Artificial Sequence: Synthetic polypeptide
MPAAKRVKLDGGDKKYSIGLDIGTNSVGWAVITDEYKVPSKKFKVLGNTDRHSIKKNLIGALLFDSGETAEATRLKRTARRRYTRRKNRICYLQEIFSNEMAKVDDSFFHRLEESFLVEEDKKHERHPIFGNIVDEVAYHEKYPTIYHLRKKLVDSTDKADLRLIYLALAHMIKFRGHFLIEGDLNPDNSDVDKLFIQLVQTYNQLFEENPINASGVDAKAILSARLSKSRRLENLIAQLPGEKKNGLFGNLIALSLGLTPNFKSNFDLAEDAKLQLSKDTYDDDLDNLLAQIGDQYADLFLAAKNLSDAILLSDILRVNTEITKAPLSASMIKRYDEHHQDLTLLKALVRQQLPEKYKEIFFDQSKNGYAGYIDGGASQEEFYKFIKPILEKMDGTEELLVKLNREDLLRKQRTFDNGSIPHQIHLGELHAILRRQEDFYPFLKDNREKIEKILTFRIPYYVGPLARGNSRFAWMTRKSEETITPWNFEEVVDKGASAQSFIERMTNFDKNLPNEKVLPKHSLLYEYFTVYNELTKVKYVTEGMRKPAFLSGEQKKAIVDLLFKTNRKVTVKQLKEDYFKKIECFDSVEISGVEDRFNASLGTYHDLLKIIKDKDFLDNEENEDILEDIVLTLTLFEDREMIEERLKTYAHLFDDKVMKQLKRRRYTGWGRLSRKLINGIRDKQSGKTILDFLKSDGFANRNFMQLIHDDSLTFKEDIQKAQVSGQGDSLHEHIANLAGSPAIKKGILQTVKVVDELVKVMGRHKPENIVIEMARENQTTQKGQKNSRERMKRIEEGIKELGSQILKEHPVENTQLQNEKLYLYYLQNGRDMYVDQELDINRLSDYDVDHIVPQSFLKDDSIDNKVLTRSDKARGKSDNVPSEEVVKKMKNYWRQLLNAKLITQRKFDNLTKAERGGLSELDKAGFIKRQLVETRQITKHVAQILDSRMNTKYDENDKLIREVKVITLKSKLVSDFRKDFQFYKVREINNYHHAHDAYLNAVVGTALIKKYPKLESEFVYGDYKVYDVRKMIAKSEQEIGKATAKYFFYSNIMNFFKTEITLANGEIRKRPLIETNGETGEIVWDKGRDFATVRKVLSMPQVNIVKKTEVQTGGFSKESILPKRNSDKLIARKKDWDPKKYGGFDSPTVAYSVLVVAKVEKGKSKKLKSVKELLGITIMERSSFEKNPIDFLEAKGYKEVKKDLIIKLPKYSLFELENGRKRMLASAGELQKGNELALPSKYVNFLYLASHYEKLKGSPEDNEQKQLFVEQHKHYLDEIIEQISEFSKRVILADANLDKVLSAYNKHRDKPIREQAENIIHLFTLTNLGAPAAFKYFDTTIDRKRYTSTKEVLDATLIHQSITGLYETRIDLSQLGGDGGEAAAKGGSPAPGGTLQLDDEYRLYSPLVKPDQNIQFWLEQFPQAWAETAGMGLAKQVPPQVIQLKASATPVSVRQYPLSKEAQEGIRPHVQRLIQQGILVPVQSPWNTPLLPVRKPGTNDYRPVQDLREVNKRVQDIHPTVPNPYNLLCALPPQRSWYTVLDLKDAFFCLRLHPTSQPLFAFEWRDPGTGRTGQLTWTRLPQGFKNSPTIFNEALHRDLANFRIQHPQVTLLQYVDDLLLAGATKQDCLEGTKALLLELSDLGYRASAKKAQICRREVTYLGYSLRDGQRWLTEARKKTVVQIPAPTTAKQVREFLGTAGFCRLWIPGFATLAAPLYPLTKPKGEFSWAPEHQKAFDAIKKALLSAPALALPDVTKPFTLYVDERKGVARGVLTQTLGPWRRPVAYLSKKLDPVASGWPVCLKAIAAVAILVKDADKLTLGQNITVIAPHALENIVRQPPDRWMTNARMTHYQSLLLTERVTFAPPAALNPATLLPEETDEPVTHDCHQLLIEETGVRKDLTDIPLTGEVLTWFTDGSSYVVEGKRMAGAAVVDGTRTIWASSLPEGTSAQKAELMALTQALRLAEGKSINIYTDSRYAFATAHVHGAIYKQRGWLTSAGREIKNKEEILSLLEALHLPKRLAIIHCPGHQKAKDPISRGNQMADRVAKQAAQGVNLLAGKRTADGSEFEKRTADGSEFESPKKKAKVE

SEQ ID NO: 142 - protein, 2097 aa, synthetic construct
  source 1..2097: note = Description of Artificial Sequence: Synthetic polypeptide
MPAAKRVKLDGGDKKYSIGLDIGTNSVGWAVITDEYKVPSKKFKVLGNTDRHSIKKNLIGALLFDSGETAEATRLKRTARRRYTRRKNRICYLQEIFSNEMAKVDDSFFHRLEESFLVEEDKKHERHPIFGNIVDEVAYHEKYPTIYHLRKKLVDSTDKADLRLIYLALAHMIKFRGHFLIEGDLNPDNSDVDKLFIQLVQTYNQLFEENPINASGVDAKAILSARLSKSRRLENLIAQLPGEKKNGLFGNLIALSLGLTPNFKSNFDLAEDAKLQLSKDTYDDDLDNLLAQIGDQYADLFLAAKNLSDAILLSDILRVNTEITKAPLSASMIKRYDEHHQDLTLLKALVRQQLPEKYKEIFFDQSKNGYAGYIDGGASQEEFYKFIKPILEKMDGTEELLVKLNREDLLRKQRTFDNGSIPHQIHLGELHAILRRQEDFYPFLKDNREKIEKILTFRIPYYVGPLARGNSRFAWMTRKSEETITPWNFEEVVDKGASAQSFIERMTNFDKNLPNEKVLPKHSLLYEYFTVYNELTKVKYVTEGMRKPAFLSGEQKKAIVDLLFKTNRKVTVKQLKEDYFKKIECFDSVEISGVEDRFNASLGTYHDLLKIIKDKDFLDNEENEDILEDIVLTLTLFEDREMIEERLKTYAHLFDDKVMKQLKRRRYTGWGRLSRKLINGIRDKQSGKTILDFLKSDGFANRNFMQLIHDDSLTFKEDIQKAQVSGQGDSLHEHIANLAGSPAIKKGILQTVKVVDELVKVMGRHKPENIVIEMARENQTTQKGQKNSRERMKRIEEGIKELGSQILKEHPVENTQLQNEKLYLYYLQNGRDMYVDQELDINRLSDYDVDHIVPQSFLKDDSIDNKVLTRSDKARGKSDNVPSEEVVKKMKNYWRQLLNAKLITQRKFDNLTKAERGGLSELDKAGFIKRQLVETRQITKHVAQILDSRMNTKYDENDKLIREVKVITLKSKLVSDFRKDFQFYKVREINNYHHAHDAYLNAVVGTALIKKYPKLESEFVYGDYKVYDVRKMIAKSEQEIGKATAKYFFYSNIMNFFKTEITLANGEIRKRPLIETNGETGEIVWDKGRDFATVRKVLSMPQVNIVKKTEVQTGGFSKESILPKRNSDKLIARKKDWDPKKYGGFDSPTVAYSVLVVAKVEKGKSKKLKSVKELLGITIMERSSFEKNPIDFLEAKGYKEVKKDLIIKLPKYSLFELENGRKRMLASAGELQKGNELALPSKYVNFLYLASHYEKLKGSPEDNEQKQLFVEQHKHYLDEIIEQISEFSKRVILADANLDKVLSAYNKHRDKPIREQAENIIHLFTLTNLGAPAAFKYFDTTIDRKRYTSTKEVLDATLIHQSITGLYETRIDLSQLGGDGGGGSGGSGGSGGSGGSGGSGGTLQLDDEYRLYSPLVKPDQNIQFWLEQFPQAWAETAGMGLAKQVPPQVIQLKASATPVSVRQYPLSKEAQEGIRPHVQRLIQQGILVPVQSPWNTPLLPVRKPGTNDYRPVQDLREVNKRVQDIHPTVPNPYNLLCALPPQRSWYTVLDLKDAFFCLRLHPTSQPLFAFEWRDPGTGRTGQLTWTRLPQGFKNSPTIFNEALHRDLANFRIQHPQVTLLQYVDDLLLAGATKQDCLEGTKALLLELSDLGYRASAKKAQICRREVTYLGYSLRDGQRWLTEARKKTVVQIPAPTTAKQVREFLGTAGFCRLWIPGFATLAAPLYPLTKPKGEFSWAPEHQKAFDAIKKALLSAPALALPDVTKPFTLYVDERKGVARGVLTQTLGPWRRPVAYLSKKLDPVASGWPVCLKAIAAVAILVKDADKLTLGQNITVIAPHALENIVRQPPDRWMTNARMTHYQSLLLTERVTFAPPAALNPATLLPEETDEPVTHDCHQLLIEETGVRKDLTDIPLTGEVLTWFTDGSSYVVEGKRMAGAAVVDGTRTIWASSLPEGTSAQKAELMALTQALRLAEGKSINIYTDSRYAFATAHVHGAIYKQRGWLTSAGREIKNKEEILSLLEALHLPKRLAIIHCPGHQKAKDPISRGNQMADRVAKQAAQGVNLLAGKRTADGSEFEKRTADGSEFESPKKKAKVE

SEQ ID NO: 143 - protein, 2085 aa, synthetic construct
  source 1..2085: note = Description of Artificial Sequence: Synthetic polypeptide
MPAAKRVKLDGGDKKYSIGLDIGTNSVGWAVITDEYKVPSKKFKVLGNTDRHSIKKNLIGALLFDSGETAEATRLKRTARRRYTRRKNRICYLQEIFSNEMAKVDDSFFHRLEESFLVEEDKKHERHPIFGNIVDEVAYHEKYPTIYHLRKKLVDSTDKADLRLIYLALAHMIKFRGHFLIEGDLNPDNSDVDKLFIQLVQTYNQLFEENPINASGVDAKAILSARLSKSRRLENLIAQLPGEKKNGLFGNLIALSLGLTPNFKSNFDLAEDAKLQLSKDTYDDDLDNLLAQIGDQYADLFLAAKNLSDAILLSDILRVNTEITKAPLSASMIKRYDEHHQDLTLLKALVRQQLPEKYKEIFFDQSKNGYAGYIDGGASQEEFYKFIKPILEKMDGTEELLVKLNREDLLRKQRTFDNGSIPHQIHLGELHAILRRQEDFYPFLKDNREKIEKILTFRIPYYVGPLARGNSRFAWMTRKSEETITPWNFEEVVDKGASAQSFIERMTNFDKNLPNEKVLPKHSLLYEYFTVYNELTKVKYVTEGMRKPAFLSGEQKKAIVDLLFKTNRKVTVKQLKEDYFKKIECFDSVEISGVEDRFNASLGTYHDLLKIIKDKDFLDNEENEDILEDIVLTLTLFEDREMIEERLKTYAHLFDDKVMKQLKRRRYTGWGRLSRKLINGIRDKQSGKTILDFLKSDGFANRNFMQLIHDDSLTFKEDIQKAQVSGQGDSLHEHIANLAGSPAIKKGILQTVKVVDELVKVMGRHKPENIVIEMARENQTTQKGQKNSRERMKRIEEGIKELGSQILKEHPVENTQLQNEKLYLYYLQNGRDMYVDQELDINRLSDYDVDHIVPQSFLKDDSIDNKVLTRSDKARGKSDNVPSEEVVKKMKNYWRQLLNAKLITQRKFDNLTKAERGGLSELDKAGFIKRQLVETRQITKHVAQILDSRMNTKYDENDKLIREVKVITLKSKLVSDFRKDFQFYKVREINNYHHAHDAYLNAVVGTALIKKYPKLESEFVYGDYKVYDVRKMIAKSEQEIGKATAKYFFYSNIMNFFKTEITLANGEIRKRPLIETNGETGEIVWDKGRDFATVRKVLSMPQVNIVKKTEVQTGGFSKESILPKRNSDKLIARKKDWDPKKYGGFDSPTVAYSVLVVAKVEKGKSKKLKSVKELLGITIMERSSFEKNPIDFLEAKGYKEVKKDLIIKLPKYSLFELENGRKRMLASAGELQKGNELALPSKYVNFLYLASHYEKLKGSPEDNEQKQLFVEQHKHYLDEIIEQISEFSKRVILADANLDKVLSAYNKHRDKPIREQAENIIHLFTLTNLGAPAAFKYFDTTIDRKRYTSTKEVLDATLIHQSITGLYETRIDLSQLGGDGGGGGPAPGGTLQLDDEYRLYSPLVKPDQNIQFWLEQFPQAWAETAGMGLAKQVPPQVIQLKASATPVSVRQYPLSKEAQEGIRPHVQRLIQQGILVPVQSPWNTPLLPVRKPGTNDYRPVQDLREVNKRVQDIHPTVPNPYNLLCALPPQRSWYTVLDLKDAFFCLRLHPTSQPLFAFEWRDPGTGRTGQLTWTRLPQGFKNSPTIFNEALHRDLANFRIQHPQVTLLQYVDDLLLAGATKQDCLEGTKALLLELSDLGYRASAKKAQICRREVTYLGYSLRDGQRWLTEARKKTVVQIPAPTTAKQVREFLGTAGFCRLWIPGFATLAAPLYPLTKPKGEFSWAPEHQKAFDAIKKALLSAPALALPDVTKPFTLYVDERKGVARGVLTQTLGPWRRPVAYLSKKLDPVASGWPVCLKAIAAVAILVKDADKLTLGQNITVIAPHALENIVRQPPDRWMTNARMTHYQSLLLTERVTFAPPAALNPATLLPEETDEPVTHDCHQLLIEETGVRKDLTDIPLTGEVLTWFTDGSSYVVEGKRMAGAAVVDGTRTIWASSLPEGTSAQKAELMALTQALRLAEGKSINIYTDSRYAFATAHVHGAIYKQRGWLTSAGREIKNKEEILSLLEALHLPKRLAIIHCPGHQKAKDPISRGNQMADRVAKQAAQGVNLLAGKRTADGSEFEKRTADGSEFESPKKKAKVE

SEQ ID NO: 144 - protein, 2088 aa, synthetic construct
  source 1..2088: note = Description of Artificial Sequence: Synthetic polypeptide
MPAAKRVKLDGGDKKYSIGLDIGTNSVGWAVITDEYKVPSKKFKVLGNTDRHSIKKNLIGALLFDSGETAEATRLKRTARRRYTRRKNRICYLQEIFSNEMAKVDDSFFHRLEESFLVEEDKKHERHPIFGNIVDEVAYHEKYPTIYHLRKKLVDSTDKADLRLIYLALAHMIKFRGHFLIEGDLNPDNSDVDKLFIQLVQTYNQLFEENPINASGVDAKAILSARLSKSRRLENLIAQLPGEKKNGLFGNLIALSLGLTPNFKSNFDLAEDAKLQLSKDTYDDDLDNLLAQIGDQYADLFLAAKNLSDAILLSDILRVNTEITKAPLSASMIKRYDEHHQDLTLLKALVRQQLPEKYKEIFFDQSKNGYAGYIDGGASQEEFYKFIKPILEKMDGTEELLVKLNREDLLRKQRTFDNGSIPHQIHLGELHAILRRQEDFYPFLKDNREKIEKILTFRIPYYVGPLARGNSRFAWMTRKSEETITPWNFEEVVDKGASAQSFIERMTNFDKNLPNEKVLPKHSLLYEYFTVYNELTKVKYVTEGMRKPAFLSGEQKKAIVDLLFKTNRKVTVKQLKEDYFKKIECFDSVEISGVEDRFNASLGTYHDLLKIIKDKDFLDNEENEDILEDIVLTLTLFEDREMIEERLKTYAHLFDDKVMKQLKRRRYTGWGRLSRKLINGIRDKQSGKTILDFLKSDGFANRNFMQLIHDDSLTFKEDIQKAQVSGQGDSLHEHIANLAGSPAIKKGILQTVKVVDELVKVMGRHKPENIVIEMARENQTTQKGQKNSRERMKRIEEGIKELGSQILKEHPVENTQLQNEKLYLYYLQNGRDMYVDQELDINRLSDYDVDHIVPQSFLKDDSIDNKVLTRSDKARGKSDNVPSEEVVKKMKNYWRQLLNAKLITQRKFDNLTKAERGGLSELDKAGFIKRQLVETRQITKHVAQILDSRMNTKYDENDKLIREVKVITLKSKLVSDFRKDFQFYKVREINNYHHAHDAYLNAVVGTALIKKYPKLESEFVYGDYKVYDVRKMIAKSEQEIGKATAKYFFYSNIMNFFKTEITLANGEIRKRPLIETNGETGEIVWDKGRDFATVRKVLSMPQVNIVKKTEVQTGGFSKESILPKRNSDKLIARKKDWDPKKYGGFDSPTVAYSVLVVAKVEKGKSKKLKSVKELLGITIMERSSFEKNPIDFLEAKGYKEVKKDLIIKLPKYSLFELENGRKRMLASAGELQKGNELALPSKYVNFLYLASHYEKLKGSPEDNEQKQLFVEQHKHYLDEIIEQISEFSKRVILADANLDKVLSAYNKHRDKPIREQAENIIHLFTLTNLGAPAAFKYFDTTIDRKRYTSTKEVLDATLIHQSITGLYETRIDLSQLGGDGGGGSGSSGGGGGTLQLDDEYRLYSPLVKPDQNIQFWLEQFPQAWAETAGMGLAKQVPPQVIQLKASATPVSVRQYPLSKEAQEGIRPHVQRLIQQGILVPVQSPWNTPLLPVRKPGTNDYRPVQDLREVNKRVQDIHPTVPNPYNLLCALPPQRSWYTVLDLKDAFFCLRLHPTSQPLFAFEWRDPGTGRTGQLTWTRLPQGFKNSPTIFNEALHRDLANFRIQHPQVTLLQYVDDLLLAGATKQDCLEGTKALLLELSDLGYRASAKKAQICRREVTYLGYSLRDGQRWLTEARKKTVVQIPAPTTAKQVREFLGTAGFCRLWIPGFATLAAPLYPLTKPKGEFSWAPEHQKAFDAIKKALLSAPALALPDVTKPFTLYVDERKGVARGVLTQTLGPWRRPVAYLSKKLDPVASGWPVCLKAIAAVAILVKDADKLTLGQNITVIAPHALENIVRQPPDRWMTNARMTHYQSLLLTERVTFAPPAALNPATLLPEETDEPVTHDCHQLLIEETGVRKDLTDIPLTGEVLTWFTDGSSYVVEGKRMAGAAVVDGTRTIWASSLPEGTSAQKAELMALTQALRLAEGKSINIYTDSRYAFATAHVHGAIYKQRGWLTSAGREIKNKEEILSLLEALHLPKRLAIIHCPGHQKAKDPISRGNQMADRVAKQAAQGVNLLAGKRTADGSEFEKRTADGSEFESPKKKAKVE

SEQ ID NO: 145 - protein, 2091 aa, synthetic construct
  source 1..2091: note = Description of Artificial Sequence: Synthetic polypeptide
MPAAKRVKLDGGDKKYSIGLDIGTNSVGWAVITDEYKVPSKKFKVLGNTDRHSIKKNLIGALLFDSGETAEATRLKRTARRRYTRRKNRICYLQEIFSNEMAKVDDSFFHRLEESFLVEEDKKHERHPIFGNIVDEVAYHEKYPTIYHLRKKLVDSTDKADLRLIYLALAHMIKFRGHFLIEGDLNPDNSDVDKLFIQLVQTYNQLFEENPINASGVDAKAILSARLSKSRRLENLIAQLPGEKKNGLFGNLIALSLGLTPNFKSNFDLAEDAKLQLSKDTYDDDLDNLLAQIGDQYADLFLAAKNLSDAILLSDILRVNTEITKAPLSASMIKRYDEHHQDLTLLKALVRQQLPEKYKEIFFDQSKNGYAGYIDGGASQEEFYKFIKPILEKMDGTEELLVKLNREDLLRKQRTFDNGSIPHQIHLGELHAILRRQEDFYPFLKDNREKIEKILTFRIPYYVGPLARGNSRFAWMTRKSEETITPWNFEEVVDKGASAQSFIERMTNFDKNLPNEKVLPKHSLLYEYFTVYNELTKVKYVTEGMRKPAFLSGEQKKAIVDLLFKTNRKVTVKQLKEDYFKKIECFDSVEISGVEDRFNASLGTYHDLLKIIKDKDFLDNEENEDILEDIVLTLTLFEDREMIEERLKTYAHLFDDKVMKQLKRRRYTGWGRLSRKLINGIRDKQSGKTILDFLKSDGFANRNFMQLIHDDSLTFKEDIQKAQVSGQGDSLHEHIANLAGSPAIKKGILQTVKVVDELVKVMGRHKPENIVIEMARENQTTQKGQKNSRERMKRIEEGIKELGSQILKEHPVENTQLQNEKLYLYYLQNGRDMYVDQELDINRLSDYDVDHIVPQSFLKDDSIDNKVLTRSDKARGKSDNVPSEEVVKKMKNYWRQLLNAKLITQRKFDNLTKAERGGLSELDKAGFIKRQLVETRQITKHVAQILDSRMNTKYDENDKLIREVKVITLKSKLVSDFRKDFQFYKVREINNYHHAHDAYLNAVVGTALIKKYPKLESEFVYGDYKVYDVRKMIAKSEQEIGKATAKYFFYSNIMNFFKTEITLANGEIRKRPLIETNGETGEIVWDKGRDFATVRKVLSMPQVNIVKKTEVQTGGFSKESILPKRNSDKLIARKKDWDPKKYGGFDSPTVAYSVLVVAKVEKGKSKKLKSVKELLGITIMERSSFEKNPIDFLEAKGYKEVKKDLIIKLPKYSLFELENGRKRMLASAGELQKGNELALPSKYVNFLYLASHYEKLKGSPEDNEQKQLFVEQHKHYLDEIIEQISEFSKRVILADANLDKVLSAYNKHRDKPIREQAENIIHLFTLTNLGAPAAFKYFDTTIDRKRYTSTKEVLDATLIHQSITGLYETRIDLSQLGGDGGGGSGGSGGSGGSGGTLQLDDEYRLYSPLVKPDQNIQFWLEQFPQAWAETAGMGLAKQVPPQVIQLKASATPVSVRQYPLSKEAQEGIRPHVQRLIQQGILVPVQSPWNTPLLPVRKPGTNDYRPVQDLREVNKRVQDIHPTVPNPYNLLCALPPQRSWYTVLDLKDAFFCLRLHPTSQPLFAFEWRDPGTGRTGQLTWTRLPQGFKNSPTIFNEALHRDLANFRIQHPQVTLLQYVDDLLLAGATKQDCLEGTKALLLELSDLGYRASAKKAQICRREVTYLGYSLRDGQRWLTEARKKTVVQIPAPTTAKQVREFLGTAGFCRLWIPGFATLAAPLYPLTKPKGEFSWAPEHQKAFDAIKKALLSAPALALPDVTKPFTLYVDERKGVARGVLTQTLGPWRRPVAYLSKKLDPVASGWPVCLKAIAAVAILVKDADKLTLGQNITVIAPHALENIVRQPPDRWMTNARMTHYQSLLLTERVTFAPPAALNPATLLPEETDEPVTHDCHQLLIEETGVRKDLTDIPLTGEVLTWFTDGSSYVVEGKRMAGAAVVDGTRTIWASSLPEGTSAQKAELMALTQALRLAEGKSINIYTDSRYAFATAHVHGAIYKQRGWLTSAGREIKNKEEILSLLEALHLPKRLAIIHCPGHQKAKDPISRGNQMADRVAKQAAQGVNLLAGKRTADGSEFEKRTADGSEFESPKKKAKVE

SEQ ID NO: 146 - protein, 2090 aa, synthetic construct
  source 1..2090: note = Description of Artificial Sequence: Synthetic polypeptide
MPAAKRVKLDGGDKKYSIGLDIGTNSVGWAVITDEYKVPSKKFKVLGNTDRHSIKKNLIGALLFDSGETAEATRLKRTARRRYTRRKNRICYLQEIFSNEMAKVDDSFFHRLEESFLVEEDKKHERHPIFGNIVDEVAYHEKYPTIYHLRKKLVDSTDKADLRLIYLALAHMIKFRGHFLIEGDLNPDNSDVDKLFIQLVQTYNQLFEENPINASGVDAKAILSARLSKSRRLENLIAQLPGEKKNGLFGNLIALSLGLTPNFKSNFDLAEDAKLQLSKDTYDDDLDNLLAQIGDQYADLFLAAKNLSDAILLSDILRVNTEITKAPLSASMIKRYDEHHQDLTLLKALVRQQLPEKYKEIFFDQSKNGYAGYIDGGASQEEFYKFIKPILEKMDGTEELLVKLNREDLLRKQRTFDNGSIPHQIHLGELHAILRRQEDFYPFLKDNREKIEKILTFRIPYYVGPLARGNSRFAWMTRKSEETITPWNFEEVVDKGASAQSFIERMTNFDKNLPNEKVLPKHSLLYEYFTVYNELTKVKYVTEGMRKPAFLSGEQKKAIVDLLFKTNRKVTVKQLKEDYFKKIECFDSVEISGVEDRFNASLGTYHDLLKIIKDKDFLDNEENEDILEDIVLTLTLFEDREMIEERLKTYAHLFDDKVMKQLKRRRYTGWGRLSRKLINGIRDKQSGKTILDFLKSDGFANRNFMQLIHDDSLTFKEDIQKAQVSGQGDSLHEHIANLAGSPAIKKGILQTVKVVDELVKVMGRHKPENIVIEMARENQTTQKGQKNSRERMKRIEEGIKELGSQILKEHPVENTQLQNEKLYLYYLQNGRDMYVDQELDINRLSDYDVDHIVPQSFLKDDSIDNKVLTRSDKARGKSDNVPSEEVVKKMKNYWRQLLNAKLITQRKFDNLTKAERGGLSELDKAGFIKRQLVETRQITKHVAQILDSRMNTKYDENDKLIREVKVITLKSKLVSDFRKDFQFYKVREINNYHHAHDAYLNAVVGTALIKKYPKLESEFVYGDYKVYDVRKMIAKSEQEIGKATAKYFFYSNIMNFFKTEITLANGEIRKRPLIETNGETGEIVWDKGRDFATVRKVLSMPQVNIVKKTEVQTGGFSKESILPKRNSDKLIARKKDWDPKKYGGFDSPTVAYSVLVVAKVEKGKSKKLKSVKELLGITIMERSSFEKNPIDFLEAKGYKEVKKDLIIKLPKYSLFELENGRKRMLASAGELQKGNELALPSKYVNFLYLASHYEKLKGSPEDNEQKQLFVEQHKHYLDEIIEQISEFSKRVILADANLDKVLSAYNKHRDKPIREQAENIIHLFTLTNLGAPAAFKYFDTTIDRKRYTSTKEVLDATLIHQSITGLYETRIDLSQLGGDGGEAAAKGGGGSSGGTLQLDDEYRLYSPLVKPDQNIQFWLEQFPQAWAETAGMGLAKQVPPQVIQLKASATPVSVRQYPLSKEAQEGIRPHVQRLIQQGILVPVQSPWNTPLLPVRKPGTNDYRPVQDLREVNKRVQDIHPTVPNPYNLLCALPPQRSWYTVLDLKDAFFCLRLHPTSQPLFAFEWRDPGTGRTGQLTWTRLPQGFKNSPTIFNEALHRDLANFRIQHPQVTLLQYVDDLLLAGATKQDCLEGTKALLLELSDLGYRASAKKAQICRREVTYLGYSLRDGQRWLTEARKKTVVQIPAPTTAKQVREFLGTAGFCRLWIPGFATLAAPLYPLTKPKGEFSWAPEHQKAFDAIKKALLSAPALALPDVTKPFTLYVDERKGVARGVLTQTLGPWRRPVAYLSKKLDPVASGWPVCLKAIAAVAILVKDADKLTLGQNITVIAPHALENIVRQPPDRWMTNARMTHYQSLLLTERVTFAPPAALNPATLLPEETDEPVTHDCHQLLIEETGVRKDLTDIPLTGEVLTWFTDGSSYVVEGKRMAGAAVVDGTRTIWASSLPEGTSAQKAELMALTQALRLAEGKSINIYTDSRYAFATAHVHGAIYKQRGWLTSAGREIKNKEEILSLLEALHLPKRLAIIHCPGHQKAKDPISRGNQMADRVAKQAAQGVNLLAGKRTADGSEFEKRTADGSEFESPKKKAKVE

SEQ ID NO: 147 - protein, 2084 aa, synthetic construct
  source 1..2084: note = Description of Artificial Sequence: Synthetic polypeptide
MPAAKRVKLDGGDKKYSIGLDIGTNSVGWAVITDEYKVPSKKFKVLGNTDRHSIKKNLIGALLFDSGETAEATRLKRTARRRYTRRKNRICYLQEIFSNEMAKVDDSFFHRLEESFLVEEDKKHERHPIFGNIVDEVAYHEKYPTIYHLRKKLVDSTDKADLRLIYLALAHMIKFRGHFLIEGDLNPDNSDVDKLFIQLVQTYNQLFEENPINASGVDAKAILSARLSKSRRLENLIAQLPGEKKNGLFGNLIALSLGLTPNFKSNFDLAEDAKLQLSKDTYDDDLDNLLAQIGDQYADLFLAAKNLSDAILLSDILRVNTEITKAPLSASMIKRYDEHHQDLTLLKALVRQQLPEKYKEIFFDQSKNGYAGYIDGGASQEEFYKFIKPILEKMDGTEELLVKLNREDLLRKQRTFDNGSIPHQIHLGELHAILRRQEDFYPFLKDNREKIEKILTFRIPYYVGPLARGNSRFAWMTRKSEETITPWNFEEVVDKGASAQSFIERMTNFDKNLPNEKVLPKHSLLYEYFTVYNELTKVKYVTEGMRKPAFLSGEQKKAIVDLLFKTNRKVTVKQLKEDYFKKIECFDSVEISGVEDRFNASLGTYHDLLKIIKDKDFLDNEENEDILEDIVLTLTLFEDREMIEERLKTYAHLFDDKVMKQLKRRRYTGWGRLSRKLINGIRDKQSGKTILDFLKSDGFANRNFMQLIHDDSLTFKEDIQKAQVSGQGDSLHEHIANLAGSPAIKKGILQTVKVVDELVKVMGRHKPENIVIEMARENQTTQKGQKNSRERMKRIEEGIKELGSQILKEHPVENTQLQNEKLYLYYLQNGRDMYVDQELDINRLSDYDVDHIVPQSFLKDDSIDNKVLTRSDKARGKSDNVPSEEVVKKMKNYWRQLLNAKLITQRKFDNLTKAERGGLSELDKAGFIKRQLVETRQITKHVAQILDSRMNTKYDENDKLIREVKVITLKSKLVSDFRKDFQFYKVREINNYHHAHDAYLNAVVGTALIKKYPKLESEFVYGDYKVYDVRKMIAKSEQEIGKATAKYFFYSNIMNFFKTEITLANGEIRKRPLIETNGETGEIVWDKGRDFATVRKVLSMPQVNIVKKTEVQTGGFSKESILPKRNSDKLIARKKDWDPKKYGGFDSPTVAYSVLVVAKVEKGKSKKLKSVKELLGITIMERSSFEKNPIDFLEAKGYKEVKKDLIIKLPKYSLFELENGRKRMLASAGELQKGNELALPSKYVNFLYLASHYEKLKGSPEDNEQKQLFVEQHKHYLDEIIEQISEFSKRVILADANLDKVLSAYNKHRDKPIREQAENIIHLFTLTNLGAPAAFKYFDTTIDRKRYTSTKEVLDATLIHQSITGLYETRIDLSQLGGDGGGGGGSGGTLQLDDEYRLYSPLVKPDQNIQFWLEQFPQAWAETAGMGLAKQVPPQVIQLKASATPVSVRQYPLSKEAQEGIRPHVQRLIQQGILVPVQSPWNTPLLPVRKPGTNDYRPVQDLREVNKRVQDIHPTVPNPYNLLCALPPQRSWYTVLDLKDAFFCLRLHPTSQPLFAFEWRDPGTGRTGQLTWTRLPQGFKNSPTIFNEALHRDLANFRIQHPQVTLLQYVDDLLLAGATKQDCLEGTKALLLELSDLGYRASAKKAQICRREVTYLGYSLRDGQRWLTEARKKTVVQIPAPTTAKQVREFLGTAGFCRLWIPGFATLAAPLYPLTKPKGEFSWAPEHQKAFDAIKKALLSAPALALPDVTKPFTLYVDERKGVARGVLTQTLGPWRRPVAYLSKKLDPVASGWPVCLKAIAAVAILVKDADKLTLGQNITVIAPHALENIVRQPPDRWMTNARMTHYQSLLLTERVTFAPPAALNPATLLPEETDEPVTHDCHQLLIEETGVRKDLTDIPLTGEVLTWFTDGSSYVVEGKRMAGAAVVDGTRTIWASSLPEGTSAQKAELMALTQALRLAEGKSINIYTDSRYAFATAHVHGAIYKQRGWLTSAGREIKNKEEILSLLEALHLPKRLAIIHCPGHQKAKDPISRGNQMADRVAKQAAQGVNLLAGKRTADGSEFEKRTADGSEFESPKKKAKVE

SEQ ID NO: 148 - protein, 2085 aa, synthetic construct
  source 1..2085: note = Description of Artificial Sequence: Synthetic polypeptide
MPAAKRVKLDGGDKKYSIGLDIGTNSVGWAVITDEYKVPSKKFKVLGNTDRHSIKKNLIGALLFDSGETAEATRLKRTARRRYTRRKNRICYLQEIFSNEMAKVDDSFFHRLEESFLVEEDKKHERHPIFGNIVDEVAYHEKYPTIYHLRKKLVDSTDKADLRLIYLALAHMIKFRGHFLIEGDLNPDNSDVDKLFIQLVQTYNQLFEENPINASGVDAKAILSARLSKSRRLENLIAQLPGEKKNGLFGNLIALSLGLTPNFKSNFDLAEDAKLQLSKDTYDDDLDNLLAQIGDQYADLFLAAKNLSDAILLSDILRVNTEITKAPLSASMIKRYDEHHQDLTLLKALVRQQLPEKYKEIFFDQSKNGYAGYIDGGASQEEFYKFIKPILEKMDGTEELLVKLNREDLLRKQRTFDNGSIPHQIHLGELHAILRRQEDFYPFLKDNREKIEKILTFRIPYYVGPLARGNSRFAWMTRKSEETITPWNFEEVVDKGASAQSFIERMTNFDKNLPNEKVLPKHSLLYEYFTVYNELTKVKYVTEGMRKPAFLSGEQKKAIVDLLFKTNRKVTVKQLKEDYFKKIECFDSVEISGVEDRFNASLGTYHDLLKIIKDKDFLDNEENEDILEDIVLTLTLFEDREMIEERLKTYAHLFDDKVMKQLKRRRYTGWGRLSRKLINGIRDKQSGKTILDFLKSDGFANRNFMQLIHDDSLTFKEDIQKAQVSGQGDSLHEHIANLAGSPAIKKGILQTVKVVDELVKVMGRHKPENIVIEMARENQTTQKGQKNSRERMKRIEEGIKELGSQILKEHPVENTQLQNEKLYLYYLQNGRDMYVDQELDINRLSDYDVDHIVPQSFLKDDSIDNKVLTRSDKARGKSDNVPSEEVVKKMKNYWRQLLNAKLITQRKFDNLTKAERGGLSELDKAGFIKRQLVETRQITKHVAQILDSRMNTKYDENDKLIREVKVITLKSKLVSDFRKDFQFYKVREINNYHHAHDAYLNAVVGTALIKKYPKLESEFVYGDYKVYDVRKMIAKSEQEIGKATAKYFFYSNIMNFFKTEITLANGEIRKRPLIETNGETGEIVWDKGRDFATVRKVLSMPQVNIVKKTEVQTGGFSKESILPKRNSDKLIARKKDWDPKKYGGFDSPTVAYSVLVVAKVEKGKSKKLKSVKELLGITIMERSSFEKNPIDFLEAKGYKEVKKDLIIKLPKYSLFELENGRKRMLASAGELQKGNELALPSKYVNFLYLASHYEKLKGSPEDNEQKQLFVEQHKHYLDEIIEQISEFSKRVILADANLDKVLSAYNKHRDKPIREQAENIIHLFTLTNLGAPAAFKYFDTTIDRKRYTSTKEVLDATLIHQSITGLYETRIDLSQLGGDGGGSSPAPGGTLQLDDEYRLYSPLVKPDQNIQFWLEQFPQAWAETAGMGLAKQVPPQVIQLKASATPVSVRQYPLSKEAQEGIRPHVQRLIQQGILVPVQSPWNTPLLPVRKPGTNDYRPVQDLREVNKRVQDIHPTVPNPYNLLCALPPQRSWYTVLDLKDAFFCLRLHPTSQPLFAFEWRDPGTGRTGQLTWTRLPQGFKNSPTIFNEALHRDLANFRIQHPQVTLLQYVDDLLLAGATKQDCLEGTKALLLELSDLGYRASAKKAQICRREVTYLGYSLRDGQRWLTEARKKTVVQIPAPTTAKQVREFLGTAGFCRLWIPGFATLAAPLYPLTKPKGEFSWAPEHQKAFDAIKKALLSAPALALPDVTKPFTLYVDERKGVARGVLTQTLGPWRRPVAYLSKKLDPVASGWPVCLKAIAAVAILVKDADKLTLGQNITVIAPHALENIVRQPPDRWMTNARMTHYQSLLLTERVTFAPPAALNPATLLPEETDEPVTHDCHQLLIEETGVRKDLTDIPLTGEVLTWFTDGSSYVVEGKRMAGAAVVDGTRTIWASSLPEGTSAQKAELMALTQALRLAEGKSINIYTDSRYAFATAHVHGAIYKQRGWLTSAGREIKNKEEILSLLEALHLPKRLAIIHCPGHQKAKDPISRGNQMADRVAKQAAQGVNLLAGKRTADGSEFEKRTADGSEFESPKKKAKVE

SEQ ID NO: 149 - protein, 2083 aa, synthetic construct
  source 1..2083: note = Description of Artificial Sequence: Synthetic polypeptide
MPAAKRVKLDGGDKKYSIGLDIGTNSVGWAVITDEYKVPSKKFKVLGNTDRHSIKKNLIGALLFDSGETAEATRLKRTARRRYTRRKNRICYLQEIFSNEMAKVDDSFFHRLEESFLVEEDKKHERHPIFGNIVDEVAYHEKYPTIYHLRKKLVDSTDKADLRLIYLALAHMIKFRGHFLIEGDLNPDNSDVDKLFIQLVQTYNQLFEENPINASGVDAKAILSARLSKSRRLENLIAQLPGEKKNGLFGNLIALSLGLTPNFKSNFDLAEDAKLQLSKDTYDDDLDNLLAQIGDQYADLFLAAKNLSDAILLSDILRVNTEITKAPLSASMIKRYDEHHQDLTLLKALVRQQLPEKYKEIFFDQSKNGYAGYIDGGASQEEFYKFIKPILEKMDGTEELLVKLNREDLLRKQRTFDNGSIPHQIHLGELHAILRRQEDFYPFLKDNREKIEKILTFRIPYYVGPLARGNSRFAWMTRKSEETITPWNFEEVVDKGASAQSFIERMTNFDKNLPNEKVLPKHSLLYEYFTVYNELTKVKYVTEGMRKPAFLSGEQKKAIVDLLFKTNRKVTVKQLKEDYFKKIECFDSVEISGVEDRFNASLGTYHDLLKIIKDKDFLDNEENEDILEDIVLTLTLFEDREMIEERLKTYAHLFDDKVMKQLKRRRYTGWGRLSRKLINGIRDKQSGKTILDFLKSDGFANRNFMQLIHDDSLTFKEDIQKAQVSGQGDSLHEHIANLAGSPAIKKGILQTVKVVDELVKVMGRHKPENIVIEMARENQTTQKGQKNSRERMKRIEEGIKELGSQILKEHPVENTQLQNEKLYLYYLQNGRDMYVDQELDINRLSDYDVDHIVPQSFLKDDSIDNKVLTRSDKARGKSDNVPSEEVVKKMKNYWRQLLNAKLITQRKFDNLTKAERGGLSELDKAGFIKRQLVETRQITKHVAQILDSRMNTKYDENDKLIREVKVITLKSKLVSDFRKDFQFYKVREINNYHHAHDAYLNAVVGTALIKKYPKLESEFVYGDYKVYDVRKMIAKSEQEIGKATAKYFFYSNIMNFFKTEITLANGEIRKRPLIETNGETGEIVWDKGRDFATVRKVLSMPQVNIVKKTEVQTGGFSKESILPKRNSDKLIARKKDWDPKKYGGFDSPTVAYSVLVVAKVEKGKSKKLKSVKELLGITIMERSSFEKNPIDFLEAKGYKEVKKDLIIKLPKYSLFELENGRKRMLASAGELQKGNELALPSKYVNFLYLASHYEKLKGSPEDNEQKQLFVEQHKHYLDEIIEQISEFSKRVILADANLDKVLSAYNKHRDKPIREQAENIIHLFTLTNLGAPAAFKYFDTTIDRKRYTSTKEVLDATLIHQSITGLYETRIDLSQLGGDGGGGGGGGTLQLDDEYRLYSPLVKPDQNIQFWLEQFPQAWAETAGMGLAKQVPPQVIQLKASATPVSVRQYPLSKEAQEGIRPHVQRLIQQGILVPVQSPWNTPLLPVRKPGTNDYRPVQDLREVNKRVQDIHPTVPNPYNLLCALPPQRSWYTVLDLKDAFFCLRLHPTSQPLFAFEWRDPGTGRTGQLTWTRLPQGFKNSPTIFNEALHRDLANFRIQHPQVTLLQYVDDLLLAGATKQDCLEGTKALLLELSDLGYRASAKKAQICRREVTYLGYSLRDGQRWLTEARKKTVVQIPAPTTAKQVREFLGTAGFCRLWIPGFATLAAPLYPLTKPKGEFSWAPEHQKAFDAIKKALLSAPALALPDVTKPFTLYVDERKGVARGVLTQTLGPWRRPVAYLSKKLDPVASGWPVCLKAIAAVAILVKDADKLTLGQNITVIAPHALENIVRQPPDRWMTNARMTHYQSLLLTERVTFAPPAALNPATLLPEETDEPVTHDCHQLLIEETGVRKDLTDIPLTGEVLTWFTDGSSYVVEGKRMAGAAVVDGTRTIWASSLPEGTSAQKAELMALTQALRLAEGKSINIYTDSRYAFATAHVHGAIYKQRGWLTSAGREIKNKEEILSLLEALHLPKRLAIIHCPGHQKAKDPISRGNQMADRVAKQAAQGVNLLAGKRTADGSEFEKRTADGSEFESPKKKAKVE

SEQ ID NO: 150 - protein, 2104 aa, synthetic construct
  source 1..2104: note = Description of Artificial Sequence: Synthetic polypeptide
MPAAKRVKLDGGDKKYSIGLDIGTNSVGWAVITDEYKVPSKKFKVLGNTDRHSIKKNLIGALLFDSGETAEATRLKRTARRRYTRRKNRICYLQEIFSNEMAKVDDSFFHRLEESFLVEEDKKHERHPIFGNIVDEVAYHEKYPTIYHLRKKLVDSTDKADLRLIYLALAHMIKFRGHFLIEGDLNPDNSDVDKLFIQLVQTYNQLFEENPINASGVDAKAILSARLSKSRRLENLIAQLPGEKKNGLFGNLIALSLGLTPNFKSNFDLAEDAKLQLSKDTYDDDLDNLLAQIGDQYADLFLAAKNLSDAILLSDILRVNTEITKAPLSASMIKRYDEHHQDLTLLKALVRQQLPEKYKEIFFDQSKNGYAGYIDGGASQEEFYKFIKPILEKMDGTEELLVKLNREDLLRKQRTFDNGSIPHQIHLGELHAILRRQEDFYPFLKDNREKIEKILTFRIPYYVGPLARGNSRFAWMTRKSEETITPWNFEEVVDKGASAQSFIERMTNFDKNLPNEKVLPKHSLLYEYFTVYNELTKVKYVTEGMRKPAFLSGEQKKAIVDLLFKTNRKVTVKQLKEDYFKKIECFDSVEISGVEDRFNASLGTYHDLLKIIKDKDFLDNEENEDILEDIVLTLTLFEDREMIEERLKTYAHLFDDKVMKQLKRRRYTGWGRLSRKLINGIRDKQSGKTILDFLKSDGFANRNFMQLIHDDSLTFKEDIQKAQVSGQGDSLHEHIANLAGSPAIKKGILQTVKVVDELVKVMGRHKPENIVIEMARENQTTQKGQKNSRERMKRIEEGIKELGSQILKEHPVENTQLQNEKLYLYYLQNGRDMYVDQELDINRLSDYDVDHIVPQSFLKDDSIDNKVLTRSDKARGKSDNVPSEEVVKKMKNYWRQLLNAKLITQRKFDNLTKAERGGLSELDKAGFIKRQLVETRQITKHVAQILDSRMNTKYDENDKLIREVKVITLKSKLVSDFRKDFQFYKVREINNYHHAHDAYLNAVVGTALIKKYPKLESEFVYGDYKVYDVRKMIAKSEQEIGKATAKYFFYSNIMNFFKTEITLANGEIRKRPLIETNGETGEIVWDKGRDFATVRKVLSMPQVNIVKKTEVQTGGFSKESILPKRNSDKLIARKKDWDPKKYGGFDSPTVAYSVLVVAKVEKGKSKKLKSVKELLGITIMERSSFEKNPIDFLEAKGYKEVKKDLIIKLPKYSLFELENGRKRMLASAGELQKGNELALPSKYVNFLYLASHYEKLKGSPEDNEQKQLFVEQHKHYLDEIIEQISEFSKRVILADANLDKVLSAYNKHRDKPIREQAENIIHLFTLTNLGAPAAFKYFDTTIDRKRYTSTKEVLDATLIHQSITGLYETRIDLSQLGGDGGEAAAKEAAAKEAAAKEAAAKEAAAKGGTLQLDDEYRLYSPLVKPDQNIQFWLEQFPQAWAETAGMGLAKQVPPQVIQLKASATPVSVRQYPLSKEAQEGIRPHVQRLIQQGILVPVQSPWNTPLLPVRKPGTNDYRPVQDLREVNKRVQDIHPTVPNPYNLLCALPPQRSWYTVLDLKDAFFCLRLHPTSQPLFAFEWRDPGTGRTGQLTWTRLPQGFKNSPTIFNEALHRDLANFRIQHPQVTLLQYVDDLLLAGATKQDCLEGTKALLLELSDLGYRASAKKAQICRREVTYLGYSLRDGQRWLTEARKKTVVQIPAPTTAKQVREFLGTAGFCRLWIPGFATLAAPLYPLTKPKGEFSWAPEHQKAFDAIKKALLSAPALALPDVTKPFTLYVDERKGVARGVLTQTLGPWRRPVAYLSKKLDPVASGWPVCLKAIAAVAILVKDADKLTLGQNITVIAPHALENIVRQPPDRWMTNARMTHYQSLLLTERVTFAPPAALNPATLLPEETDEPVTHDCHQLLIEETGVRKDLTDIPLTGEVLTWFTDGSSYVVEGKRMAGAAVVDGTRTIWASSLPEGTSAQKAELMALTQALRLAEGKSINIYTDSRYAFATAHVHGAIYKQRGWLTSAGREIKNKEEILSLLEALHLPKRLAIIHCPGHQKAKDPISRGNQMADRVAKQAAQGVNLLAGKRTADGSEFEKRTADGSEFESPKKKAKVE

SEQ ID NO: 151 - protein, 2084 aa, synthetic construct
  source 1..2084: note = Description of Artificial Sequence: Synthetic polypeptide
MPAAKRVKLDGGDKKYSIGLDIGTNSVGWAVITDEYKVPSKKFKVLGNTDRHSIKKNLIGALLFDSGETAEATRLKRTARRRYTRRKNRICYLQEIFSNEMAKVDDSFFHRLEESFLVEEDKKHERHPIFGNIVDEVAYHEKYPTIYHLRKKLVDSTDKADLRLIYLALAHMIKFRGHFLIEGDLNPDNSDVDKLFIQLVQTYNQLFEENPINASGVDAKAILSARLSKSRRLENLIAQLPGEKKNGLFGNLIALSLGLTPNFKSNFDLAEDAKLQLSKDTYDDDLDNLLAQIGDQYADLFLAAKNLSDAILLSDILRVNTEITKAPLSASMIKRYDEHHQDLTLLKALVRQQLPEKYKEIFFDQSKNGYAGYIDGGASQEEFYKFIKPILEKMDGTEELLVKLNREDLLRKQRTFDNGSIPHQIHLGELHAILRRQEDFYPFLKDNREKIEKILTFRIPYYVGPLARGNSRFAWMTRKSEETITPWNFEEVVDKGASAQSFIERMTNFDKNLPNEKVLPKHSLLYEYFTVYNELTKVKYVTEGMRKPAFLSGEQKKAIVDLLFKTNRKVTVKQLKEDYFKKIECFDSVEISGVEDRFNASLGTYHDLLKIIKDKDFLDNEENEDILEDIVLTLTLFEDREMIEERLKTYAHLFDDKVMKQLKRRRYTGWGRLSRKLINGIRDKQSGKTILDFLKSDGFANRNFMQLIHDDSLTFKEDIQKAQVSGQGDSLHEHIANLAGSPAIKKGILQTVKVVDELVKVMGRHKPENIVIEMARENQTTQKGQKNSRERMKRIEEGIKELGSQILKEHPVENTQLQNEKLYLYYLQNGRDMYVDQELDINRLSDYDVDHIVPQSFLKDDSIDNKVLTRSDKARGKSDNVPSEEVVKKMKNYWRQLLNAKLITQRKFDNLTKAERGGLSELDKAGFIKRQLVETRQITKHVAQILDSRMNTKYDENDKLIREVKVITLKSKLVSDFRKDFQFYKVREINNYHHAHDAYLNAVVGTALIKKYPKLESEFVYGDYKVYDVRKMIAKSEQEIGKATAKYFFYSNIMNFFKTEITLANGEIRKRPLIETNGETGEIVWDKGRDFATVRKVLSMPQVNIVKKTEVQTGGFSKESILPKRNSDKLIARKKDWDPKKYGGFDSPTVAYSVLVVAKVEKGKSKKLKSVKELLGITIMERSSFEKNPIDFLEAKGYKEVKKDLIIKLPKYSLFELENGRKRMLASAGELQKGNELALPSKYVNFLYLASHYEKLKGSPEDNEQKQLFVEQHKHYLDEIIEQISEFSKRVILADANLDKVLSAYNKHRDKPIREQAENIIHLFTLTNLGAPAAFKYFDTTIDRKRYTSTKEVLDATLIHQSITGLYETRIDLSQLGGDGGEAAAKGGTLQLDDEYRLYSPLVKPDQNIQFWLEQFPQAWAETAGMGLAKQVPPQVIQLKASATPVSVRQYPLSKEAQEGIRPHVQRLIQQGILVPVQSPWNTPLLPVRKPGTNDYRPVQDLREVNKRVQDIHPTVPNPYNLLCALPPQRSWYTVLDLKDAFFCLRLHPTSQPLFAFEWRDPGTGRTGQLTWTRLPQGFKNSPTIFNEALHRDLANFRIQHPQVTLLQYVDDLLLAGATKQDCLEGTKALLLELSDLGYRASAKKAQICRREVTYLGYSLRDGQRWLTEARKKTVVQIPAPTTAKQVREFLGTAGFCRLWIPGFATLAAPLYPLTKPKGEFSWAPEHQKAFDAIKKALLSAPALALPDVTKPFTLYVDERKGVARGVLTQTLGPWRRPVAYLSKKLDPVASGWPVCLKAIAAVAILVKDADKLTLGQNITVIAPHALENIVRQPPDRWMTNARMTHYQSLLLTERVTFAPPAALNPATLLPEETDEPVTHDCHQLLIEETGVRKDLTDIPLTGEVLTWFTDGSSYVVEGKRMAGAAVVDGTRTIWASSLPEGTSAQKAELMALTQALRLAEGKSINIYTDSRYAFATAHVHGAIYKQRGWLTSAGREIKNKEEILSLLEALHLPKRLAIIHCPGHQKAKDPISRGNQMADRVAKQAAQGVNLLAGKRTADGSEFEKRTADGSEFESPKKKAKVE

SEQ ID NO: 152 - protein, 2086 aa, synthetic construct
  source 1..2086: note = Description of Artificial Sequence: Synthetic polypeptide
MPAAKRVKLDGGDKKYSIGLDIGTNSVGWAVITDEYKVPSKKFKVLGNTDRHSIKKNLIGALLFDSGETAEATRLKRTARRRYTRRKNRICYLQEIFSNEMAKVDDSFFHRLEESFLVEEDKKHERHPIFGNIVDEVAYHEKYPTIYHLRKKLVDSTDKADLRLIYLALAHMIKFRGHFLIEGDLNPDNSDVDKLFIQLVQTYNQLFEENPINASGVDAKAILSARLSKSRRLENLIAQLPGEKKNGLFGNLIALSLGLTPNFKSNFDLAEDAKLQLSKDTYDDDLDNLLAQIGDQYADLFLAAKNLSDAILLSDILRVNTEITKAPLSASMIKRYDEHHQDLTLLKALVRQQLPEKYKEIFFDQSKNGYAGYIDGGASQEEFYKFIKPILEKMDGTEELLVKLNREDLLRKQRTFDNGSIPHQIHLGELHAILRRQEDFYPFLKDNREKIEKILTFRIPYYVGPLARGNSRFAWMTRKSEETITPWNFEEVVDKGASAQSFIERMTNFDKNLPNEKVLPKHSLLYEYFTVYNELTKVKYVTEGMRKPAFLSGEQKKAIVDLLFKTNRKVTVKQLKEDYFKKIECFDSVEISGVEDRFNASLGTYHDLLKIIKDKDFLDNEENEDILEDIVLTLTLFEDREMIEERLKTYAHLFDDKVMKQLKRRRYTGWGRLSRKLINGIRDKQSGKTILDFLKSDGFANRNFMQLIHDDSLTFKEDIQKAQVSGQGDSLHEHIANLAGSPAIKKGILQTVKVVDELVKVMGRHKPENIVIEMARENQTTQKGQKNSRERMKRIEEGIKELGSQILKEHPVENTQLQNEKLYLYYLQNGRDMYVDQELDINRLSDYDVDHIVPQSFLKDDSIDNKVLTRSDKARGKSDNVPSEEVVKKMKNYWRQLLNAKLITQRKFDNLTKAERGGLSELDKAGFIKRQLVETRQITKHVAQILDSRMNTKYDENDKLIREVKVITLKSKLVSDFRKDFQFYKVREINNYHHAHDAYLNAVVGTALIKKYPKLESEFVYGDYKVYDVRKMIAKSEQEIGKATAKYFFYSNIMNFFKTEITLANGEIRKRPLIETNGETGEIVWDKGRDFATVRKVLSMPQVNIVKKTEVQTGGFSKESILPKRNSDKLIARKKDWDPKKYGGFDSPTVAYSVLVVAKVEKGKSKKLKSVKELLGITIMERSSFEKNPIDFLEAKGYKEVKKDLIIKLPKYSLFELENGRKRMLASAGELQKGNELALPSKYVNFLYLASHYEKLKGSPEDNEQKQLFVEQHKHYLDEIIEQISEFSKRVILADANLDKVLSAYNKHRDKPIREQAENIIHLFTLTNLGAPAAFKYFDTTIDRKRYTSTKEVLDATLIHQSITGLYETRIDLSQLGGDGGGGGGGGGGGTLQLDDEYRLYSPLVKPDQNIQFWLEQFPQAWAETAGMGLAKQVPPQVIQLKASATPVSVRQYPLSKEAQEGIRPHVQRLIQQGILVPVQSPWNTPLLPVRKPGTNDYRPVQDLREVNKRVQDIHPTVPNPYNLLCALPPQRSWYTVLDLKDAFFCLRLHPTSQPLFAFEWRDPGTGRTGQLTWTRLPQGFKNSPTIFNEALHRDLANFRIQHPQVTLLQYVDDLLLAGATKQDCLEGTKALLLELSDLGYRASAKKAQICRREVTYLGYSLRDGQRWLTEARKKTVVQIPAPTTAKQVREFLGTAGFCRLWIPGFATLAAPLYPLTKPKGEFSWAPEHQKAFDAIKKALLSAPALALPDVTKPFTLYVDERKGVARGVLTQTLGPWRRPVAYLSKKLDPVASGWPVCLKAIAAVAILVKDADKLTLGQNITVIAPHALENIVRQPPDRWMTNARMTHYQSLLLTERVTFAPPAALNPATLLPEETDEPVTHDCHQLLIEETGVRKDLTDIPLTGEVLTWFTDGSSYVVEGKRMAGAAVVDGTRTIWASSLPEGTSAQKAELMALTQALRLAEGKSINIYTDSRYAFATAHVHGAIYKQRGWLTSAGREIKNKEEILSLLEALHLPKRLAIIHCPGHQKAKDPISRGNQMADRVAKQAAQGVNLLAGKRTADGSEFEKRTADGSEFESPKKKAKVE

SEQ ID NO: 153 - protein, 2091 aa, synthetic construct
  source 1..2091: note = Description of Artificial Sequence: Synthetic polypeptide
MPAAKRVKLDGGDKKYSIGLDIGTNSVGWAVITDEYKVPSKKFKVLGNTDRHSIKKNLIGALLFDSGETAEATRLKRTARRRYTRRKNRICYLQEIFSNEMAKVDDSFFHRLEESFLVEEDKKHERHPIFGNIVDEVAYHEKYPTIYHLRKKLVDSTDKADLRLIYLALAHMIKFRGHFLIEGDLNPDNSDVDKLFIQLVQTYNQLFEENPINASGVDAKAILSARLSKSRRLENLIAQLPGEKKNGLFGNLIALSLGLTPNFKSNFDLAEDAKLQLSKDTYDDDLDNLLAQIGDQYADLFLAAKNLSDAILLSDILRVNTEITKAPLSASMIKRYDEHHQDLTLLKALVRQQLPEKYKEIFFDQSKNGYAGYIDGGASQEEFYKFIKPILEKMDGTEELLVKLNREDLLRKQRTFDNGSIPHQIHLGELHAILRRQEDFYPFLKDNREKIEKILTFRIPYYVGPLARGNSRFAWMTRKSEETITPWNFEEVVDKGASAQSFIERMTNFDKNLPNEKVLPKHSLLYEYFTVYNELTKVKYVTEGMRKPAFLSGEQKKAIVDLLFKTNRKVTVKQLKEDYFKKIECFDSVEISGVEDRFNASLGTYHDLLKIIKDKDFLDNEENEDILEDIVLTLTLFEDREMIEERLKTYAHLFDDKVMKQLKRRRYTGWGRLSRKLINGIRDKQSGKTILDFLKSDGFANRNFMQLIHDDSLTFKEDIQKAQVSGQGDSLHEHIANLAGSPAIKKGILQTVKVVDELVKVMGRHKPENIVIEMARENQTTQKGQKNSRERMKRIEEGIKELGSQILKEHPVENTQLQNEKLYLYYLQNGRDMYVDQELDINRLSDYDVDHIVPQSFLKDDSIDNKVLTRSDKARGKSDNVPSEEVVKKMKNYWRQLLNAKLITQRKFDNLTKAERGGLSELDKAGFIKRQLVETRQITKHVAQILDSRMNTKYDENDKLIREVKVITLKSKLVSDFRKDFQFYKVREINNYHHAHDAYLNAVVGTALIKKYPKLESEFVYGDYKVYDVRKMIAKSEQEIGKATAKYFFYSNIMNFFKTEITLANGEIRKRPLIETNGETGEIVWDKGRDFATVRKVLSMPQVNIVKKTEVQTGGFSKESILPKRNSDKLIARKKDWDPKKYGGFDSPTVAYSVLVVAKVEKGKSKKLKSVKELLGITIMERSSFEKNPIDFLEAKGYKEVKKDLIIKLPKYSLFELENGRKRMLASAGELQKGNELALPSKYVNFLYLASHYEKLKGSPEDNEQKQLFVEQHKHYLDEIIEQISEFSKRVILADANLDKVLSAYNKHRDKPIREQAENIIHLFTLTNLGAPAAFKYFDTTIDRKRYTSTKEVLDATLIHQSITGLYETRIDLSQLGGDGGGSAGSAAGSGEFGGTLQLDDEYRLYSPLVKPDQNIQFWLEQFPQAWAETAGMGLAKQVPPQVIQLKASATPVSVRQYPLSKEAQEGIRPHVQRLIQQGILVPVQSPWNTPLLPVRKPGTNDYRPVQDLREVNKRVQDIHPTVPNPYNLLCALPPQRSWYTVLDLKDAFFCLRLHPTSQPLFAFEWRDPGTGRTGQLTWTRLPQGFKNSPTIFNEALHRDLANFRIQHPQVTLLQYVDDLLLAGATKQDCLEGTKALLLELSDLGYRASAKKAQICRREVTYLGYSLRDGQRWLTEARKKTVVQIPAPTTAKQVREFLGTAGFCRLWIPGFATLAAPLYPLTKPKGEFSWAPEHQKAFDAIKKALLSAPALALPDVTKPFTLYVDERKGVARGVLTQTLGPWRRPVAYLSKKLDPVASGWPVCLKAIAAVAILVKDADKLTLGQNITVIAPHALENIVRQPPDRWMTNARMTHYQSLLLTERVTFAPPAALNPATLLPEETDEPVTHDCHQLLIEETGVRKDLTDIPLTGEVLTWFTDGSSYVVEGKRMAGAAVVDGTRTIWASSLPEGTSAQKAELMALTQALRLAEGKSINIYTDSRYAFATAHVHGAIYKQRGWLTSAGREIKNKEEILSLLEALHLPKRLAIIHCPGHQKAKDPISRGNQMADRVAKQAAQGVNLLAGKRTADGSEFEKRTADGSEFESPKKKAKVE

SEQ ID NO: 154 - protein, 2090 aa, synthetic construct
  source 1..2090: note = Description of Artificial Sequence: Synthetic polypeptide
MPAAKRVKLDGGDKKYSIGLDIGTNSVGWAVITDEYKVPSKKFKVLGNTDRHSIKKNLIGALLFDSGETAEATRLKRTARRRYTRRKNRICYLQEIFSNEMAKVDDSFFHRLEESFLVEEDKKHERHPIFGNIVDEVAYHEKYPTIYHLRKKLVDSTDKADLRLIYLALAHMIKFRGHFLIEGDLNPDNSDVDKLFIQLVQTYNQLFEENPINASGVDAKAILSARLSKSRRLENLIAQLPGEKKNGLFGNLIALSLGLTPNFKSNFDLAEDAKLQLSKDTYDDDLDNLLAQIGDQYADLFLAAKNLSDAILLSDILRVNTEITKAPLSASMIKRYDEHHQDLTLLKALVRQQLPEKYKEIFFDQSKNGYAGYIDGGASQEEFYKFIKPILEKMDGTEELLVKLNREDLLRKQRTFDNGSIPHQIHLGELHAILRRQEDFYPFLKDNREKIEKILTFRIPYYVGPLARGNSRFAWMTRKSEETITPWNFEEVVDKGASAQSFIERMTNFDKNLPNEKVLPKHSLLYEYFTVYNELTKVKYVTEGMRKPAFLSGEQKKAIVDLLFKTNRKVTVKQLKEDYFKKIECFDSVEISGVEDRFNASLGTYHDLLKIIKDKDFLDNEENEDILEDIVLTLTLFEDREMIEERLKTYAHLFDDKVMKQLKRRRYTGWGRLSRKLINGIRDKQSGKTILDFLKSDGFANRNFMQLIHDDSLTFKEDIQKAQVSGQGDSLHEHIANLAGSPAIKKGILQTVKVVDELVKVMGRHKPENIVIEMARENQTTQKGQKNSRERMKRIEEGIKELGSQILKEHPVENTQLQNEKLYLYYLQNGRDMYVDQELDINRLSDYDVDHIVPQSFLKDDSIDNKVLTRSDKARGKSDNVPSEEVVKKMKNYWRQLLNAKLITQRKFDNLTKAERGGLSELDKAGFIKRQLVETRQITKHVAQILDSRMNTKYDENDKLIREVKVITLKSKLVSDFRKDFQFYKVREINNYHHAHDAYLNAVVGTALIKKYPKLESEFVYGDYKVYDVRKMIAKSEQEIGKATAKYFFYSNIMNFFKTEITLANGEIRKRPLIETNGETGEIVWDKGRDFATVRKVLSMPQVNIVKKTEVQTGGFSKESILPKRNSDKLIARKKDWDPKKYGGFDSPTVAYSVLVVAKVEKGKSKKLKSVKELLGITIMERSSFEKNPIDFLEAKGYKEVKKDLIIKLPKYSLFELENGRKRMLASAGELQKGNELALPSKYVNFLYLASHYEKLKGSPEDNEQKQLFVEQHKHYLDEIIEQISEFSKRVILADANLDKVLSAYNKHRDKPIREQAENIIHLFTLTNLGAPAAFKYFDTTIDRKRYTSTKEVLDATLIHQSITGLYETRIDLSQLGGDGGGGSEAAAKPAPGGTLQLDDEYRLYSPLVKPDQNIQFWLEQFPQAWAETAGMGLAKQVPPQVIQLKASATPVSVRQYPLSKEAQEGIRPHVQRLIQQGILVPVQSPWNTPLLPVRKPGTNDYRPVQDLREVNKRVQDIHPTVPNPYNLLCALPPQRSWYTVLDLKDAFFCLRLHPTSQPLFAFEWRDPGTGRTGQLTWTRLPQGFKNSPTIFNEALHRDLANFRIQHPQVTLLQYVDDLLLAGATKQDCLEGTKALLLELSDLGYRASAKKAQICRREVTYLGYSLRDGQRWLTEARKKTVVQIPAPTTAKQVREFLGTAGFCRLWIPGFATLAAPLYPLTKPKGEFSWAPEHQKAFDAIKKALLSAPALALPDVTKPFTLYVDERKGVARGVLTQTLGPWRRPVAYLSKKLDPVASGWPVCLKAIAAVAILVKDADKLTLGQNITVIAPHALENIVRQPPDRWMTNARMTHYQSLLLTERVTFAPPAALNPATLLPEETDEPVTHDCHQLLIEETGVRKDLTDIPLTGEVLTWFTDGSSYVVEGKRMAGAAVVDGTRTIWASSLPEGTSAQKAELMALTQALRLAEGKSINIYTDSRYAFATAHVHGAIYKQRGWLTSAGREIKNKEEILSLLEALHLPKRLAIIHCPGHQKAKDPISRGNQMADRVAKQAAQGVNLLAGKRTADGSEFEKRTADGSEFESPKKKAKVE

SEQ ID NO: 155 - protein, 2088 aa, synthetic construct
  source 1..2088: note = Description of Artificial Sequence: Synthetic polypeptide
MPAAKRVKLDGGDKKYSIGLDIGTNSVGWAVITDEYKVPSKKFKVLGNTDRHSIKKNLIGALLFDSGETAEATRLKRTARRRYTRRKNRICYLQEIFSNEMAKVDDSFFHRLEESFLVEEDKKHERHPIFGNIVDEVAYHEKYPTIYHLRKKLVDSTDKADLRLIYLALAHMIKFRGHFLIEGDLNPDNSDVDKLFIQLVQTYNQLFEENPINASGVDAKAILSARLSKSRRLENLIAQLPGEKKNGLFGNLIALSLGLTPNFKSNFDLAEDAKLQLSKDTYDDDLDNLLAQIGDQYADLFLAAKNLSDAILLSDILRVNTEITKAPLSASMIKRYDEHHQDLTLLKALVRQQLPEKYKEIFFDQSKNGYAGYIDGGASQEEFYKFIKPILEKMDGTEELLVKLNREDLLRKQRTFDNGSIPHQIHLGELHAILRRQEDFYPFLKDNREKIEKILTFRIPYYVGPLARGNSRFAWMTRKSEETITPWNFEEVVDKGASAQSFIERMTNFDKNLPNEKVLPKHSLLYEYFTVYNELTKVKYVTEGMRKPAFLSGEQKKAIVDLLFKTNRKVTVKQLKEDYFKKIECFDSVEISGVEDRFNASLGTYHDLLKIIKDKDFLDNEENEDILEDIVLTLTLFEDREMIEERLKTYAHLFDDKVMKQLKRRRYTGWGRLSRKLINGIRDKQSGKTILDFLKSDGFANRNFMQLIHDDSLTFKEDIQKAQVSGQGDSLHEHIANLAGSPAIKKGILQTVKVVDELVKVMGRHKPENIVIEMARENQTTQKGQKNSRERMKRIEEGIKELGSQILKEHPVENTQLQNEKLYLYYLQNGRDMYVDQELDINRLSDYDVDHIVPQSFLKDDSIDNKVLTRSDKARGKSDNVPSEEVVKKMKNYWRQLLNAKLITQRKFDNLTKAERGGLSELDKAGFIKRQLVETRQITKHVAQILDSRMNTKYDENDKLIREVKVITLKSKLVSDFRKDFQFYKVREINNYHHAHDAYLNAVVGTALIKKYPKLESEFVYGDYKVYDVRKMIAKSEQEIGKATAKYFFYSNIMNFFKTEITLANGEIRKRPLIETNGETGEIVWDKGRDFATVRKVLSMPQVNIVKKTEVQTGGFSKESILPKRNSDKLIARKKDWDPKKYGGFDSPTVAYSVLVVAKVEKGKSKKLKSVKELLGITIMERSSFEKNPIDFLEAKGYKEVKKDLIIKLPKYSLFELENGRKRMLASAGELQKGNELALPSKYVNFLYLASHYEKLKGSPEDNEQKQLFVEQHKHYLDEIIEQISEFSKRVILADANLDKVLSAYNKHRDKPIREQAENIIHLFTLTNLGAPAAFKYFDTTIDRKRYTSTKEVLDATLIHQSITGLYETRIDLSQLGGDGGGGSGSSPAPGGTLQLDDEYRLYSPLVKPDQNIQFWLEQFPQAWAETAGMGLAKQVPPQVIQLKASATPVSVRQYPLSKEAQEGIRPHVQRLIQQGILVPVQSPWNTPLLPVRKPGTNDYRPVQDLREVNKRVQDIHPTVPNPYNLLCALPPQRSWYTVLDLKDAFFCLRLHPTSQPLFAFEWRDPGTGRTGQLTWTRLPQGFKNSPTIFNEALHRDLANFRIQHPQVTLLQYVDDLLLAGATKQDCLEGTKALLLELSDLGYRASAKKAQICRREVTYLGYSLRDGQRWLTEARKKTVVQIPAPTTAKQVREFLGTAGFCRLWIPGFATLAAPLYPLTKPKGEFSWAPEHQKAFDAIKKALLSAPALALPDVTKPFTLYVDERKGVARGVLTQTLGPWRRPVAYLSKKLDPVASGWPVCLKAIAAVAILVKDADKLTLGQNITVIAPHALENIVRQPPDRWMTNARMTHYQSLLLTERVTFAPPAALNPATLLPEETDEPVTHDCHQLLIEETGVRKDLTDIPLTGEVLTWFTDGSSYVVEGKRMAGAAVVDGTRTIWASSLPEGTSAQKAELMALTQALRLAEGKSINIYTDSRYAFATAHVHGAIYKQRGWLTSAGREIKNKEEILSLLEALHLPKRLAIIHCPGHQKAKDPISRGNQMADRVAKQAAQGVNLLAGKRTADGSEFEKRTADGSEFESPKKKAKVE

SEQ ID NO: 156 - protein, 2125 aa, synthetic construct
  source 1..2125: note = Description of Artificial Sequence: Synthetic polypeptide
MPAAKRVKLDGGDKKYSIGLDIGTNSVGWAVITDEYKVPSKKFKVLGNTDRHSIKKNLIGALLFDSGETAEATRLKRTARRRYTRRKNRICYLQEIFSNEMAKVDDSFFHRLEESFLVEEDKKHERHPIFGNIVDEVAYHEKYPTIYHLRKKLVDSTDKADLRLIYLALAHMIKFRGHFLIEGDLNPDNSDVDKLFIQLVQTYNQLFEENPINASGVDAKAILSARLSKSRRLENLIAQLPGEKKNGLFGNLIALSLGLTPNFKSNFDLAEDAKLQLSKDTYDDDLDNLLAQIGDQYADLFLAAKNLSDAILLSDILRVNTEITKAPLSASMIKRYDEHHQDLTLLKALVRQQLPEKYKEIFFDQSKNGYAGYIDGGASQEEFYKFIKPILEKMDGTEELLVKLNREDLLRKQRTFDNGSIPHQIHLGELHAILRRQEDFYPFLKDNREKIEKILTFRIPYYVGPLARGNSRFAWMTRKSEETITPWNFEEVVDKGASAQSFIERMTNFDKNLPNEKVLPKHSLLYEYFTVYNELTKVKYVTEGMRKPAFLSGEQKKAIVDLLFKTNRKVTVKQLKEDYFKKIECFDSVEISGVEDRFNASLGTYHDLLKIIKDKDFLDNEENEDILEDIVLTLTLFEDREMIEERLKTYAHLFDDKVMKQLKRRRYTGWGRLSRKLINGIRDKQSGKTILDFLKSDGFANRNFMQLIHDDSLTFKEDIQKAQVSGQGDSLHEHIANLAGSPAIKKGILQTVKVVDELVKVMGRHKPENIVIEMARENQTTQKGQKNSRERMKRIEEGIKELGSQILKEHPVENTQLQNEKLYLYYLQNGRDMYVDQELDINRLSDYDVDHIVPQSFLKDDSIDNKVLTRSDKARGKSDNVPSEEVVKKMKNYWRQLLNAKLITQRKFDNLTKAERGGLSELDKAGFIKRQLVETRQITKHVAQILDSRMNTKYDENDKLIREVKVITLKSKLVSDFRKDFQFYKVREINNYHHAHDAYLNAVVGTALIKKYPKLESEFVYGDYKVYDVRKMIAKSEQEIGKATAKYFFYSNIMNFFKTEITLANGEIRKRPLIETNGETGEIVWDKGRDFATVRKVLSMPQVNIVKKTEVQTGGFSKESILPKRNSDKLIARKKDWDPKKYGGFDSPTVAYSVLVVAKVEKGKSKKLKSVKELLGITIMERSSFEKNPIDFLEAKGYKEVKKDLIIKLPKYSLFELENGRKRMLASAGELQKGNELALPSKYVNFLYLASHYEKLKGSPEDNEQKQLFVEQHKHYLDEIIEQISEFSKRVILADANLDKVLSAYNKHRDKPIREQAENIIHLFTLTNLGAPAAFKYFDTTIDRKRYTSTKEVLDATLIHQSITGLYETRIDLSQLGGDGGAEAAAKEAAAKEAAAKEAAAKALEAEAAAKEAAAKEAAAKEAAAKAGGTLQLDDEYRLYSPLVKPDQNIQFWLEQFPQAWAETAGMGLAKQVPPQVIQLKASATPVSVRQYPLSKEAQEGIRPHVQRLIQQGILVPVQSPWNTPLLPVRKPGTNDYRPVQDLREVNKRVQDIHPTVPNPYNLLCALPPQRSWYTVLDLKDAFFCLRLHPTSQPLFAFEWRDPGTGRTGQLTWTRLPQGFKNSPTIFNEALHRDLANFRIQHPQVTLLQYVDDLLLAGATKQDCLEGTKALLLELSDLGYRASAKKAQICRREVTYLGYSLRDGQRWLTEARKKTVVQIPAPTTAKQVREFLGTAGFCRLWIPGFATLAAPLYPLTKPKGEFSWAPEHQKAFDAIKKALLSAPALALPDVTKPFTLYVDERKGVARGVLTQTLGPWRRPVAYLSKKLDPVASGWPVCLKAIAAVAILVKDADKLTLGQNITVIAPHALENIVRQPPDRWMTNARMTHYQSLLLTERVTFAPPAALNPATLLPEETDEPVTHDCHQLLIEETGVRKDLTDIPLTGEVLTWFTDGSSYVVEGKRMAGAAVVDGTRTIWASSLPEGTSAQKAELMALTQALRLAEGKSINIYTDSRYAFATAHVHGAIYKQRGWLTSAGREIKNKEEILSLLEALHLPKRLAIIHCPGHQKAKDPISRGNQMADRVAKQAAQGVNLLAGKRTADGSEFEKRTADGSEFESPKKKAKVE

SEQ ID NO: 157 - protein, 2092 aa, synthetic construct
  source 1..2092: note = Description of Artificial Sequence: Synthetic polypeptide
MPAAKRVKLDGGDKKYSIGLDIGTNSVGWAVITDEYKVPSKKFKVLGNTDRHSIKKNLIGALLFDSGETAEATRLKRTARRRYTRRKNRICYLQEIFSNEMAKVDDSFFHRLEESFLVEEDKKHERHPIFGNIVDEVAYHEKYPTIYHLRKKLVDSTDKADLRLIYLALAHMIKFRGHFLIEGDLNPDNSDVDKLFIQLVQTYNQLFEENPINASGVDAKAILSARLSKSRRLENLIAQLPGEKKNGLFGNLIALSLGLTPNFKSNFDLAEDAKLQLSKDTYDDDLDNLLAQIGDQYADLFLAAKNLSDAILLSDILRVNTEITKAPLSASMIKRYDEHHQDLTLLKALVRQQLPEKYKEIFFDQSKNGYAGYIDGGASQEEFYKFIKPILEKMDGTEELLVKLNREDLLRKQRTFDNGSIPHQIHLGELHAILRRQEDFYPFLKDNREKIEKILTFRIPYYVGPLARGNSRFAWMTRKSEETITPWNFEEVVDKGASAQSFIERMTNFDKNLPNEKVLPKHSLLYEYFTVYNELTKVKYVTEGMRKPAFLSGEQKKAIVDLLFKTNRKVTVKQLKEDYFKKIECFDSVEISGVEDRFNASLGTYHDLLKIIKDKDFLDNEENEDILEDIVLTLTLFEDREMIEERLKTYAHLFDDKVMKQLKRRRYTGWGRLSRKLINGIRDKQSGKTILDFLKSDGFANRNFMQLIHDDSLTFKEDIQKAQVSGQGDSLHEHIANLAGSPAIKKGILQTVKVVDELVKVMGRHKPENIVIEMARENQTTQKGQKNSRERMKRIEEGIKELGSQILKEHPVENTQLQNEKLYLYYLQNGRDMYVDQELDINRLSDYDVDHIVPQSFLKDDSIDNKVLTRSDKARGKSDNVPSEEVVKKMKNYWRQLLNAKLITQRKFDNLTKAERGGLSELDKAGFIKRQLVETRQITKHVAQILDSRMNTKYDENDKLIREVKVITLKSKLVSDFRKDFQFYKVREINNYHHAHDAYLNAVVGTALIKKYPKLESEFVYGDYKVYDVRKMIAKSEQEIGKATAKYFFYSNIMNFFKTEITLANGEIRKRPLIETNGETGEIVWDKGRDFATVRKVLSMPQVNIVKKTEVQTGGFSKESILPKRNSDKLIARKKDWDPKKYGGFDSPTVAYSVLVVAKVEKGKSKKLKSVKELLGITIMERSSFEKNPIDFLEAKGYKEVKKDLIIKLPKYSLFELENGRKRMLASAGELQKGNELALPSKYVNFLYLASHYEKLKGSPEDNEQKQLFVEQHKHYLDEIIEQISEFSKRVILADANLDKVLSAYNKHRDKPIREQAENIIHLFTLTNLGAPAAFKYFDTTIDRKRYTSTKEVLDATLIHQSITGLYETRIDLSQLGGDGGPAPAPAPAPAPAPGGTLQLDDEYRLYSPLVKPDQNIQFWLEQFPQAWAETAGMGLAKQVPPQVIQLKASATPVSVRQYPLSKEAQEGIRPHVQRLIQQGILVPVQSPWNTPLLPVRKPGTNDYRPVQDLREVNKRVQDIHPTVPNPYNLLCALPPQRSWYTVLDLKDAFFCLRLHPTSQPLFAFEWRDPGTGRTGQLTWTRLPQGFKNSPTIFNEALHRDLANFRIQHPQVTLLQYVDDLLLAGATKQDCLEGTKALLLELSDLGYRASAKKAQICRREVTYLGYSLRDGQRWLTEARKKTVVQIPAPTTAKQVREFLGTAGFCRLWIPGFATLAAPLYPLTKPKGEFSWAPEHQKAFDAIKKALLSAPALALPDVTKPFTLYVDERKGVARGVLTQTLGPWRRPVAYLSKKLDPVASGWPVCLKAIAAVAILVKDADKLTLGQNITVIAPHALENIVRQPPDRWMTNARMTHYQSLLLTERVTFAPPAALNPATLLPEETDEPVTHDCHQLLIEETGVRKDLTDIPLTGEVLTWFTDGSSYVVEGKRMAGAAVVDGTRTIWASSLPEGTSAQKAELMALTQALRLAEGKSINIYTDSRYAFATAHVHGAIYKQRGWLTSAGREIKNKEEILSLLEALHLPKRLAIIHCPGHQKAKDPISRGNQMADRVAKQAAQGVNLLAGKRTADGSEFEKRTADGSEFESPKKKAKVE

SEQ ID NO: 158 - protein, 2087 aa, synthetic construct
  source 1..2087: note = Description of Artificial Sequence: Synthetic polypeptide
MPAAKRVKLDGGDKKYSIGLDIGTNSVGWAVITDEYKVPSKKFKVLGNTDRHSIKKNLIGALLFDSGETAEATRLKRTARRRYTRRKNRICYLQEIFSNEMAKVDDSFFHRLEESFLVEEDKKHERHPIFGNIVDEVAYHEKYPTIYHLRKKLVDSTDKADLRLIYLALAHMIKFRGHFLIEGDLNPDNSDVDKLFIQLVQTYNQLFEENPINASGVDAKAILSARLSKSRRLENLIAQLPGEKKNGLFGNLIALSLGLTPNFKSNFDLAEDAKLQLSKDTYDDDLDNLLAQIGDQYADLFLAAKNLSDAILLSDILRVNTEITKAPLSASMIKRYDEHHQDLTLLKALVRQQLPEKYKEIFFDQSKNGYAGYIDGGASQEEFYKFIKPILEKMDGTEELLVKLNREDLLRKQRTFDNGSIPHQIHLGELHAILRRQEDFYPFLKDNREKIEKILTFRIPYYVGPLARGNSRFAWMTRKSEETITPWNFEEVVDKGASAQSFIERMTNFDKNLPNEKVLPKHSLLYEYFTVYNELTKVKYVTEGMRKPAFLSGEQKKAIVDLLFKTNRKVTVKQLKEDYFKKIECFDSVEISGVEDRFNASLGTYHDLLKIIKDKDFLDNEENEDILEDIVLTLTLFEDREMIEERLKTYAHLFDDKVMKQLKRRRYTGWGRLSRKLINGIRDKQSGKTILDFLKSDGFANRNFMQLIHDDSLTFKEDIQKAQVSGQGDSLHEHIANLAGSPAIKKGILQTVKVVDELVKVMGRHKPENIVIEMARENQTTQKGQKNSRERMKRIEEGIKELGSQILKEHPVENTQLQNEKLYLYYLQNGRDMYVDQELDINRLSDYDVDHIVPQSFLKDDSIDNKVLTRSDKARGKSDNVPSEEVVKKMKNYWRQLLNAKLITQRKFDNLTKAERGGLSELDKAGFIKRQLVETRQITKHVAQILDSRMNTKYDENDKLIREVKVITLKSKLVSDFRKDFQFYKVREINNYHHAHDAYLNAVVGTALIKKYPKLESEFVYGDYKVYDVRKMIAKSEQEIGKATAKYFFYSNIMNFFKTEITLANGEIRKRPLIETNGETGEIVWDKGRDFATVRKVLSMPQVNIVKKTEVQTGGFSKESILPKRNSDKLIARKKDWDPKKYGGFDSPTVAYSVLVVAKVEKGKSKKLKSVKELLGITIMERSSFEKNPIDFLEAKGYKEVKKDLIIKLPKYSLFELENGRKRMLASAGELQKGNELALPSKYVNFLYLASHYEKLKGSPEDNEQKQLFVEQHKHYLDEIIEQISEFSKRVILADANLDKVLSAYNKHRDKPIREQAENIIHLFTLTNLGAPAAFKYFDTTIDRKRYTSTKEVLDATLIHQSITGLYETRIDLSQLGGDGGEAAAKGGSGGTLQLDDEYRLYSPLVKPDQNIQFWLEQFPQAWAETAGMGLAKQVPPQVIQLKASATPVSVRQYPLSKEAQEGIRPHVQRLIQQGILVPVQSPWNTPLLPVRKPGTNDYRPVQDLREVNKRVQDIHPTVPNPYNLLCALPPQRSWYTVLDLKDAFFCLRLHPTSQPLFAFEWRDPGTGRTGQLTWTRLPQGFKNSPTIFNEALHRDLANFRIQHPQVTLLQYVDDLLLAGATKQDCLEGTKALLLELSDLGYRASAKKAQICRREVTYLGYSLRDGQRWLTEARKKTVVQIPAPTTAKQVREFLGTAGFCRLWIPGFATLAAPLYPLTKPKGEFSWAPEHQKAFDAIKKALLSAPALALPDVTKPFTLYVDERKGVARGVLTQTLGPWRRPVAYLSKKLDPVASGWPVCLKAIAAVAILVKDADKLTLGQNITVIAPHALENIVRQPPDRWMTNARMTHYQSLLLTERVTFAPPAALNPATLLPEETDEPVTHDCHQLLIEETGVRKDLTDIPLTGEVLTWFTDGSSYVVEGKRMAGAAVVDGTRTIWASSLPEGTSAQKAELMALTQALRLAEGKSINIYTDSRYAFATAHVHGAIYKQRGWLTSAGREIKNKEEILSLLEALHLPKRLAIIHCPGHQKAKDPISRGNQMADRVAKQAAQGVNLLAGKRTADGSEFEKRTADGSEFESPKKKAKVE

SEQ ID NO: 159 - protein, 2094 aa, synthetic construct
  source 1..2094: note = Description of Artificial Sequence: Synthetic polypeptide
MPAAKRVKLDGGDKKYSIGLDIGTNSVGWAVITDEYKVPSKKFKVLGNTDRHSIKKNLIGALLFDSGETAEATRLKRTARRRYTRRKNRICYLQEIFSNEMAKVDDSFFHRLEESFLVEEDKKHERHPIFGNIVDEVAYHEKYPTIYHLRKKLVDSTDKADLRLIYLALAHMIKFRGHFLIEGDLNPDNSDVDKLFIQLVQTYNQLFEENPINASGVDAKAILSARLSKSRRLENLIAQLPGEKKNGLFGNLIALSLGLTPNFKSNFDLAEDAKLQLSKDTYDDDLDNLLAQIGDQYADLFLAAKNLSDAILLSDILRVNTEITKAPLSASMIKRYDEHHQDLTLLKALVRQQLPEKYKEIFFDQSKNGYAGYIDGGASQEEFYKFIKPILEKMDGTEELLVKLNREDLLRKQRTFDNGSIPHQIHLGELHAILRRQEDFYPFLKDNREKIEKILTFRIPYYVGPLARGNSRFAWMTRKSEETITPWNFEEVVDKGASAQSFIERMTNFDKNLPNEKVLPKHSLLYEYFTVYNELTKVKYVTEGMRKPAFLSGEQKKAIVDLLFKTNRKVTVKQLKEDYFKKIECFDSVEISGVEDRFNASLGTYHDLLKIIKDKDFLDNEENEDILEDIVLTLTLFEDREMIEERLKTYAHLFDDKVMKQLKRRRYTGWGRLSRKLINGIRDKQSGKTILDFLKSDGFANRNFMQLIHDDSLTFKEDIQKAQVSGQGDSLHEHIANLAGSPAIKKGILQTVKVVDELVKVMGRHKPENIVIEMARENQTTQKGQKNSRERMKRIEEGIKELGSQILKEHPVENTQLQNEKLYLYYLQNGRDMYVDQELDINRLSDYDVDHIVPQSFLKDDSIDNKVLTRSDKARGKSDNVPSEEVVKKMKNYWRQLLNAKLITQRKFDNLTKAERGGLSELDKAGFIKRQLVETRQITKHVAQILDSRMNTKYDENDKLIREVKVITLKSKLVSDFRKDFQFYKVREINNYHHAHDAYLNAVVGTALIKKYPKLESEFVYGDYKVYDVRKMIAKSEQEIGKATAKYFFYSNIMNFFKTEITLANGEIRKRPLIETNGETGEIVWDKGRDFATVRKVLSMPQVNIVKKTEVQTGGFSKESILPKRNSDKLIARKKDWDPKKYGGFDSPTVAYSVLVVAKVEKGKSKKLKSVKELLGITIMERSSFEKNPIDFLEAKGYKEVKKDLIIKLPKYSLFELENGRKRMLASAGELQKGNELALPSKYVNFLYLASHYEKLKGSPEDNEQKQLFVEQHKHYLDEIIEQISEFSKRVILADANLDKVLSAYNKHRDKPIREQAENIIHLFTLTNLGAPAAFKYFDTTIDRKRYTSTKEVLDATLIHQSITGLYETRIDLSQLGGDGGGGGGSGGGGSGGGGSGGTLQLDDEYRLYSPLVKPDQNIQFWLEQFPQAWAETAGMGLAKQVPPQVIQLKASATPVSVRQYPLSKEAQEGIRPHVQRLIQQGILVPVQSPWNTPLLPVRKPGTNDYRPVQDLREVNKRVQDIHPTVPNPYNLLCALPPQRSWYTVLDLKDAFFCLRLHPTSQPLFAFEWRDPGTGRTGQLTWTRLPQGFKNSPTIFNEALHRDLANFRIQHPQVTLLQYVDDLLLAGATKQDCLEGTKALLLELSDLGYRASAKKAQICRREVTYLGYSLRDGQRWLTEARKKTVVQIPAPTTAKQVREFLGTAGFCRLWIPGFATLAAPLYPLTKPKGEFSWAPEHQKAFDAIKKALLSAPALALPDVTKPFTLYVDERKGVARGVLTQTLGPWRRPVAYLSKKLDPVASGWPVCLKAIAAVAILVKDADKLTLGQNITVIAPHALENIVRQPPDRWMTNARMTHYQSLLLTERVTFAPPAALNPATLLPEETDEPVTHDCHQLLIEETGVRKDLTDIPLTGEVLTWFTDGSSYVVEGKRMAGAAVVDGTRTIWASSLPEGTSAQKAELMALTQALRLAEGKSINIYTDSRYAFATAHVHGAIYKQRGWLTSAGREIKNKEEILSLLEALHLPKRLAIIHCPGHQKAKDPISRGNQMADRVAKQAAQGVNLLAGKRTADGSEFEKRTADGSEFESPKKKAKVE

SEQ ID NO: 160 - protein, 2090 aa, synthetic construct
  source 1..2090: note = Description of Artificial Sequence: Synthetic polypeptide
MPAAKRVKLDGGDKKYSIGLDIGTNSVGWAVITDEYKVPSKKFKVLGNTDRHSIKKNLIGALLFDSGETAEATRLKRTARRRYTRRKNRICYLQEIFSNEMAKVDDSFFHRLEESFLVEEDKKHERHPIFGNIVDEVAYHEKYPTIYHLRKKLVDSTDKADLRLIYLALAHMIKFRGHFLIEGDLNPDNSDVDKLFIQLVQTYNQLFEENPINASGVDAKAILSARLSKSRRLENLIAQLPGEKKNGLFGNLIALSLGLTPNFKSNFDLAEDAKLQLSKDTYDDDLDNLLAQIGDQYADLFLAAKNLSDAILLSDILRVNTEITKAPLSASMIKRYDEHHQDLTLLKALVRQQLPEKYKEIFFDQSKNGYAGYIDGGASQEEFYKFIKPILEKMDGTEELLVKLNREDLLRKQRTFDNGSIPHQIHLGELHAILRRQEDFYPFLKDNREKIEKILTFRIPYYVGPLARGNSRFAWMTRKSEETITPWNFEEVVDKGASAQSFIERMTNFDKNLPNEKVLPKHSLLYEYFTVYNELTKVKYVTEGMRKPAFLSGEQKKAIVDLLFKTNRKVTVKQLKEDYFKKIECFDSVEISGVEDRFNASLGTYHDLLKIIKDKDFLDNEENEDILEDIVLTLTLFEDREMIEERLKTYAHLFDDKVMKQLKRRRYTGWGRLSRKLINGIRDKQSGKTILDFLKSDGFANRNFMQLIHDDSLTFKEDIQKAQVSGQGDSLHEHIANLAGSPAIKKGILQTVKVVDELVKVMGRHKPENIVIEMARENQTTQKGQKNSRERMKRIEEGIKELGSQILKEHPVENTQLQNEKLYLYYLQNGRDMYVDQELDINRLSDYDVDHIVPQSFLKDDSIDNKVLTRSDKARGKSDNVPSEEVVKKMKNYWRQLLNAKLITQRKFDNLTKAERGGLSELDKAGFIKRQLVETRQITKHVAQILDSRMNTKYDENDKLIREVKVITLKSKLVSDFRKDFQFYKVREINNYHHAHDAYLNAVVGTALIKKYPKLESEFVYGDYKVYDVRKMIAKSEQEIGKATAKYFFYSNIMNFFKTEITLANGEIRKRPLIETNGETGEIVWDKGRDFATVRKVLSMPQVNIVKKTEVQTGGFSKESILPKRNSDKLIARKKDWDPKKYGGFDSPTVAYSVLVVAKVEKGKSKKLKSVKELLGITIMERSSFEKNPIDFLEAKGYKEVKKDLIIKLPKYSLFELENGRKRMLASAGELQKGNELALPSKYVNFLYLASHYEKLKGSPEDNEQKQLFVEQHKHYLDEIIEQISEFSKRVILADANLDKVLSAYNKHRDKPIREQAENIIHLFTLTNLGAPAAFKYFDTTIDRKRYTSTKEVLDATLIHQSITGLYETRIDLSQLGGDGGEAAAKGSSGGGGGTLQLDDEYRLYSPLVKPDQNIQFWLEQFPQAWAETAGMGLAKQVPPQVIQLKASATPVSVRQYPLSKEAQEGIRPHVQRLIQQGILVPVQSPWNTPLLPVRKPGTNDYRPVQDLREVNKRVQDIHPTVPNPYNLLCALPPQRSWYTVLDLKDAFFCLRLHPTSQPLFAFEWRDPGTGRTGQLTWTRLPQGFKNSPTIFNEALHRDLANFRIQHPQVTLLQYVDDLLLAGATKQDCLEGTKALLLELSDLGYRASAKKAQICRREVTYLGYSLRDGQRWLTEARKKTVVQIPAPTTAKQVREFLGTAGFCRLWIPGFATLAAPLYPLTKPKGEFSWAPEHQKAFDAIKKALLSAPALALPDVTKPFTLYVDERKGVARGVLTQTLGPWRRPVAYLSKKLDPVASGWPVCLKAIAAVAILVKDADKLTLGQNITVIAPHALENIVRQPPDRWMTNARMTHYQSLLLTERVTFAPPAALNPATLLPEETDEPVTHDCHQLLIEETGVRKDLTDIPLTGEVLTWFTDGSSYVVEGKRMAGAAVVDGTRTIWASSLPEGTSAQKAELMALTQALRLAEGKSINIYTDSRYAFATAHVHGAIYKQRGWLTSAGREIKNKEEILSLLEALHLPKRLAIIHCPGHQKAKDPISRGNQMADRVAKQAAQGVNLLAGKRTADGSEFEKRTADGSEFESPKKKAKVE

SEQ ID NO: 161 - protein, 2094 aa, synthetic construct
  source 1..2094: note = Description of Artificial Sequence: Synthetic polypeptide
MPAAKRVKLDGGDKKYSIGLDIGTNSVGWAVITDEYKVPSKKFKVLGNTDRHSIKKNLIGALLFDSGETAEATRLKRTARRRYTRRKNRICYLQEIFSNEMAKVDDSFFHRLEESFLVEEDKKHERHPIFGNIVDEVAYHEKYPTIYHLRKKLVDSTDKADLRLIYLALAHMIKFRGHFLIEGDLNPDNSDVDKLFIQLVQTYNQLFEENPINASGVDAKAILSARLSKSRRLENLIAQLPGEKKNGLFGNLIALSLGLTPNFKSNFDLAEDAKLQLSKDTYDDDLDNLLAQIGDQYADLFLAAKNLSDAILLSDILRVNTEITKAPLSASMIKRYDEHHQDLTLLKALVRQQLPEKYKEIFFDQSKNGYAGYIDGGASQEEFYKFIKPILEKMDGTEELLVKLNREDLLRKQRTFDNGSIPHQIHLGELHAILRRQEDFYPFLKDNREKIEKILTFRIPYYVGPLARGNSRFAWMTRKSEETITPWNFEEVVDKGASAQSFIERMTNFDKNLPNEKVLPKHSLLYEYFTVYNELTKVKYVTEGMRKPAFLSGEQKKAIVDLLFKTNRKVTVKQLKEDYFKKIECFDSVEISGVEDRFNASLGTYHDLLKIIKDKDFLDNEENEDILEDIVLTLTLFEDREMIEERLKTYAHLFDDKVMKQLKRRRYTGWGRLSRKLINGIRDKQSGKTILDFLKSDGFANRNFMQLIHDDSLTFKEDIQKAQVSGQGDSLHEHIANLAGSPAIKKGILQTVKVVDELVKVMGRHKPENIVIEMARENQTTQKGQKNSRERMKRIEEGIKELGSQILKEHPVENTQLQNEKLYLYYLQNGRDMYVDQELDINRLSDYDVDHIVPQSFLKDDSIDNKVLTRSDKARGKSDNVPSEEVVKKMKNYWRQLLNAKLITQRKFDNLTKAERGGLSELDKAGFIKRQLVETRQITKHVAQILDSRMNTKYDENDKLIREVKVITLKSKLVSDFRKDFQFYKVREINNYHHAHDAYLNAVVGTALIKKYPKLESEFVYGDYKVYDVRKMIAKSEQEIGKATAKYFFYSNIMNFFKTEITLANGEIRKRPLIETNGETGEIVWDKGRDFATVRKVLSMPQVNIVKKTEVQTGGFSKESILPKRNSDKLIARKKDWDPKKYGGFDSPTVAYSVLVVAKVEKGKSKKLKSVKELLGITIMERSSFEKNPIDFLEAKGYKEVKKDLIIKLPKYSLFELENGRKRMLASAGELQKGNELALPSKYVNFLYLASHYEKLKGSPEDNEQKQLFVEQHKHYLDEIIEQISEFSKRVILADANLDKVLSAYNKHRDKPIREQAENIIHLFTLTNLGAPAAFKYFDTTIDRKRYTSTKEVLDATLIHQSITGLYETRIDLSQLGGDGGGGGGSEAAAKGGGGSGGTLQLDDEYRLYSPLVKPDQNIQFWLEQFPQAWAETAGMGLAKQVPPQVIQLKASATPVSVRQYPLSKEAQEGIRPHVQRLIQQGILVPVQSPWNTPLLPVRKPGTNDYRPVQDLREVNKRVQDIHPTVPNPYNLLCALPPQRSWYTVLDLKDAFFCLRLHPTSQPLFAFEWRDPGTGRTGQLTWTRLPQGFKNSPTIFNEALHRDLANFRIQHPQVTLLQYVDDLLLAGATKQDCLEGTKALLLELSDLGYRASAKKAQICRREVTYLGYSLRDGQRWLTEARKKTVVQIPAPTTAKQVREFLGTAGFCRLWIPGFATLAAPLYPLTKPKGEFSWAPEHQKAFDAIKKALLSAPALALPDVTKPFTLYVDERKGVARGVLTQTLGPWRRPVAYLSKKLDPVASGWPVCLKAIAAVAILVKDADKLTLGQNITVIAPHALENIVRQPPDRWMTNARMTHYQSLLLTERVTFAPPAALNPATLLPEETDEPVTHDCHQLLIEETGVRKDLTDIPLTGEVLTWFTDGSSYVVEGKRMAGAAVVDGTRTIWASSLPEGTSAQKAELMALTQALRLAEGKSINIYTDSRYAFATAHVHGAIYKQRGWLTSAGREIKNKEEILSLLEALHLPKRLAIIHCPGHQKAKDPISRGNQMADRVAKQAAQGVNLLAGKRTADGSEFEKRTADGSEFESPKKKAKVE

SEQ ID NO: 162 - protein, 2088 aa, synthetic construct
  source 1..2088: note = Description of Artificial Sequence: Synthetic polypeptide
MPAAKRVKLDGGDKKYSIGLDIGTNSVGWAVITDEYKVPSKKFKVLGNTDRHSIKKNLIGALLFDSGETAEATRLKRTARRRYTRRKNRICYLQEIFSNEMAKVDDSFFHRLEESFLVEEDKKHERHPIFGNIVDEVAYHEKYPTIYHLRKKLVDSTDKADLRLIYLALAHMIKFRGHFLIEGDLNPDNSDVDKLFIQLVQTYNQLFEENPINASGVDAKAILSARLSKSRRLENLIAQLPGEKKNGLFGNLIALSLGLTPNFKSNFDLAEDAKLQLSKDTYDDDLDNLLAQIGDQYADLFLAAKNLSDAILLSDILRVNTEITKAPLSASMIKRYDEHHQDLTLLKALVRQQLPEKYKEIFFDQSKNGYAGYIDGGASQEEFYKFIKPILEKMDGTEELLVKLNREDLLRKQRTFDNGSIPHQIHLGELHAILRRQEDFYPFLKDNREKIEKILTFRIPYYVGPLARGNSRFAWMTRKSEETITPWNFEEVVDKGASAQSFIERMTNFDKNLPNEKVLPKHSLLYEYFTVYNELTKVKYVTEGMRKPAFLSGEQKKAIVDLLFKTNRKVTVKQLKEDYFKKIECFDSVEISGVEDRFNASLGTYHDLLKIIKDKDFLDNEENEDILEDIVLTLTLFEDREMIEERLKTYAHLFDDKVMKQLKRRRYTGWGRLSRKLINGIRDKQSGKTILDFLKSDGFANRNFMQLIHDDSLTFKEDIQKAQVSGQGDSLHEHIANLAGSPAIKKGILQTVKVVDELVKVMGRHKPENIVIEMARENQTTQKGQKNSRERMKRIEEGIKELGSQILKEHPVENTQLQNEKLYLYYLQNGRDMYVDQELDINRLSDYDVDHIVPQSFLKDDSIDNKVLTRSDKARGKSDNVPSEEVVKKMKNYWRQLLNAKLITQRKFDNLTKAERGGLSELDKAGFIKRQLVETRQITKHVAQILDSRMNTKYDENDKLIREVKVITLKSKLVSDFRKDFQFYKVREINNYHHAHDAYLNAVVGTALIKKYPKLESEFVYGDYKVYDVRKMIAKSEQEIGKATAKYFFYSNIMNFFKTEITLANGEIRKRPLIETNGETGEIVWDKGRDFATVRKVLSMPQVNIVKKTEVQTGGFSKESILPKRNSDKLIARKKDWDPKKYGGFDSPTVAYSVLVVAKVEKGKSKKLKSVKELLGITIMERSSFEKNPIDFLEAKGYKEVKKDLIIKLPKYSLFELENGRKRMLASAGELQKGNELALPSKYVNFLYLASHYEKLKGSPEDNEQKQLFVEQHKHYLDEIIEQISEFSKRVILADANLDKVLSAYNKHRDKPIREQAENIIHLFTLTNLGAPAAFKYFDTTIDRKRYTSTKEVLDATLIHQSITGLYETRIDLSQLGGDGGGSSGGGGGSGGTLQLDDEYRLYSPLVKPDQNIQFWLEQFPQAWAETAGMGLAKQVPPQVIQLKASATPVSVRQYPLSKEAQEGIRPHVQRLIQQGILVPVQSPWNTPLLPVRKPGTNDYRPVQDLREVNKRVQDIHPTVPNPYNLLCALPPQRSWYTVLDLKDAFFCLRLHPTSQPLFAFEWRDPGTGRTGQLTWTRLPQGFKNSPTIFNEALHRDLANFRIQHPQVTLLQYVDDLLLAGATKQDCLEGTKALLLELSDLGYRASAKKAQICRREVTYLGYSLRDGQRWLTEARKKTVVQIPAPTTAKQVREFLGTAGFCRLWIPGFATLAAPLYPLTKPKGEFSWAPEHQKAFDAIKKALLSAPALALPDVTKPFTLYVDERKGVARGVLTQTLGPWRRPVAYLSKKLDPVASGWPVCLKAIAAVAILVKDADKLTLGQNITVIAPHALENIVRQPPDRWMTNARMTHYQSLLLTERVTFAPPAALNPATLLPEETDEPVTHDCHQLLIEETGVRKDLTDIPLTGEVLTWFTDGSSYVVEGKRMAGAAVVDGTRTIWASSLPEGTSAQKAELMALTQALRLAEGKSINIYTDSRYAFATAHVHGAIYKQRGWLTSAGREIKNKEEILSLLEALHLPKRLAIIHCPGHQKAKDPISRGNQMADRVAKQAAQGVNLLAGKRTADGSEFEKRTADGSEFESPKKKAKVE

SEQ ID NO: 163 - protein, 2084 aa, synthetic construct
  source 1..2084: note = Description of Artificial Sequence: Synthetic polypeptide
MPAAKRVKLDGGDKKYSIGLDIGTNSVGWAVITDEYKVPSKKFKVLGNTDRHSIKKNLIGALLFDSGETAEATRLKRTARRRYTRRKNRICYLQEIFSNEMAKVDDSFFHRLEESFLVEEDKKHERHPIFGNIVDEVAYHEKYPTIYHLRKKLVDSTDKADLRLIYLALAHMIKFRGHFLIEGDLNPDNSDVDKLFIQLVQTYNQLFEENPINASGVDAKAILSARLSKSRRLENLIAQLPGEKKNGLFGNLIALSLGLTPNFKSNFDLAEDAKLQLSKDTYDDDLDNLLAQIGDQYADLFLAAKNLSDAILLSDILRVNTEITKAPLSASMIKRYDEHHQDLTLLKALVRQQLPEKYKEIFFDQSKNGYAGYIDGGASQEEFYKFIKPILEKMDGTEELLVKLNREDLLRKQRTFDNGSIPHQIHLGELHAILRRQEDFYPFLKDNREKIEKILTFRIPYYVGPLARGNSRFAWMTRKSEETITPWNFEEVVDKGASAQSFIERMTNFDKNLPNEKVLPKHSLLYEYFTVYNELTKVKYVTEGMRKPAFLSGEQKKAIVDLLFKTNRKVTVKQLKEDYFKKIECFDSVEISGVEDRFNASLGTYHDLLKIIKDKDFLDNEENEDILEDIVLTLTLFEDREMIEERLKTYAHLFDDKVMKQLKRRRYTGWGRLSRKLINGIRDKQSGKTILDFLKSDGFANRNFMQLIHDDSLTFKEDIQKAQVSGQGDSLHEHIANLAGSPAIKKGILQTVKVVDELVKVMGRHKPENIVIEMARENQTTQKGQKNSRERMKRIEEGIKELGSQILKEHPVENTQLQNEKLYLYYLQNGRDMYVDQELDINRLSDYDVDHIVPQSFLKDDSIDNKVLTRSDKARGKSDNVPSEEVVKKMKNYWRQLLNAKLITQRKFDNLTKAERGGLSELDKAGFIKRQLVETRQITKHVAQILDSRMNTKYDENDKLIREVKVITLKSKLVSDFRKDFQFYKVREINNYHHAHDAYLNAVVGTALIKKYPKLESEFVYGDYKVYDVRKMIAKSEQEIGKATAKYFFYSNIMNFFKTEITLANGEIRKRPLIETNGETGEIVWDKGRDFATVRKVLSMPQVNIVKKTEVQTGGFSKESILPKRNSDKLIARKKDWDPKKYGGFDSPTVAYSVLVVAKVEKGKSKKLKSVKELLGITIMERSSFEKNPIDFLEAKGYKEVKKDLIIKLPKYSLFELENGRKRMLASAGELQKGNELALPSKYVNFLYLASHYEKLKGSPEDNEQKQLFVEQHKHYLDEIIEQISEFSKRVILADANLDKVLSAYNKHRDKPIREQAENIIHLFTLTNLGAPAAFKYFDTTIDRKRYTSTKEVLDATLIHQSITGLYETRIDLSQLGGDGGPAPAPGGTLQLDDEYRLYSPLVKPDQNIQFWLEQFPQAWAETAGMGLAKQVPPQVIQLKASATPVSVRQYPLSKEAQEGIRPHVQRLIQQGILVPVQSPWNTPLLPVRKPGTNDYRPVQDLREVNKRVQDIHPTVPNPYNLLCALPPQRSWYTVLDLKDAFFCLRLHPTSQPLFAFEWRDPGTGRTGQLTWTRLPQGFKNSPTIFNEALHRDLANFRIQHPQVTLLQYVDDLLLAGATKQDCLEGTKALLLELSDLGYRASAKKAQICRREVTYLGYSLRDGQRWLTEARKKTVVQIPAPTTAKQVREFLGTAGFCRLWIPGFATLAAPLYPLTKPKGEFSWAPEHQKAFDAIKKALLSAPALALPDVTKPFTLYVDERKGVARGVLTQTLGPWRRPVAYLSKKLDPVASGWPVCLKAIAAVAILVKDADKLTLGQNITVIAPHALENIVRQPPDRWMTNARMTHYQSLLLTERVTFAPPAALNPATLLPEETDEPVTHDCHQLLIEETGVRKDLTDIPLTGEVLTWFTDGSSYVVEGKRMAGAAVVDGTRTIWASSLPEGTSAQKAELMALTQALRLAEGKSINIYTDSRYAFATAHVHGAIYKQRGWLTSAGREIKNKEEILSLLEALHLPKRLAIIHCPGHQKAKDPISRGNQMADRVAKQAAQGVNLLAGKRTADGSEFEKRTADGSEFESPKKKAKVE

SEQ ID NO: 164 - protein, 2090 aa, synthetic construct
  source 1..2090: note = Description of Artificial Sequence: Synthetic polypeptide
MPAAKRVKLDGGDKKYSIGLDIGTNSVGWAVITDEYKVPSKKFKVLGNTDRHSIKKNLIGALLFDSGETAEATRLKRTARRRYTRRKNRICYLQEIFSNEMAKVDDSFFHRLEESFLVEEDKKHERHPIFGNIVDEVAYHEKYPTIYHLRKKLVDSTDKADLRLIYLALAHMIKFRGHFLIEGDLNPDNSDVDKLFIQLVQTYNQLFEENPINASGVDAKAILSARLSKSRRLENLIAQLPGEKKNGLFGNLIALSLGLTPNFKSNFDLAEDAKLQLSKDTYDDDLDNLLAQIGDQYADLFLAAKNLSDAILLSDILRVNTEITKAPLSASMIKRYDEHHQDLTLLKALVRQQLPEKYKEIFFDQSKNGYAGYIDGGASQEEFYKFIKPILEKMDGTEELLVKLNREDLLRKQRTFDNGSIPHQIHLGELHAILRRQEDFYPFLKDNREKIEKILTFRIPYYVGPLARGNSRFAWMTRKSEETITPWNFEEVVDKGASAQSFIERMTNFDKNLPNEKVLPKHSLLYEYFTVYNELTKVKYVTEGMRKPAFLSGEQKKAIVDLLFKTNRKVTVKQLKEDYFKKIECFDSVEISGVEDRFNASLGTYHDLLKIIKDKDFLDNEENEDILEDIVLTLTLFEDREMIEERLKTYAHLFDDKVMKQLKRRRYTGWGRLSRKLINGIRDKQSGKTILDFLKSDGFANRNFMQLIHDDSLTFKEDIQKAQVSGQGDSLHEHIANLAGSPAIKKGILQTVKVVDELVKVMGRHKPENIVIEMARENQTTQKGQKNSRERMKRIEEGIKELGSQILKEHPVENTQLQNEKLYLYYLQNGRDMYVDQELDINRLSDYDVDHIVPQSFLKDDSIDNKVLTRSDKARGKSDNVPSEEVVKKMKNYWRQLLNAKLITQRKFDNLTKAERGGLSELDKAGFIKRQLVETRQITKHVAQILDSRMNTKYDENDKLIREVKVITLKSKLVSDFRKDFQFYKVREINNYHHAHDAYLNAVVGTALIKKYPKLESEFVYGDYKVYDVRKMIAKSEQEIGKATAKYFFYSNIMNFFKTEITLANGEIRKRPLIETNGETGEIVWDKGRDFATVRKVLSMPQVNIVKKTEVQTGGFSKESILPKRNSDKLIARKKDWDPKKYGGFDSPTVAYSVLVVAKVEKGKSKKLKSVKELLGITIMERSSFEKNPIDFLEAKGYKEVKKDLIIKLPKYSLFELENGRKRMLASAGELQKGNELALPSKYVNFLYLASHYEKLKGSPEDNEQKQLFVEQHKHYLDEIIEQISEFSKRVILADANLDKVLSAYNKHRDKPIREQAENIIHLFTLTNLGAPAAFKYFDTTIDRKRYTSTKEVLDATLIHQSITGLYETRIDLSQLGGDGGGGSPAPEAAAKGGTLQLDDEYRLYSPLVKPDQNIQFWLEQFPQAWAETAGMGLAKQVPPQVIQLKASATPVSVRQYPLSKEAQEGIRPHVQRLIQQGILVPVQSPWNTPLLPVRKPGTNDYRPVQDLREVNKRVQDIHPTVPNPYNLLCALPPQRSWYTVLDLKDAFFCLRLHPTSQPLFAFEWRDPGTGRTGQLTWTRLPQGFKNSPTIFNEALHRDLANFRIQHPQVTLLQYVDDLLLAGATKQDCLEGTKALLLELSDLGYRASAKKAQICRREVTYLGYSLRDGQRWLTEARKKTVVQIPAPTTAKQVREFLGTAGFCRLWIPGFATLAAPLYPLTKPKGEFSWAPEHQKAFDAIKKALLSAPALALPDVTKPFTLYVDERKGVARGVLTQTLGPWRRPVAYLSKKLDPVASGWPVCLKAIAAVAILVKDADKLTLGQNITVIAPHALENIVRQPPDRWMTNARMTHYQSLLLTERVTFAPPAALNPATLLPEETDEPVTHDCHQLLIEETGVRKDLTDIPLTGEVLTWFTDGSSYVVEGKRMAGAAVVDGTRTIWASSLPEGTSAQKAELMALTQALRLAEGKSINIYTDSRYAFATAHVHGAIYKQRGWLTSAGREIKNKEEILSLLEALHLPKRLAIIHCPGHQKAKDPISRGNQMADRVAKQAAQGVNLLAGKRTADGSEFEKRTADGSEFESPKKKAKVE

SEQ ID NO: 165 - protein, 2085 aa, synthetic construct
  source 1..2085: note = Description of Artificial Sequence: Synthetic polypeptide
MPAAKRVKLDGGDKKYSIGLDIGTNSVGWAVITDEYKVPSKKFKVLGNTDRHSIKKNLIGALLFDSGETAEATRLKRTARRRYTRRKNRICYLQEIFSNEMAKVDDSFFHRLEESFLVEEDKKHERHPIFGNIVDEVAYHEKYPTIYHLRKKLVDSTDKADLRLIYLALAHMIKFRGHFLIEGDLNPDNSDVDKLFIQLVQTYNQLFEENPINASGVDAKAILSARLSKSRRLENLIAQLPGEKKNGLFGNLIALSLGLTPNFKSNFDLAEDAKLQLSKDTYDDDLDNLLAQIGDQYADLFLAAKNLSDAILLSDILRVNTEITKAPLSASMIKRYDEHHQDLTLLKALVRQQLPEKYKEIFFDQSKNGYAGYIDGGASQEEFYKFIKPILEKMDGTEELLVKLNREDLLRKQRTFDNGSIPHQIHLGELHAILRRQEDFYPFLKDNREKIEKILTFRIPYYVGPLARGNSRFAWMTRKSEETITPWNFEEVVDKGASAQSFIERMTNFDKNLPNEKVLPKHSLLYEYFTVYNELTKVKYVTEGMRKPAFLSGEQKKAIVDLLFKTNRKVTVKQLKEDYFKKIECFDSVEISGVEDRFNASLGTYHDLLKIIKDKDFLDNEENEDILEDIVLTLTLFEDREMIEERLKTYAHLFDDKVMKQLKRRRYTGWGRLSRKLINGIRDKQSGKTILDFLKSDGFANRNFMQLIHDDSLTFKEDIQKAQVSGQGDSLHEHIANLAGSPAIKKGILQTVKVVDELVKVMGRHKPENIVIEMARENQTTQKGQKNSRERMKRIEEGIKELGSQILKEHPVENTQLQNEKLYLYYLQNGRDMYVDQELDINRLSDYDVDHIVPQSFLKDDSIDNKVLTRSDKARGKSDNVPSEEVVKKMKNYWRQLLNAKLITQRKFDNLTKAERGGLSELDKAGFIKRQLVETRQITKHVAQILDSRMNTKYDENDKLIREVKVITLKSKLVSDFRKDFQFYKVREINNYHHAHDAYLNAVVGTALIKKYPKLESEFVYGDYKVYDVRKMIAKSEQEIGKATAKYFFYSNIMNFFKTEITLANGEIRKRPLIETNGETGEIVWDKGRDFATVRKVLSMPQVNIVKKTEVQTGGFSKESILPKRNSDKLIARKKDWDPKKYGGFDSPTVAYSVLVVAKVEKGKSKKLKSVKELLGITIMERSSFEKNPIDFLEAKGYKEVKKDLIIKLPKYSLFELENGRKRMLASAGELQKGNELALPSKYVNFLYLASHYEKLKGSPEDNEQKQLFVEQHKHYLDEIIEQISEFSKRVILADANLDKVLSAYNKHRDKPIREQAENIIHLFTLTNLGAPAAFKYFDTTIDRKRYTSTKEVLDATLIHQSITGLYETRIDLSQLGGDGGGSSGGSGGTLQLDDEYRLYSPLVKPDQNIQFWLEQFPQAWAETAGMGLAKQVPPQVIQLKASATPVSVRQYPLSKEAQEGIRPHVQRLIQQGILVPVQSPWNTPLLPVRKPGTNDYRPVQDLREVNKRVQDIHPTVPNPYNLLCALPPQRSWYTVLDLKDAFFCLRLHPTSQPLFAFEWRDPGTGRTGQLTWTRLPQGFKNSPTIFNEALHRDLANFRIQHPQVTLLQYVDDLLLAGATKQDCLEGTKALLLELSDLGYRASAKKAQICRREVTYLGYSLRDGQRWLTEARKKTVVQIPAPTTAKQVREFLGTAGFCRLWIPGFATLAAPLYPLTKPKGEFSWAPEHQKAFDAIKKALLSAPALALPDVTKPFTLYVDERKGVARGVLTQTLGPWRRPVAYLSKKLDPVASGWPVCLKAIAAVAILVKDADKLTLGQNITVIAPHALENIVRQPPDRWMTNARMTHYQSLLLTERVTFAPPAALNPATLLPEETDEPVTHDCHQLLIEETGVRKDLTDIPLTGEVLTWFTDGSSYVVEGKRMAGAAVVDGTRTIWASSLPEGTSAQKAELMALTQALRLAEGKSINIYTDSRYAFATAHVHGAIYKQRGWLTSAGREIKNKEEILSLLEALHLPKRLAIIHCPGHQKAKDPISRGNQMADRVAKQAAQGVNLLAGKRTADGSEFEKRTADGSEFESPKKKAKVE

SEQ ID NO: 166 - protein, 2084 aa, synthetic construct
  source 1..2084: note = Description of Artificial Sequence: Synthetic polypeptide
MPAAKRVKLDGGDKKYSIGLDIGTNSVGWAVITDEYKVPSKKFKVLGNTDRHSIKKNLIGALLFDSGETAEATRLKRTARRRYTRRKNRICYLQEIFSNEMAKVDDSFFHRLEESFLVEEDKKHERHPIFGNIVDEVAYHEKYPTIYHLRKKLVDSTDKADLRLIYLALAHMIKFRGHFLIEGDLNPDNSDVDKLFIQLVQTYNQLFEENPINASGVDAKAILSARLSKSRRLENLIAQLPGEKKNGLFGNLIALSLGLTPNFKSNFDLAEDAKLQLSKDTYDDDLDNLLAQIGDQYADLFLAAKNLSDAILLSDILRVNTEITKAPLSASMIKRYDEHHQDLTLLKALVRQQLPEKYKEIFFDQSKNGYAGYIDGGASQEEFYKFIKPILEKMDGTEELLVKLNREDLLRKQRTFDNGSIPHQIHLGELHAILRRQEDFYPFLKDNREKIEKILTFRIPYYVGPLARGNSRFAWMTRKSEETITPWNFEEVVDKGASAQSFIERMTNFDKNLPNEKVLPKHSLLYEYFTVYNELTKVKYVTEGMRKPAFLSGEQKKAIVDLLFKTNRKVTVKQLKEDYFKKIECFDSVEISGVEDRFNASLGTYHDLLKIIKDKDFLDNEENEDILEDIVLTLTLFEDREMIEERLKTYAHLFDDKVMKQLKRRRYTGWGRLSRKLINGIRDKQSGKTILDFLKSDGFANRNFMQLIHDDSLTFKEDIQKAQVSGQGDSLHEHIANLAGSPAIKKGILQTVKVVDELVKVMGRHKPENIVIEMARENQTTQKGQKNSRERMKRIEEGIKELGSQILKEHPVENTQLQNEKLYLYYLQNGRDMYVDQELDINRLSDYDVDHIVPQSFLKDDSIDNKVLTRSDKARGKSDNVPSEEVVKKMKNYWRQLLNAKLITQRKFDNLTKAERGGLSELDKAGFIKRQLVETRQITKHVAQILDSRMNTKYDENDKLIREVKVITLKSKLVSDFRKDFQFYKVREINNYHHAHDAYLNAVVGTALIKKYPKLESEFVYGDYKVYDVRKMIAKSEQEIGKATAKYFFYSNIMNFFKTEITLANGEIRKRPLIETNGETGEIVWDKGRDFATVRKVLSMPQVNIVKKTEVQTGGFSKESILPKRNSDKLIARKKDWDPKKYGGFDSPTVAYSVLVVAKVEKGKSKKLKSVKELLGITIMERSSFEKNPIDFLEAKGYKEVKKDLIIKLPKYSLFELENGRKRMLASAGELQKGNELALPSKYVNFLYLASHYEKLKGSPEDNEQKQLFVEQHKHYLDEIIEQISEFSKRVILADANLDKVLSAYNKHRDKPIREQAENIIHLFTLTNLGAPAAFKYFDTTIDRKRYTSTKEVLDATLIHQSITGLYETRIDLSQLGGDGGGGGGGGGTLQLDDEYRLYSPLVKPDQNIQFWLEQFPQAWAETAGMGLAKQVPPQVIQLKASATPVSVRQYPLSKEAQEGIRPHVQRLIQQGILVPVQSPWNTPLLPVRKPGTNDYRPVQDLREVNKRVQDIHPTVPNPYNLLCALPPQRSWYTVLDLKDAFFCLRLHPTSQPLFAFEWRDPGTGRTGQLTWTRLPQGFKNSPTIFNEALHRDLANFRIQHPQVTLLQYVDDLLLAGATKQDCLEGTKALLLELSDLGYRASAKKAQICRREVTYLGYSLRDGQRWLTEARKKTVVQIPAPTTAKQVREFLGTAGFCRLWIPGFATLAAPLYPLTKPKGEFSWAPEHQKAFDAIKKALLSAPALALPDVTKPFTLYVDERKGVARGVLTQTLGPWRRPVAYLSKKLDPVASGWPVCLKAIAAVAILVKDADKLTLGQNITVIAPHALENIVRQPPDRWMTNARMTHYQSLLLTERVTFAPPAALNPATLLPEETDEPVTHDCHQLLIEETGVRKDLTDIPLTGEVLTWFTDGSSYVVEGKRMAGAAVVDGTRTIWASSLPEGTSAQKAELMALTQALRLAEGKSINIYTDSRYAFATAHVHGAIYKQRGWLTSAGREIKNKEEILSLLEALHLPKRLAIIHCPGHQKAKDPISRGNQMADRVAKQAAQGVNLLAGKRTADGSEFEKRTADGSEFESPKKKAKVE

SEQ ID NO: 167 - protein, 2088 aa, synthetic construct
  source 1..2088: note = Description of Artificial Sequence: Synthetic polypeptide
MPAAKRVKLDGGDKKYSIGLDIGTNSVGWAVITDEYKVPSKKFKVLGNTDRHSIKKNLIGALLFDSGETAEATRLKRTARRRYTRRKNRICYLQEIFSNEMAKVDDSFFHRLEESFLVEEDKKHERHPIFGNIVDEVAYHEKYPTIYHLRKKLVDSTDKADLRLIYLALAHMIKFRGHFLIEGDLNPDNSDVDKLFIQLVQTYNQLFEENPINASGVDAKAILSARLSKSRRLENLIAQLPGEKKNGLFGNLIALSLGLTPNFKSNFDLAEDAKLQLSKDTYDDDLDNLLAQIGDQYADLFLAAKNLSDAILLSDILRVNTEITKAPLSASMIKRYDEHHQDLTLLKALVRQQLPEKYKEIFFDQSKNGYAGYIDGGASQEEFYKFIKPILEKMDGTEELLVKLNREDLLRKQRTFDNGSIPHQIHLGELHAILRRQEDFYPFLKDNREKIEKILTFRIPYYVGPLARGNSRFAWMTRKSEETITPWNFEEVVDKGASAQSFIERMTNFDKNLPNEKVLPKHSLLYEYFTVYNELTKVKYVTEGMRKPAFLSGEQKKAIVDLLFKTNRKVTVKQLKEDYFKKIECFDSVEISGVEDRFNASLGTYHDLLKIIKDKDFLDNEENEDILEDIVLTLTLFEDREMIEERLKTYAHLFDDKVMKQLKRRRYTGWGRLSRKLINGIRDKQSGKTILDFLKSDGFANRNFMQLIHDDSLTFKEDIQKAQVSGQGDSLHEHIANLAGSPAIKKGILQTVKVVDELVKVMGRHKPENIVIEMARENQTTQKGQKNSRERMKRIEEGIKELGSQILKEHPVENTQLQNEKLYLYYLQNGRDMYVDQELDINRLSDYDVDHIVPQSFLKDDSIDNKVLTRSDKARGKSDNVPSEEVVKKMKNYWRQLLNAKLITQRKFDNLTKAERGGLSELDKAGFIKRQLVETRQITKHVAQILDSRMNTKYDENDKLIREVKVITLKSKLVSDFRKDFQFYKVREINNYHHAHDAYLNAVVGTALIKKYPKLESEFVYGDYKVYDVRKMIAKSEQEIGKATAKYFFYSNIMNFFKTEITLANGEIRKRPLIETNGETGEIVWDKGRDFATVRKVLSMPQVNIVKKTEVQTGGFSKESILPKRNSDKLIARKKDWDPKKYGGFDSPTVAYSVLVVAKVEKGKSKKLKSVKELLGITIMERSSFEKNPIDFLEAKGYKEVKKDLIIKLPKYSLFELENGRKRMLASAGELQKGNELALPSKYVNFLYLASHYEKLKGSPEDNEQKQLFVEQHKHYLDEIIEQISEFSKRVILADANLDKVLSAYNKHRDKPIREQAENIIHLFTLTNLGAPAAFKYFDTTIDRKRYTSTKEVLDATLIHQSITGLYETRIDLSQLGGDGGPAPGGSGGGGGTLQLDDEYRLYSPLVKPDQNIQFWLEQFPQAWAETAGMGLAKQVPPQVIQLKASATPVSVRQYPLSKEAQEGIRPHVQRLIQQGILVPVQSPWNTPLLPVRKPGTNDYRPVQDLREVNKRVQDIHPTVPNPYNLLCALPPQRSWYTVLDLKDAFFCLRLHPTSQPLFAFEWRDPGTGRTGQLTWTRLPQGFKNSPTIFNEALHRDLANFRIQHPQVTLLQYVDDLLLAGATKQDCLEGTKALLLELSDLGYRASAKKAQICRREVTYLGYSLRDGQRWLTEARKKTVVQIPAPTTAKQVREFLGTAGFCRLWIPGFATLAAPLYPLTKPKGEFSWAPEHQKAFDAIKKALLSAPALALPDVTKPFTLYVDERKGVARGVLTQTLGPWRRPVAYLSKKLDPVASGWPVCLKAIAAVAILVKDADKLTLGQNITVIAPHALENIVRQPPDRWMTNARMTHYQSLLLTERVTFAPPAALNPATLLPEETDEPVTHDCHQLLIEETGVRKDLTDIPLTGEVLTWFTDGSSYVVEGKRMAGAAVVDGTRTIWASSLPEGTSAQKAELMALTQALRLAEGKSINIYTDSRYAFATAHVHGAIYKQRGWLTSAGREIKNKEEILSLLEALHLPKRLAIIHCPGHQKAKDPISRGNQMADRVAKQAAQGVNLLAGKRTADGSEFEKRTADGSEFESPKKKAKVE

SEQ ID NO: 168 - protein, 2090 aa, synthetic construct
  source 1..2090: note = Description of Artificial Sequence: Synthetic polypeptide
MPAAKRVKLDGGDKKYSIGLDIGTNSVGWAVITDEYKVPSKKFKVLGNTDRHSIKKNLIGALLFDSGETAEATRLKRTARRRYTRRKNRICYLQEIFSNEMAKVDDSFFHRLEESFLVEEDKKHERHPIFGNIVDEVAYHEKYPTIYHLRKKLVDSTDKADLRLIYLALAHMIKFRGHFLIEGDLNPDNSDVDKLFIQLVQTYNQLFEENPINASGVDAKAILSARLSKSRRLENLIAQLPGEKKNGLFGNLIALSLGLTPNFKSNFDLAEDAKLQLSKDTYDDDLDNLLAQIGDQYADLFLAAKNLSDAILLSDILRVNTEITKAPLSASMIKRYDEHHQDLTLLKALVRQQLPEKYKEIFFDQSKNGYAGYIDGGASQEEFYKFIKPILEKMDGTEELLVKLNREDLLRKQRTFDNGSIPHQIHLGELHAILRRQEDFYPFLKDNREKIEKILTFRIPYYVGPLARGNSRFAWMTRKSEETITPWNFEEVVDKGASAQSFIERMTNFDKNLPNEKVLPKHSLLYEYFTVYNELTKVKYVTEGMRKPAFLSGEQKKAIVDLLFKTNRKVTVKQLKEDYFKKIECFDSVEISGVEDRFNASLGTYHDLLKIIKDKDFLDNEENEDILEDIVLTLTLFEDREMIEERLKTYAHLFDDKVMKQLKRRRYTGWGRLSRKLINGIRDKQSGKTILDFLKSDGFANRNFMQLIHDDSLTFKEDIQKAQVSGQGDSLHEHIANLAGSPAIKKGILQTVKVVDELVKVMGRHKPENIVIEMARENQTTQKGQKNSRERMKRIEEGIKELGSQILKEHPVENTQLQNEKLYLYYLQNGRDMYVDQELDINRLSDYDVDHIVPQSFLKDDSIDNKVLTRSDKARGKSDNVPSEEVVKKMKNYWRQLLNAKLITQRKFDNLTKAERGGLSELDKAGFIKRQLVETRQITKHVAQILDSRMNTKYDENDKLIREVKVITLKSKLVSDFRKDFQFYKVREINNYHHAHDAYLNAVVGTALIKKYPKLESEFVYGDYKVYDVRKMIAKSEQEIGKATAKYFFYSNIMNFFKTEITLANGEIRKRPLIETNGETGEIVWDKGRDFATVRKVLSMPQVNIVKKTEVQTGGFSKESILPKRNSDKLIARKKDWDPKKYGGFDSPTVAYSVLVVAKVEKGKSKKLKSVKELLGITIMERSSFEKNPIDFLEAKGYKEVKKDLIIKLPKYSLFELENGRKRMLASAGELQKGNELALPSKYVNFLYLASHYEKLKGSPEDNEQKQLFVEQHKHYLDEIIEQISEFSKRVILADANLDKVLSAYNKHRDKPIREQAENIIHLFTLTNLGAPAAFKYFDTTIDRKRYTSTKEVLDATLIHQSITGLYETRIDLSQLGGDGGEAAAKPAPGGSGGTLQLDDEYRLYSPLVKPDQNIQFWLEQFPQAWAETAGMGLAKQVPPQVIQLKASATPVSVRQYPLSKEAQEGIRPHVQRLIQQGILVPVQSPWNTPLLPVRKPGTNDYRPVQDLREVNKRVQDIHPTVPNPYNLLCALPPQRSWYTVLDLKDAFFCLRLHPTSQPLFAFEWRDPGTGRTGQLTWTRLPQGFKNSPTIFNEALHRDLANFRIQHPQVTLLQYVDDLLLAGATKQDCLEGTKALLLELSDLGYRASAKKAQICRREVTYLGYSLRDGQRWLTEARKKTVVQIPAPTTAKQVREFLGTAGFCRLWIPGFATLAAPLYPLTKPKGEFSWAPEHQKAFDAIKKALLSAPALALPDVTKPFTLYVDERKGVARGVLTQTLGPWRRPVAYLSKKLDPVASGWPVCLKAIAAVAILVKDADKLTLGQNITVIAPHALENIVRQPPDRWMTNARMTHYQSLLLTERVTFAPPAALNPATLLPEETDEPVTHDCHQLLIEETGVRKDLTDIPLTGEVLTWFTDGSSYVVEGKRMAGAAVVDGTRTIWASSLPEGTSAQKAELMALTQALRLAEGKSINIYTDSRYAFATAHVHGAIYKQRGWLTSAGREIKNKEEILSLLEALHLPKRLAIIHCPGHQKAKDPISRGNQMADRVAKQAAQGVNLLAGKRTADGSEFEKRTADGSEFESPKKKAKVE

SEQ ID NO: 169 - protein, 2088 aa, synthetic construct
  source 1..2088: note = Description of Artificial Sequence: Synthetic polypeptide
MPAAKRVKLDGGDKKYSIGLDIGTNSVGWAVITDEYKVPSKKFKVLGNTDRHSIKKNLIGALLFDSGETAEATRLKRTARRRYTRRKNRICYLQEIFSNEMAKVDDSFFHRLEESFLVEEDKKHERHPIFGNIVDEVAYHEKYPTIYHLRKKLVDSTDKADLRLIYLALAHMIKFRGHFLIEGDLNPDNSDVDKLFIQLVQTYNQLFEENPINASGVDAKAILSARLSKSRRLENLIAQLPGEKKNGLFGNLIALSLGLTPNFKSNFDLAEDAKLQLSKDTYDDDLDNLLAQIGDQYADLFLAAKNLSDAILLSDILRVNTEITKAPLSASMIKRYDEHHQDLTLLKALVRQQLPEKYKEIFFDQSKNGYAGYIDGGASQEEFYKFIKPILEKMDGTEELLVKLNREDLLRKQRTFDNGSIPHQIHLGELHAILRRQEDFYPFLKDNREKIEKILTFRIPYYVGPLARGNSRFAWMTRKSEETITPWNFEEVVDKGASAQSFIERMTNFDKNLPNEKVLPKHSLLYEYFTVYNELTKVKYVTEGMRKPAFLSGEQKKAIVDLLFKTNRKVTVKQLKEDYFKKIECFDSVEISGVEDRFNASLGTYHDLLKIIKDKDFLDNEENEDILEDIVLTLTLFEDREMIEERLKTYAHLFDDKVMKQLKRRRYTGWGRLSRKLINGIRDKQSGKTILDFLKSDGFANRNFMQLIHDDSLTFKEDIQKAQVSGQGDSLHEHIANLAGSPAIKKGILQTVKVVDELVKVMGRHKPENIVIEMARENQTTQKGQKNSRERMKRIEEGIKELGSQILKEHPVENTQLQNEKLYLYYLQNGRDMYVDQELDINRLSDYDVDHIVPQSFLKDDSIDNKVLTRSDKARGKSDNVPSEEVVKKMKNYWRQLLNAKLITQRKFDNLTKAERGGLSELDKAGFIKRQLVETRQITKHVAQILDSRMNTKYDENDKLIREVKVITLKSKLVSDFRKDFQFYKVREINNYHHAHDAYLNAVVGTALIKKYPKLESEFVYGDYKVYDVRKMIAKSEQEIGKATAKYFFYSNIMNFFKTEITLANGEIRKRPLIETNGETGEIVWDKGRDFATVRKVLSMPQVNIVKKTEVQTGGFSKESILPKRNSDKLIARKKDWDPKKYGGFDSPTVAYSVLVVAKVEKGKSKKLKSVKELLGITIMERSSFEKNPIDFLEAKGYKEVKKDLIIKLPKYSLFELENGRKRMLASAGELQKGNELALPSKYVNFLYLASHYEKLKGSPEDNEQKQLFVEQHKHYLDEIIEQISEFSKRVILADANLDKVLSAYNKHRDKPIREQAENIIHLFTLTNLGAPAAFKYFDTTIDRKRYTSTKEVLDATLIHQSITGLYETRIDLSQLGGDGGGGGPAPGGSGGTLQLDDEYRLYSPLVKPDQNIQFWLEQFPQAWAETAGMGLAKQVPPQVIQLKASATPVSVRQYPLSKEAQEGIRPHVQRLIQQGILVPVQSPWNTPLLPVRKPGTNDYRPVQDLREVNKRVQDIHPTVPNPYNLLCALPPQRSWYTVLDLKDAFFCLRLHPTSQPLFAFEWRDPGTGRTGQLTWTRLPQGFKNSPTIFNEALHRDLANFRIQHPQVTLLQYVDDLLLAGATKQDCLEGTKALLLELSDLGYRASAKKAQICRREVTYLGYSLRDGQRWLTEARKKTVVQIPAPTTAKQVREFLGTAGFCRLWIPGFATLAAPLYPLTKPKGEFSWAPEHQKAFDAIKKALLSAPALALPDVTKPFTLYVDERKGVARGVLTQTLGPWRRPVAYLSKKLDPVASGWPVCLKAIAAVAILVKDADKLTLGQNITVIAPHALENIVRQPPDRWMTNARMTHYQSLLLTERVTFAPPAALNPATLLPEETDEPVTHDCHQLLIEETGVRKDLTDIPLTGEVLTWFTDGSSYVVEGKRMAGAAVVDGTRTIWASSLPEGTSAQKAELMALTQALRLAEGKSINIYTDSRYAFATAHVHGAIYKQRGWLTSAGREIKNKEEILSLLEALHLPKRLAIIHCPGHQKAKDPISRGNQMADRVAKQAAQGVNLLAGKRTADGSEFEKRTADGSEFESPKKKAKVE

SEQ ID NO: 170 - protein, 2090 aa, synthetic construct
  source 1..2090: note = Description of Artificial Sequence: Synthetic polypeptide
MPAAKRVKLDGGDKKYSIGLDIGTNSVGWAVITDEYKVPSKKFKVLGNTDRHSIKKNLIGALLFDSGETAEATRLKRTARRRYTRRKNRICYLQEIFSNEMAKVDDSFFHRLEESFLVEEDKKHERHPIFGNIVDEVAYHEKYPTIYHLRKKLVDSTDKADLRLIYLALAHMIKFRGHFLIEGDLNPDNSDVDKLFIQLVQTYNQLFEENPINASGVDAKAILSARLSKSRRLENLIAQLPGEKKNGLFGNLIALSLGLTPNFKSNFDLAEDAKLQLSKDTYDDDLDNLLAQIGDQYADLFLAAKNLSDAILLSDILRVNTEITKAPLSASMIKRYDEHHQDLTLLKALVRQQLPEKYKEIFFDQSKNGYAGYIDGGASQEEFYKFIKPILEKMDGTEELLVKLNREDLLRKQRTFDNGSIPHQIHLGELHAILRRQEDFYPFLKDNREKIEKILTFRIPYYVGPLARGNSRFAWMTRKSEETITPWNFEEVVDKGASAQSFIERMTNFDKNLPNEKVLPKHSLLYEYFTVYNELTKVKYVTEGMRKPAFLSGEQKKAIVDLLFKTNRKVTVKQLKEDYFKKIECFDSVEISGVEDRFNASLGTYHDLLKIIKDKDFLDNEENEDILEDIVLTLTLFEDREMIEERLKTYAHLFDDKVMKQLKRRRYTGWGRLSRKLINGIRDKQSGKTILDFLKSDGFANRNFMQLIHDDSLTFKEDIQKAQVSGQGDSLHEHIANLAGSPAIKKGILQTVKVVDELVKVMGRHKPENIVIEMARENQTTQKGQKNSRERMKRIEEGIKELGSQILKEHPVENTQLQNEKLYLYYLQNGRDMYVDQELDINRLSDYDVDHIVPQSFLKDDSIDNKVLTRSDKARGKSDNVPSEEVVKKMKNYWRQLLNAKLITQRKFDNLTKAERGGLSELDKAGFIKRQLVETRQITKHVAQILDSRMNTKYDENDKLIREVKVITLKSKLVSDFRKDFQFYKVREINNYHHAHDAYLNAVVGTALIKKYPKLESEFVYGDYKVYDVRKMIAKSEQEIGKATAKYFFYSNIMNFFKTEITLANGEIRKRPLIETNGETGEIVWDKGRDFATVRKVLSMPQVNIVKKTEVQTGGFSKESILPKRNSDKLIARKKDWDPKKYGGFDSPTVAYSVLVVAKVEKGKSKKLKSVKELLGITIMERSSFEKNPIDFLEAKGYKEVKKDLIIKLPKYSLFELENGRKRMLASAGELQKGNELALPSKYVNFLYLASHYEKLKGSPEDNEQKQLFVEQHKHYLDEIIEQISEFSKRVILADANLDKVLSAYNKHRDKPIREQAENIIHLFTLTNLGAPAAFKYFDTTIDRKRYTSTKEVLDATLIHQSITGLYETRIDLSQLGGDGGGSSGGSEAAAKGGTLQLDDEYRLYSPLVKPDQNIQFWLEQFPQAWAETAGMGLAKQVPPQVIQLKASATPVSVRQYPLSKEAQEGIRPHVQRLIQQGILVPVQSPWNTPLLPVRKPGTNDYRPVQDLREVNKRVQDIHPTVPNPYNLLCALPPQRSWYTVLDLKDAFFCLRLHPTSQPLFAFEWRDPGTGRTGQLTWTRLPQGFKNSPTIFNEALHRDLANFRIQHPQVTLLQYVDDLLLAGATKQDCLEGTKALLLELSDLGYRASAKKAQICRREVTYLGYSLRDGQRWLTEARKKTVVQIPAPTTAKQVREFLGTAGFCRLWIPGFATLAAPLYPLTKPKGEFSWAPEHQKAFDAIKKALLSAPALALPDVTKPFTLYVDERKGVARGVLTQTLGPWRRPVAYLSKKLDPVASGWPVCLKAIAAVAILVKDADKLTLGQNITVIAPHALENIVRQPPDRWMTNARMTHYQSLLLTERVTFAPPAALNPATLLPEETDEPVTHDCHQLLIEETGVRKDLTDIPLTGEVLTWFTDGSSYVVEGKRMAGAAVVDGTRTIWASSLPEGTSAQKAELMALTQALRLAEGKSINIYTDSRYAFATAHVHGAIYKQRGWLTSAGREIKNKEEILSLLEALHLPKRLAIIHCPGHQKAKDPISRGNQMADRVAKQAAQGVNLLAGKRTADGSEFEKRTADGSEFESPKKKAKVE

SEQ ID NO: 171 - protein, 2088 aa, synthetic construct
  source 1..2088: note = Description of Artificial Sequence: Synthetic polypeptide
MPAAKRVKLDGGDKKYSIGLDIGTNSVGWAVITDEYKVPSKKFKVLGNTDRHSIKKNLIGALLFDSGETAEATRLKRTARRRYTRRKNRICYLQEIFSNEMAKVDDSFFHRLEESFLVEEDKKHERHPIFGNIVDEVAYHEKYPTIYHLRKKLVDSTDKADLRLIYLALAHMIKFRGHFLIEGDLNPDNSDVDKLFIQLVQTYNQLFEENPINASGVDAKAILSARLSKSRRLENLIAQLPGEKKNGLFGNLIALSLGLTPNFKSNFDLAEDAKLQLSKDTYDDDLDNLLAQIGDQYADLFLAAKNLSDAILLSDILRVNTEITKAPLSASMIKRYDEHHQDLTLLKALVRQQLPEKYKEIFFDQSKNGYAGYIDGGASQEEFYKFIKPILEKMDGTEELLVKLNREDLLRKQRTFDNGSIPHQIHLGELHAILRRQEDFYPFLKDNREKIEKILTFRIPYYVGPLARGNSRFAWMTRKSEETITPWNFEEVVDKGASAQSFIERMTNFDKNLPNEKVLPKHSLLYEYFTVYNELTKVKYVTEGMRKPAFLSGEQKKAIVDLLFKTNRKVTVKQLKEDYFKKIECFDSVEISGVEDRFNASLGTYHDLLKIIKDKDFLDNEENEDILEDIVLTLTLFEDREMIEERLKTYAHLFDDKVMKQLKRRRYTGWGRLSRKLINGIRDKQSGKTILDFLKSDGFANRNFMQLIHDDSLTFKEDIQKAQVSGQGDSLHEHIANLAGSPAIKKGILQTVKVVDELVKVMGRHKPENIVIEMARENQTTQKGQKNSRERMKRIEEGIKELGSQILKEHPVENTQLQNEKLYLYYLQNGRDMYVDQELDINRLSDYDVDHIVPQSFLKDDSIDNKVLTRSDKARGKSDNVPSEEVVKKMKNYWRQLLNAKLITQRKFDNLTKAERGGLSELDKAGFIKRQLVETRQITKHVAQILDSRMNTKYDENDKLIREVKVITLKSKLVSDFRKDFQFYKVREINNYHHAHDAYLNAVVGTALIKKYPKLESEFVYGDYKVYDVRKMIAKSEQEIGKATAKYFFYSNIMNFFKTEITLANGEIRKRPLIETNGETGEIVWDKGRDFATVRKVLSMPQVNIVKKTEVQTGGFSKESILPKRNSDKLIARKKDWDPKKYGGFDSPTVAYSVLVVAKVEKGKSKKLKSVKELLGITIMERSSFEKNPIDFLEAKGYKEVKKDLIIKLPKYSLFELENGRKRMLASAGELQKGNELALPSKYVNFLYLASHYEKLKGSPEDNEQKQLFVEQHKHYLDEIIEQISEFSKRVILADANLDKVLSAYNKHRDKPIREQAENIIHLFTLTNLGAPAAFKYFDTTIDRKRYTSTKEVLDATLIHQSITGLYETRIDLSQLGGDGGGSSPAPGGSGGTLQLDDEYRLYSPLVKPDQNIQFWLEQFPQAWAETAGMGLAKQVPPQVIQLKASATPVSVRQYPLSKEAQEGIRPHVQRLIQQGILVPVQSPWNTPLLPVRKPGTNDYRPVQDLREVNKRVQDIHPTVPNPYNLLCALPPQRSWYTVLDLKDAFFCLRLHPTSQPLFAFEWRDPGTGRTGQLTWTRLPQGFKNSPTIFNEALHRDLANFRIQHPQVTLLQYVDDLLLAGATKQDCLEGTKALLLELSDLGYRASAKKAQICRREVTYLGYSLRDGQRWLTEARKKTVVQIPAPTTAKQVREFLGTAGFCRLWIPGFATLAAPLYPLTKPKGEFSWAPEHQKAFDAIKKALLSAPALALPDVTKPFTLYVDERKGVARGVLTQTLGPWRRPVAYLSKKLDPVASGWPVCLKAIAAVAILVKDADKLTLGQNITVIAPHALENIVRQPPDRWMTNARMTHYQSLLLTERVTFAPPAALNPATLLPEETDEPVTHDCHQLLIEETGVRKDLTDIPLTGEVLTWFTDGSSYVVEGKRMAGAAVVDGTRTIWASSLPEGTSAQKAELMALTQALRLAEGKSINIYTDSRYAFATAHVHGAIYKQRGWLTSAGREIKNKEEILSLLEALHLPKRLAIIHCPGHQKAKDPISRGNQMADRVAKQAAQGVNLLAGKRTADGSEFEKRTADGSEFESPKKKAKVE

SEQ ID NO: 172 - protein, 2090 aa, synthetic construct
  source 1..2090: note = Description of Artificial Sequence: Synthetic polypeptide
MPAAKRVKLDGGDKKYSIGLDIGTNSVGWAVITDEYKVPSKKFKVLGNTDRHSIKKNLIGALLFDSGETAEATRLKRTARRRYTRRKNRICYLQEIFSNEMAKVDDSFFHRLEESFLVEEDKKHERHPIFGNIVDEVAYHEKYPTIYHLRKKLVDSTDKADLRLIYLALAHMIKFRGHFLIEGDLNPDNSDVDKLFIQLVQTYNQLFEENPINASGVDAKAILSARLSKSRRLENLIAQLPGEKKNGLFGNLIALSLGLTPNFKSNFDLAEDAKLQLSKDTYDDDLDNLLAQIGDQYADLFLAAKNLSDAILLSDILRVNTEITKAPLSASMIKRYDEHHQDLTLLKALVRQQLPEKYKEIFFDQSKNGYAGYIDGGASQEEFYKFIKPILEKMDGTEELLVKLNREDLLRKQRTFDNGSIPHQIHLGELHAILRRQEDFYPFLKDNREKIEKILTFRIPYYVGPLARGNSRFAWMTRKSEETITPWNFEEVVDKGASAQSFIERMTNFDKNLPNEKVLPKHSLLYEYFTVYNELTKVKYVTEGMRKPAFLSGEQKKAIVDLLFKTNRKVTVKQLKEDYFKKIECFDSVEISGVEDRFNASLGTYHDLLKIIKDKDFLDNEENEDILEDIVLTLTLFEDREMIEERLKTYAHLFDDKVMKQLKRRRYTGWGRLSRKLINGIRDKQSGKTILDFLKSDGFANRNFMQLIHDDSLTFKEDIQKAQVSGQGDSLHEHIANLAGSPAIKKGILQTVKVVDELVKVMGRHKPENIVIEMARENQTTQKGQKNSRERMKRIEEGIKELGSQILKEHPVENTQLQNEKLYLYYLQNGRDMYVDQELDINRLSDYDVDHIVPQSFLKDDSIDNKVLTRSDKARGKSDNVPSEEVVKKMKNYWRQLLNAKLITQRKFDNLTKAERGGLSELDKAGFIKRQLVETRQITKHVAQILDSRMNTKYDENDKLIREVKVITLKSKLVSDFRKDFQFYKVREINNYHHAHDAYLNAVVGTALIKKYPKLESEFVYGDYKVYDVRKMIAKSEQEIGKATAKYFFYSNIMNFFKTEITLANGEIRKRPLIETNGETGEIVWDKGRDFATVRKVLSMPQVNIVKKTEVQTGGFSKESILPKRNSDKLIARKKDWDPKKYGGFDSPTVAYSVLVVAKVEKGKSKKLKSVKELLGITIMERSSFEKNPIDFLEAKGYKEVKKDLIIKLPKYSLFELENGRKRMLASAGELQKGNELALPSKYVNFLYLASHYEKLKGSPEDNEQKQLFVEQHKHYLDEIIEQISEFSKRVILADANLDKVLSAYNKHRDKPIREQAENIIHLFTLTNLGAPAAFKYFDTTIDRKRYTSTKEVLDATLIHQSITGLYETRIDLSQLGGDGGGGSGGGEAAAKGGTLQLDDEYRLYSPLVKPDQNIQFWLEQFPQAWAETAGMGLAKQVPPQVIQLKASATPVSVRQYPLSKEAQEGIRPHVQRLIQQGILVPVQSPWNTPLLPVRKPGTNDYRPVQDLREVNKRVQDIHPTVPNPYNLLCALPPQRSWYTVLDLKDAFFCLRLHPTSQPLFAFEWRDPGTGRTGQLTWTRLPQGFKNSPTIFNEALHRDLANFRIQHPQVTLLQYVDDLLLAGATKQDCLEGTKALLLELSDLGYRASAKKAQICRREVTYLGYSLRDGQRWLTEARKKTVVQIPAPTTAKQVREFLGTAGFCRLWIPGFATLAAPLYPLTKPKGEFSWAPEHQKAFDAIKKALLSAPALALPDVTKPFTLYVDERKGVARGVLTQTLGPWRRPVAYLSKKLDPVASGWPVCLKAIAAVAILVKDADKLTLGQNITVIAPHALENIVRQPPDRWMTNARMTHYQSLLLTERVTFAPPAALNPATLLPEETDEPVTHDCHQLLIEETGVRKDLTDIPLTGEVLTWFTDGSSYVVEGKRMAGAAVVDGTRTIWASSLPEGTSAQKAELMALTQALRLAEGKSINIYTDSRYAFATAHVHGAIYKQRGWLTSAGREIKNKEEILSLLEALHLPKRLAIIHCPGHQKAKDPISRGNQMADRVAKQAAQGVNLLAGKRTADGSEFEKRTADGSEFESPKKKAKVE

SEQ ID NO: 173 - protein, 2088 aa, synthetic construct
  source 1..2088: note = Description of Artificial Sequence: Synthetic polypeptide
MPAAKRVKLDGGDKKYSIGLDIGTNSVGWAVITDEYKVPSKKFKVLGNTDRHSIKKNLIGALLFDSGETAEATRLKRTARRRYTRRKNRICYLQEIFSNEMAKVDDSFFHRLEESFLVEEDKKHERHPIFGNIVDEVAYHEKYPTIYHLRKKLVDSTDKADLRLIYLALAHMIKFRGHFLIEGDLNPDNSDVDKLFIQLVQTYNQLFEENPINASGVDAKAILSARLSKSRRLENLIAQLPGEKKNGLFGNLIALSLGLTPNFKSNFDLAEDAKLQLSKDTYDDDLDNLLAQIGDQYADLFLAAKNLSDAILLSDILRVNTEITKAPLSASMIKRYDEHHQDLTLLKALVRQQLPEKYKEIFFDQSKNGYAGYIDGGASQEEFYKFIKPILEKMDGTEELLVKLNREDLLRKQRTFDNGSIPHQIHLGELHAILRRQEDFYPFLKDNREKIEKILTFRIPYYVGPLARGNSRFAWMTRKSEETITPWNFEEVVDKGASAQSFIERMTNFDKNLPNEKVLPKHSLLYEYFTVYNELTKVKYVTEGMRKPAFLSGEQKKAIVDLLFKTNRKVTVKQLKEDYFKKIECFDSVEISGVEDRFNASLGTYHDLLKIIKDKDFLDNEENEDILEDIVLTLTLFEDREMIEERLKTYAHLFDDKVMKQLKRRRYTGWGRLSRKLINGIRDKQSGKTILDFLKSDGFANRNFMQLIHDDSLTFKEDIQKAQVSGQGDSLHEHIANLAGSPAIKKGILQTVKVVDELVKVMGRHKPENIVIEMARENQTTQKGQKNSRERMKRIEEGIKELGSQILKEHPVENTQLQNEKLYLYYLQNGRDMYVDQELDINRLSDYDVDHIVPQSFLKDDSIDNKVLTRSDKARGKSDNVPSEEVVKKMKNYWRQLLNAKLITQRKFDNLTKAERGGLSELDKAGFIKRQLVETRQITKHVAQILDSRMNTKYDENDKLIREVKVITLKSKLVSDFRKDFQFYKVREINNYHHAHDAYLNAVVGTALIKKYPKLESEFVYGDYKVYDVRKMIAKSEQEIGKATAKYFFYSNIMNFFKTEITLANGEIRKRPLIETNGETGEIVWDKGRDFATVRKVLSMPQVNIVKKTEVQTGGFSKESILPKRNSDKLIARKKDWDPKKYGGFDSPTVAYSVLVVAKVEKGKSKKLKSVKELLGITIMERSSFEKNPIDFLEAKGYKEVKKDLIIKLPKYSLFELENGRKRMLASAGELQKGNELALPSKYVNFLYLASHYEKLKGSPEDNEQKQLFVEQHKHYLDEIIEQISEFSKRVILADANLDKVLSAYNKHRDKPIREQAENIIHLFTLTNLGAPAAFKYFDTTIDRKRYTSTKEVLDATLIHQSITGLYETRIDLSQLGGDGGPAPGGGGGSGGTLQLDDEYRLYSPLVKPDQNIQFWLEQFPQAWAETAGMGLAKQVPPQVIQLKASATPVSVRQYPLSKEAQEGIRPHVQRLIQQGILVPVQSPWNTPLLPVRKPGTNDYRPVQDLREVNKRVQDIHPTVPNPYNLLCALPPQRSWYTVLDLKDAFFCLRLHPTSQPLFAFEWRDPGTGRTGQLTWTRLPQGFKNSPTIFNEALHRDLANFRIQHPQVTLLQYVDDLLLAGATKQDCLEGTKALLLELSDLGYRASAKKAQICRREVTYLGYSLRDGQRWLTEARKKTVVQIPAPTTAKQVREFLGTAGFCRLWIPGFATLAAPLYPLTKPKGEFSWAPEHQKAFDAIKKALLSAPALALPDVTKPFTLYVDERKGVARGVLTQTLGPWRRPVAYLSKKLDPVASGWPVCLKAIAAVAILVKDADKLTLGQNITVIAPHALENIVRQPPDRWMTNARMTHYQSLLLTERVTFAPPAALNPATLLPEETDEPVTHDCHQLLIEETGVRKDLTDIPLTGEVLTWFTDGSSYVVEGKRMAGAAVVDGTRTIWASSLPEGTSAQKAELMALTQALRLAEGKSINIYTDSRYAFATAHVHGAIYKQRGWLTSAGREIKNKEEILSLLEALHLPKRLAIIHCPGHQKAKDPISRGNQMADRVAKQAAQGVNLLAGKRTADGSEFEKRTADGSEFESPKKKAKVE

SEQ ID NO: 174 - protein, 2085 aa, synthetic construct
  source 1..2085: note = Description of Artificial Sequence: Synthetic polypeptide
MPAAKRVKLDGGDKKYSIGLDIGTNSVGWAVITDEYKVPSKKFKVLGNTDRHSIKKNLIGALLFDSGETAEATRLKRTARRRYTRRKNRICYLQEIFSNEMAKVDDSFFHRLEESFLVEEDKKHERHPIFGNIVDEVAYHEKYPTIYHLRKKLVDSTDKADLRLIYLALAHMIKFRGHFLIEGDLNPDNSDVDKLFIQLVQTYNQLFEENPINASGVDAKAILSARLSKSRRLENLIAQLPGEKKNGLFGNLIALSLGLTPNFKSNFDLAEDAKLQLSKDTYDDDLDNLLAQIGDQYADLFLAAKNLSDAILLSDILRVNTEITKAPLSASMIKRYDEHHQDLTLLKALVRQQLPEKYKEIFFDQSKNGYAGYIDGGASQEEFYKFIKPILEKMDGTEELLVKLNREDLLRKQRTFDNGSIPHQIHLGELHAILRRQEDFYPFLKDNREKIEKILTFRIPYYVGPLARGNSRFAWMTRKSEETITPWNFEEVVDKGASAQSFIERMTNFDKNLPNEKVLPKHSLLYEYFTVYNELTKVKYVTEGMRKPAFLSGEQKKAIVDLLFKTNRKVTVKQLKEDYFKKIECFDSVEISGVEDRFNASLGTYHDLLKIIKDKDFLDNEENEDILEDIVLTLTLFEDREMIEERLKTYAHLFDDKVMKQLKRRRYTGWGRLSRKLINGIRDKQSGKTILDFLKSDGFANRNFMQLIHDDSLTFKEDIQKAQVSGQGDSLHEHIANLAGSPAIKKGILQTVKVVDELVKVMGRHKPENIVIEMARENQTTQKGQKNSRERMKRIEEGIKELGSQILKEHPVENTQLQNEKLYLYYLQNGRDMYVDQELDINRLSDYDVDHIVPQSFLKDDSIDNKVLTRSDKARGKSDNVPSEEVVKKMKNYWRQLLNAKLITQRKFDNLTKAERGGLSELDKAGFIKRQLVETRQITKHVAQILDSRMNTKYDENDKLIREVKVITLKSKLVSDFRKDFQFYKVREINNYHHAHDAYLNAVVGTALIKKYPKLESEFVYGDYKVYDVRKMIAKSEQEIGKATAKYFFYSNIMNFFKTEITLANGEIRKRPLIETNGETGEIVWDKGRDFATVRKVLSMPQVNIVKKTEVQTGGFSKESILPKRNSDKLIARKKDWDPKKYGGFDSPTVAYSVLVVAKVEKGKSKKLKSVKELLGITIMERSSFEKNPIDFLEAKGYKEVKKDLIIKLPKYSLFELENGRKRMLASAGELQKGNELALPSKYVNFLYLASHYEKLKGSPEDNEQKQLFVEQHKHYLDEIIEQISEFSKRVILADANLDKVLSAYNKHRDKPIREQAENIIHLFTLTNLGAPAAFKYFDTTIDRKRYTSTKEVLDATLIHQSITGLYETRIDLSQLGGDGGGSSGGGGGTLQLDDEYRLYSPLVKPDQNIQFWLEQFPQAWAETAGMGLAKQVPPQVIQLKASATPVSVRQYPLSKEAQEGIRPHVQRLIQQGILVPVQSPWNTPLLPVRKPGTNDYRPVQDLREVNKRVQDIHPTVPNPYNLLCALPPQRSWYTVLDLKDAFFCLRLHPTSQPLFAFEWRDPGTGRTGQLTWTRLPQGFKNSPTIFNEALHRDLANFRIQHPQVTLLQYVDDLLLAGATKQDCLEGTKALLLELSDLGYRASAKKAQICRREVTYLGYSLRDGQRWLTEARKKTVVQIPAPTTAKQVREFLGTAGFCRLWIPGFATLAAPLYPLTKPKGEFSWAPEHQKAFDAIKKALLSAPALALPDVTKPFTLYVDERKGVARGVLTQTLGPWRRPVAYLSKKLDPVASGWPVCLKAIAAVAILVKDADKLTLGQNITVIAPHALENIVRQPPDRWMTNARMTHYQSLLLTERVTFAPPAALNPATLLPEETDEPVTHDCHQLLIEETGVRKDLTDIPLTGEVLTWFTDGSSYVVEGKRMAGAAVVDGTRTIWASSLPEGTSAQKAELMALTQALRLAEGKSINIYTDSRYAFATAHVHGAIYKQRGWLTSAGREIKNKEEILSLLEALHLPKRLAIIHCPGHQKAKDPISRGNQMADRVAKQAAQGVNLLAGKRTADGSEFEKRTADGSEFESPKKKAKVE

SEQ ID NO: 175 - protein, 2088 aa, synthetic construct
  source 1..2088: note = Description of Artificial Sequence: Synthetic polypeptide
MPAAKRVKLDGGDKKYSIGLDIGTNSVGWAVITDEYKVPSKKFKVLGNTDRHSIKKNLIGALLFDSGETAEATRLKRTARRRYTRRKNRICYLQEIFSNEMAKVDDSFFHRLEESFLVEEDKKHERHPIFGNIVDEVAYHEKYPTIYHLRKKLVDSTDKADLRLIYLALAHMIKFRGHFLIEGDLNPDNSDVDKLFIQLVQTYNQLFEENPINASGVDAKAILSARLSKSRRLENLIAQLPGEKKNGLFGNLIALSLGLTPNFKSNFDLAEDAKLQLSKDTYDDDLDNLLAQIGDQYADLFLAAKNLSDAILLSDILRVNTEITKAPLSASMIKRYDEHHQDLTLLKALVRQQLPEKYKEIFFDQSKNGYAGYIDGGASQEEFYKFIKPILEKMDGTEELLVKLNREDLLRKQRTFDNGSIPHQIHLGELHAILRRQEDFYPFLKDNREKIEKILTFRIPYYVGPLARGNSRFAWMTRKSEETITPWNFEEVVDKGASAQSFIERMTNFDKNLPNEKVLPKHSLLYEYFTVYNELTKVKYVTEGMRKPAFLSGEQKKAIVDLLFKTNRKVTVKQLKEDYFKKIECFDSVEISGVEDRFNASLGTYHDLLKIIKDKDFLDNEENEDILEDIVLTLTLFEDREMIEERLKTYAHLFDDKVMKQLKRRRYTGWGRLSRKLINGIRDKQSGKTILDFLKSDGFANRNFMQLIHDDSLTFKEDIQKAQVSGQGDSLHEHIANLAGSPAIKKGILQTVKVVDELVKVMGRHKPENIVIEMARENQTTQKGQKNSRERMKRIEEGIKELGSQILKEHPVENTQLQNEKLYLYYLQNGRDMYVDQELDINRLSDYDVDHIVPQSFLKDDSIDNKVLTRSDKARGKSDNVPSEEVVKKMKNYWRQLLNAKLITQRKFDNLTKAERGGLSELDKAGFIKRQLVETRQITKHVAQILDSRMNTKYDENDKLIREVKVITLKSKLVSDFRKDFQFYKVREINNYHHAHDAYLNAVVGTALIKKYPKLESEFVYGDYKVYDVRKMIAKSEQEIGKATAKYFFYSNIMNFFKTEITLANGEIRKRPLIETNGETGEIVWDKGRDFATVRKVLSMPQVNIVKKTEVQTGGFSKESILPKRNSDKLIARKKDWDPKKYGGFDSPTVAYSVLVVAKVEKGKSKKLKSVKELLGITIMERSSFEKNPIDFLEAKGYKEVKKDLIIKLPKYSLFELENGRKRMLASAGELQKGNELALPSKYVNFLYLASHYEKLKGSPEDNEQKQLFVEQHKHYLDEIIEQISEFSKRVILADANLDKVLSAYNKHRDKPIREQAENIIHLFTLTNLGAPAAFKYFDTTIDRKRYTSTKEVLDATLIHQSITGLYETRIDLSQLGGDGGGGSPAPGSSGGTLQLDDEYRLYSPLVKPDQNIQFWLEQFPQAWAETAGMGLAKQVPPQVIQLKASATPVSVRQYPLSKEAQEGIRPHVQRLIQQGILVPVQSPWNTPLLPVRKPGTNDYRPVQDLREVNKRVQDIHPTVPNPYNLLCALPPQRSWYTVLDLKDAFFCLRLHPTSQPLFAFEWRDPGTGRTGQLTWTRLPQGFKNSPTIFNEALHRDLANFRIQHPQVTLLQYVDDLLLAGATKQDCLEGTKALLLELSDLGYRASAKKAQICRREVTYLGYSLRDGQRWLTEARKKTVVQIPAPTTAKQVREFLGTAGFCRLWIPGFATLAAPLYPLTKPKGEFSWAPEHQKAFDAIKKALLSAPALALPDVTKPFTLYVDERKGVARGVLTQTLGPWRRPVAYLSKKLDPVASGWPVCLKAIAAVAILVKDADKLTLGQNITVIAPHALENIVRQPPDRWMTNARMTHYQSLLLTERVTFAPPAALNPATLLPEETDEPVTHDCHQLLIEETGVRKDLTDIPLTGEVLTWFTDGSSYVVEGKRMAGAAVVDGTRTIWASSLPEGTSAQKAELMALTQALRLAEGKSINIYTDSRYAFATAHVHGAIYKQRGWLTSAGREIKNKEEILSLLEALHLPKRLAIIHCPGHQKAKDPISRGNQMADRVAKQAAQGVNLLAGKRTADGSEFEKRTADGSEFESPKKKAKVE

SEQ ID NO: 176 - protein, 2085 aa, synthetic construct
  source 1..2085: note = Description of Artificial Sequence: Synthetic polypeptide
MPAAKRVKLDGGDKKYSIGLDIGTNSVGWAVITDEYKVPSKKFKVLGNTDRHSIKKNLIGALLFDSGETAEATRLKRTARRRYTRRKNRICYLQEIFSNEMAKVDDSFFHRLEESFLVEEDKKHERHPIFGNIVDEVAYHEKYPTIYHLRKKLVDSTDKADLRLIYLALAHMIKFRGHFLIEGDLNPDNSDVDKLFIQLVQTYNQLFEENPINASGVDAKAILSARLSKSRRLENLIAQLPGEKKNGLFGNLIALSLGLTPNFKSNFDLAEDAKLQLSKDTYDDDLDNLLAQIGDQYADLFLAAKNLSDAILLSDILRVNTEITKAPLSASMIKRYDEHHQDLTLLKALVRQQLPEKYKEIFFDQSKNGYAGYIDGGASQEEFYKFIKPILEKMDGTEELLVKLNREDLLRKQRTFDNGSIPHQIHLGELHAILRRQEDFYPFLKDNREKIEKILTFRIPYYVGPLARGNSRFAWMTRKSEETITPWNFEEVVDKGASAQSFIERMTNFDKNLPNEKVLPKHSLLYEYFTVYNELTKVKYVTEGMRKPAFLSGEQKKAIVDLLFKTNRKVTVKQLKEDYFKKIECFDSVEISGVEDRFNASLGTYHDLLKIIKDKDFLDNEENEDILEDIVLTLTLFEDREMIEERLKTYAHLFDDKVMKQLKRRRYTGWGRLSRKLINGIRDKQSGKTILDFLKSDGFANRNFMQLIHDDSLTFKEDIQKAQVSGQGDSLHEHIANLAGSPAIKKGILQTVKVVDELVKVMGRHKPENIVIEMARENQTTQKGQKNSRERMKRIEEGIKELGSQILKEHPVENTQLQNEKLYLYYLQNGRDMYVDQELDINRLSDYDVDHIVPQSFLKDDSIDNKVLTRSDKARGKSDNVPSEEVVKKMKNYWRQLLNAKLITQRKFDNLTKAERGGLSELDKAGFIKRQLVETRQITKHVAQILDSRMNTKYDENDKLIREVKVITLKSKLVSDFRKDFQFYKVREINNYHHAHDAYLNAVVGTALIKKYPKLESEFVYGDYKVYDVRKMIAKSEQEIGKATAKYFFYSNIMNFFKTEITLANGEIRKRPLIETNGETGEIVWDKGRDFATVRKVLSMPQVNIVKKTEVQTGGFSKESILPKRNSDKLIARKKDWDPKKYGGFDSPTVAYSVLVVAKVEKGKSKKLKSVKELLGITIMERSSFEKNPIDFLEAKGYKEVKKDLIIKLPKYSLFELENGRKRMLASAGELQKGNELALPSKYVNFLYLASHYEKLKGSPEDNEQKQLFVEQHKHYLDEIIEQISEFSKRVILADANLDKVLSAYNKHRDKPIREQAENIIHLFTLTNLGAPAAFKYFDTTIDRKRYTSTKEVLDATLIHQSITGLYETRIDLSQLGGDGGGGSGSSGGTLQLDDEYRLYSPLVKPDQNIQFWLEQFPQAWAETAGMGLAKQVPPQVIQLKASATPVSVRQYPLSKEAQEGIRPHVQRLIQQGILVPVQSPWNTPLLPVRKPGTNDYRPVQDLREVNKRVQDIHPTVPNPYNLLCALPPQRSWYTVLDLKDAFFCLRLHPTSQPLFAFEWRDPGTGRTGQLTWTRLPQGFKNSPTIFNEALHRDLANFRIQHPQVTLLQYVDDLLLAGATKQDCLEGTKALLLELSDLGYRASAKKAQICRREVTYLGYSLRDGQRWLTEARKKTVVQIPAPTTAKQVREFLGTAGFCRLWIPGFATLAAPLYPLTKPKGEFSWAPEHQKAFDAIKKALLSAPALALPDVTKPFTLYVDERKGVARGVLTQTLGPWRRPVAYLSKKLDPVASGWPVCLKAIAAVAILVKDADKLTLGQNITVIAPHALENIVRQPPDRWMTNARMTHYQSLLLTERVTFAPPAALNPATLLPEETDEPVTHDCHQLLIEETGVRKDLTDIPLTGEVLTWFTDGSSYVVEGKRMAGAAVVDGTRTIWASSLPEGTSAQKAELMALTQALRLAEGKSINIYTDSRYAFATAHVHGAIYKQRGWLTSAGREIKNKEEILSLLEALHLPKRLAIIHCPGHQKAKDPISRGNQMADRVAKQAAQGVNLLAGKRTADGSEFEKRTADGSEFESPKKKAKVE

SEQ ID NO: 177 - protein, 2082 aa, synthetic construct
  source 1..2082: note = Description of Artificial Sequence: Synthetic polypeptide
MPAAKRVKLDGGDKKYSIGLDIGTNSVGWAVITDEYKVPSKKFKVLGNTDRHSIKKNLIGALLFDSGETAEATRLKRTARRRYTRRKNRICYLQEIFSNEMAKVDDSFFHRLEESFLVEEDKKHERHPIFGNIVDEVAYHEKYPTIYHLRKKLVDSTDKADLRLIYLALAHMIKFRGHFLIEGDLNPDNSDVDKLFIQLVQTYNQLFEENPINASGVDAKAILSARLSKSRRLENLIAQLPGEKKNGLFGNLIALSLGLTPNFKSNFDLAEDAKLQLSKDTYDDDLDNLLAQIGDQYADLFLAAKNLSDAILLSDILRVNTEITKAPLSASMIKRYDEHHQDLTLLKALVRQQLPEKYKEIFFDQSKNGYAGYIDGGASQEEFYKFIKPILEKMDGTEELLVKLNREDLLRKQRTFDNGSIPHQIHLGELHAILRRQEDFYPFLKDNREKIEKILTFRIPYYVGPLARGNSRFAWMTRKSEETITPWNFEEVVDKGASAQSFIERMTNFDKNLPNEKVLPKHSLLYEYFTVYNELTKVKYVTEGMRKPAFLSGEQKKAIVDLLFKTNRKVTVKQLKEDYFKKIECFDSVEISGVEDRFNASLGTYHDLLKIIKDKDFLDNEENEDILEDIVLTLTLFEDREMIEERLKTYAHLFDDKVMKQLKRRRYTGWGRLSRKLINGIRDKQSGKTILDFLKSDGFANRNFMQLIHDDSLTFKEDIQKAQVSGQGDSLHEHIANLAGSPAIKKGILQTVKVVDELVKVMGRHKPENIVIEMARENQTTQKGQKNSRERMKRIEEGIKELGSQILKEHPVENTQLQNEKLYLYYLQNGRDMYVDQELDINRLSDYDVDHIVPQSFLKDDSIDNKVLTRSDKARGKSDNVPSEEVVKKMKNYWRQLLNAKLITQRKFDNLTKAERGGLSELDKAGFIKRQLVETRQITKHVAQILDSRMNTKYDENDKLIREVKVITLKSKLVSDFRKDFQFYKVREINNYHHAHDAYLNAVVGTALIKKYPKLESEFVYGDYKVYDVRKMIAKSEQEIGKATAKYFFYSNIMNFFKTEITLANGEIRKRPLIETNGETGEIVWDKGRDFATVRKVLSMPQVNIVKKTEVQTGGFSKESILPKRNSDKLIARKKDWDPKKYGGFDSPTVAYSVLVVAKVEKGKSKKLKSVKELLGITIMERSSFEKNPIDFLEAKGYKEVKKDLIIKLPKYSLFELENGRKRMLASAGELQKGNELALPSKYVNFLYLASHYEKLKGSPEDNEQKQLFVEQHKHYLDEIIEQISEFSKRVILADANLDKVLSAYNKHRDKPIREQAENIIHLFTLTNLGAPAAFKYFDTTIDRKRYTSTKEVLDATLIHQSITGLYETRIDLSQLGGDGGPAPGGTLQLDDEYRLYSPLVKPDQNIQFWLEQFPQAWAETAGMGLAKQVPPQVIQLKASATPVSVRQYPLSKEAQEGIRPHVQRLIQQGILVPVQSPWNTPLLPVRKPGTNDYRPVQDLREVNKRVQDIHPTVPNPYNLLCALPPQRSWYTVLDLKDAFFCLRLHPTSQPLFAFEWRDPGTGRTGQLTWTRLPQGFKNSPTIFNEALHRDLANFRIQHPQVTLLQYVDDLLLAGATKQDCLEGTKALLLELSDLGYRASAKKAQICRREVTYLGYSLRDGQRWLTEARKKTVVQIPAPTTAKQVREFLGTAGFCRLWIPGFATLAAPLYPLTKPKGEFSWAPEHQKAFDAIKKALLSAPALALPDVTKPFTLYVDERKGVARGVLTQTLGPWRRPVAYLSKKLDPVASGWPVCLKAIAAVAILVKDADKLTLGQNITVIAPHALENIVRQPPDRWMTNARMTHYQSLLLTERVTFAPPAALNPATLLPEETDEPVTHDCHQLLIEETGVRKDLTDIPLTGEVLTWFTDGSSYVVEGKRMAGAAVVDGTRTIWASSLPEGTSAQKAELMALTQALRLAEGKSINIYTDSRYAFATAHVHGAIYKQRGWLTSAGREIKNKEEILSLLEALHLPKRLAIIHCPGHQKAKDPISRGNQMADRVAKQAAQGVNLLAGKRTADGSEFEKRTADGSEFESPKKKAKVE

SEQ ID NO: 178 - protein, 2085 aa, synthetic construct
  source 1..2085: note = Description of Artificial Sequence: Synthetic polypeptide
MPAAKRVKLDGGDKKYSIGLDIGTNSVGWAVITDEYKVPSKKFKVLGNTDRHSIKKNLIGALLFDSGETAEATRLKRTARRRYTRRKNRICYLQEIFSNEMAKVDDSFFHRLEESFLVEEDKKHERHPIFGNIVDEVAYHEKYPTIYHLRKKLVDSTDKADLRLIYLALAHMIKFRGHFLIEGDLNPDNSDVDKLFIQLVQTYNQLFEENPINASGVDAKAILSARLSKSRRLENLIAQLPGEKKNGLFGNLIALSLGLTPNFKSNFDLAEDAKLQLSKDTYDDDLDNLLAQIGDQYADLFLAAKNLSDAILLSDILRVNTEITKAPLSASMIKRYDEHHQDLTLLKALVRQQLPEKYKEIFFDQSKNGYAGYIDGGASQEEFYKFIKPILEKMDGTEELLVKLNREDLLRKQRTFDNGSIPHQIHLGELHAILRRQEDFYPFLKDNREKIEKILTFRIPYYVGPLARGNSRFAWMTRKSEETITPWNFEEVVDKGASAQSFIERMTNFDKNLPNEKVLPKHSLLYEYFTVYNELTKVKYVTEGMRKPAFLSGEQKKAIVDLLFKTNRKVTVKQLKEDYFKKIECFDSVEISGVEDRFNASLGTYHDLLKIIKDKDFLDNEENEDILEDIVLTLTLFEDREMIEERLKTYAHLFDDKVMKQLKRRRYTGWGRLSRKLINGIRDKQSGKTILDFLKSDGFANRNFMQLIHDDSLTFKEDIQKAQVSGQGDSLHEHIANLAGSPAIKKGILQTVKVVDELVKVMGRHKPENIVIEMARENQTTQKGQKNSRERMKRIEEGIKELGSQILKEHPVENTQLQNEKLYLYYLQNGRDMYVDQELDINRLSDYDVDHIVPQSFLKDDSIDNKVLTRSDKARGKSDNVPSEEVVKKMKNYWRQLLNAKLITQRKFDNLTKAERGGLSELDKAGFIKRQLVETRQITKHVAQILDSRMNTKYDENDKLIREVKVITLKSKLVSDFRKDFQFYKVREINNYHHAHDAYLNAVVGTALIKKYPKLESEFVYGDYKVYDVRKMIAKSEQEIGKATAKYFFYSNIMNFFKTEITLANGEIRKRPLIETNGETGEIVWDKGRDFATVRKVLSMPQVNIVKKTEVQTGGFSKESILPKRNSDKLIARKKDWDPKKYGGFDSPTVAYSVLVVAKVEKGKSKKLKSVKELLGITIMERSSFEKNPIDFLEAKGYKEVKKDLIIKLPKYSLFELENGRKRMLASAGELQKGNELALPSKYVNFLYLASHYEKLKGSPEDNEQKQLFVEQHKHYLDEIIEQISEFSKRVILADANLDKVLSAYNKHRDKPIREQAENIIHLFTLTNLGAPAAFKYFDTTIDRKRYTSTKEVLDATLIHQSITGLYETRIDLSQLGGDGGGSSGSSGGTLQLDDEYRLYSPLVKPDQNIQFWLEQFPQAWAETAGMGLAKQVPPQVIQLKASATPVSVRQYPLSKEAQEGIRPHVQRLIQQGILVPVQSPWNTPLLPVRKPGTNDYRPVQDLREVNKRVQDIHPTVPNPYNLLCALPPQRSWYTVLDLKDAFFCLRLHPTSQPLFAFEWRDPGTGRTGQLTWTRLPQGFKNSPTIFNEALHRDLANFRIQHPQVTLLQYVDDLLLAGATKQDCLEGTKALLLELSDLGYRASAKKAQICRREVTYLGYSLRDGQRWLTEARKKTVVQIPAPTTAKQVREFLGTAGFCRLWIPGFATLAAPLYPLTKPKGEFSWAPEHQKAFDAIKKALLSAPALALPDVTKPFTLYVDERKGVARGVLTQTLGPWRRPVAYLSKKLDPVASGWPVCLKAIAAVAILVKDADKLTLGQNITVIAPHALENIVRQPPDRWMTNARMTHYQSLLLTERVTFAPPAALNPATLLPEETDEPVTHDCHQLLIEETGVRKDLTDIPLTGEVLTWFTDGSSYVVEGKRMAGAAVVDGTRTIWASSLPEGTSAQKAELMALTQALRLAEGKSINIYTDSRYAFATAHVHGAIYKQRGWLTSAGREIKNKEEILSLLEALHLPKRLAIIHCPGHQKAKDPISRGNQMADRVAKQAAQGVNLLAGKRTADGSEFEKRTADGSEFESPKKKAKVE

SEQ ID NO: 179 - protein, 2085 aa, synthetic construct
  source 1..2085: note = Description of Artificial Sequence: Synthetic polypeptide
MPAAKRVKLDGGDKKYSIGLDIGTNSVGWAVITDEYKVPSKKFKVLGNTDRHSIKKNLIGALLFDSGETAEATRLKRTARRRYTRRKNRICYLQEIFSNEMAKVDDSFFHRLEESFLVEEDKKHERHPIFGNIVDEVAYHEKYPTIYHLRKKLVDSTDKADLRLIYLALAHMIKFRGHFLIEGDLNPDNSDVDKLFIQLVQTYNQLFEENPINASGVDAKAILSARLSKSRRLENLIAQLPGEKKNGLFGNLIALSLGLTPNFKSNFDLAEDAKLQLSKDTYDDDLDNLLAQIGDQYADLFLAAKNLSDAILLSDILRVNTEITKAPLSASMIKRYDEHHQDLTLLKALVRQQLPEKYKEIFFDQSKNGYAGYIDGGASQEEFYKFIKPILEKMDGTEELLVKLNREDLLRKQRTFDNGSIPHQIHLGELHAILRRQEDFYPFLKDNREKIEKILTFRIPYYVGPLARGNSRFAWMTRKSEETITPWNFEEVVDKGASAQSFIERMTNFDKNLPNEKVLPKHSLLYEYFTVYNELTKVKYVTEGMRKPAFLSGEQKKAIVDLLFKTNRKVTVKQLKEDYFKKIECFDSVEISGVEDRFNASLGTYHDLLKIIKDKDFLDNEENEDILEDIVLTLTLFEDREMIEERLKTYAHLFDDKVMKQLKRRRYTGWGRLSRKLINGIRDKQSGKTILDFLKSDGFANRNFMQLIHDDSLTFKEDIQKAQVSGQGDSLHEHIANLAGSPAIKKGILQTVKVVDELVKVMGRHKPENIVIEMARENQTTQKGQKNSRERMKRIEEGIKELGSQILKEHPVENTQLQNEKLYLYYLQNGRDMYVDQELDINRLSDYDVDHIVPQSFLKDDSIDNKVLTRSDKARGKSDNVPSEEVVKKMKNYWRQLLNAKLITQRKFDNLTKAERGGLSELDKAGFIKRQLVETRQITKHVAQILDSRMNTKYDENDKLIREVKVITLKSKLVSDFRKDFQFYKVREINNYHHAHDAYLNAVVGTALIKKYPKLESEFVYGDYKVYDVRKMIAKSEQEIGKATAKYFFYSNIMNFFKTEITLANGEIRKRPLIETNGETGEIVWDKGRDFATVRKVLSMPQVNIVKKTEVQTGGFSKESILPKRNSDKLIARKKDWDPKKYGGFDSPTVAYSVLVVAKVEKGKSKKLKSVKELLGITIMERSSFEKNPIDFLEAKGYKEVKKDLIIKLPKYSLFELENGRKRMLASAGELQKGNELALPSKYVNFLYLASHYEKLKGSPEDNEQKQLFVEQHKHYLDEIIEQISEFSKRVILADANLDKVLSAYNKHRDKPIREQAENIIHLFTLTNLGAPAAFKYFDTTIDRKRYTSTKEVLDATLIHQSITGLYETRIDLSQLGGDGGGGGGGSGGTLQLDDEYRLYSPLVKPDQNIQFWLEQFPQAWAETAGMGLAKQVPPQVIQLKASATPVSVRQYPLSKEAQEGIRPHVQRLIQQGILVPVQSPWNTPLLPVRKPGTNDYRPVQDLREVNKRVQDIHPTVPNPYNLLCALPPQRSWYTVLDLKDAFFCLRLHPTSQPLFAFEWRDPGTGRTGQLTWTRLPQGFKNSPTIFNEALHRDLANFRIQHPQVTLLQYVDDLLLAGATKQDCLEGTKALLLELSDLGYRASAKKAQICRREVTYLGYSLRDGQRWLTEARKKTVVQIPAPTTAKQVREFLGTAGFCRLWIPGFATLAAPLYPLTKPKGEFSWAPEHQKAFDAIKKALLSAPALALPDVTKPFTLYVDERKGVARGVLTQTLGPWRRPVAYLSKKLDPVASGWPVCLKAIAAVAILVKDADKLTLGQNITVIAPHALENIVRQPPDRWMTNARMTHYQSLLLTERVTFAPPAALNPATLLPEETDEPVTHDCHQLLIEETGVRKDLTDIPLTGEVLTWFTDGSSYVVEGKRMAGAAVVDGTRTIWASSLPEGTSAQKAELMALTQALRLAEGKSINIYTDSRYAFATAHVHGAIYKQRGWLTSAGREIKNKEEILSLLEALHLPKRLAIIHCPGHQKAKDPISRGNQMADRVAKQAAQGVNLLAGKRTADGSEFEKRTADGSEFESPKKKAKVE

SEQ ID NO: 180 - protein, 2088 aa, synthetic construct
  source 1..2088: note = Description of Artificial Sequence: Synthetic polypeptide
MPAAKRVKLDGGDKKYSIGLDIGTNSVGWAVITDEYKVPSKKFKVLGNTDRHSIKKNLIGALLFDSGETAEATRLKRTARRRYTRRKNRICYLQEIFSNEMAKVDDSFFHRLEESFLVEEDKKHERHPIFGNIVDEVAYHEKYPTIYHLRKKLVDSTDKADLRLIYLALAHMIKFRGHFLIEGDLNPDNSDVDKLFIQLVQTYNQLFEENPINASGVDAKAILSARLSKSRRLENLIAQLPGEKKNGLFGNLIALSLGLTPNFKSNFDLAEDAKLQLSKDTYDDDLDNLLAQIGDQYADLFLAAKNLSDAILLSDILRVNTEITKAPLSASMIKRYDEHHQDLTLLKALVRQQLPEKYKEIFFDQSKNGYAGYIDGGASQEEFYKFIKPILEKMDGTEELLVKLNREDLLRKQRTFDNGSIPHQIHLGELHAILRRQEDFYPFLKDNREKIEKILTFRIPYYVGPLARGNSRFAWMTRKSEETITPWNFEEVVDKGASAQSFIERMTNFDKNLPNEKVLPKHSLLYEYFTVYNELTKVKYVTEGMRKPAFLSGEQKKAIVDLLFKTNRKVTVKQLKEDYFKKIECFDSVEISGVEDRFNASLGTYHDLLKIIKDKDFLDNEENEDILEDIVLTLTLFEDREMIEERLKTYAHLFDDKVMKQLKRRRYTGWGRLSRKLINGIRDKQSGKTILDFLKSDGFANRNFMQLIHDDSLTFKEDIQKAQVSGQGDSLHEHIANLAGSPAIKKGILQTVKVVDELVKVMGRHKPENIVIEMARENQTTQKGQKNSRERMKRIEEGIKELGSQILKEHPVENTQLQNEKLYLYYLQNGRDMYVDQELDINRLSDYDVDHIVPQSFLKDDSIDNKVLTRSDKARGKSDNVPSEEVVKKMKNYWRQLLNAKLITQRKFDNLTKAERGGLSELDKAGFIKRQLVETRQITKHVAQILDSRMNTKYDENDKLIREVKVITLKSKLVSDFRKDFQFYKVREINNYHHAHDAYLNAVVGTALIKKYPKLESEFVYGDYKVYDVRKMIAKSEQEIGKATAKYFFYSNIMNFFKTEITLANGEIRKRPLIETNGETGEIVWDKGRDFATVRKVLSMPQVNIVKKTEVQTGGFSKESILPKRNSDKLIARKKDWDPKKYGGFDSPTVAYSVLVVAKVEKGKSKKLKSVKELLGITIMERSSFEKNPIDFLEAKGYKEVKKDLIIKLPKYSLFELENGRKRMLASAGELQKGNELALPSKYVNFLYLASHYEKLKGSPEDNEQKQLFVEQHKHYLDEIIEQISEFSKRVILADANLDKVLSAYNKHRDKPIREQAENIIHLFTLTNLGAPAAFKYFDTTIDRKRYTSTKEVLDATLIHQSITGLYETRIDLSQLGGDGGGGGGSSGGSGGTLQLDDEYRLYSPLVKPDQNIQFWLEQFPQAWAETAGMGLAKQVPPQVIQLKASATPVSVRQYPLSKEAQEGIRPHVQRLIQQGILVPVQSPWNTPLLPVRKPGTNDYRPVQDLREVNKRVQDIHPTVPNPYNLLCALPPQRSWYTVLDLKDAFFCLRLHPTSQPLFAFEWRDPGTGRTGQLTWTRLPQGFKNSPTIFNEALHRDLANFRIQHPQVTLLQYVDDLLLAGATKQDCLEGTKALLLELSDLGYRASAKKAQICRREVTYLGYSLRDGQRWLTEARKKTVVQIPAPTTAKQVREFLGTAGFCRLWIPGFATLAAPLYPLTKPKGEFSWAPEHQKAFDAIKKALLSAPALALPDVTKPFTLYVDERKGVARGVLTQTLGPWRRPVAYLSKKLDPVASGWPVCLKAIAAVAILVKDADKLTLGQNITVIAPHALENIVRQPPDRWMTNARMTHYQSLLLTERVTFAPPAALNPATLLPEETDEPVTHDCHQLLIEETGVRKDLTDIPLTGEVLTWFTDGSSYVVEGKRMAGAAVVDGTRTIWASSLPEGTSAQKAELMALTQALRLAEGKSINIYTDSRYAFATAHVHGAIYKQRGWLTSAGREIKNKEEILSLLEALHLPKRLAIIHCPGHQKAKDPISRGNQMADRVAKQAAQGVNLLAGKRTADGSEFEKRTADGSEFESPKKKAKVE

SEQ ID NO: 181 - protein, 2088 aa, synthetic construct
  source 1..2088: note = Description of Artificial Sequence: Synthetic polypeptide
MPAAKRVKLDGGDKKYSIGLDIGTNSVGWAVITDEYKVPSKKFKVLGNTDRHSIKKNLIGALLFDSGETAEATRLKRTARRRYTRRKNRICYLQEIFSNEMAKVDDSFFHRLEESFLVEEDKKHERHPIFGNIVDEVAYHEKYPTIYHLRKKLVDSTDKADLRLIYLALAHMIKFRGHFLIEGDLNPDNSDVDKLFIQLVQTYNQLFEENPINASGVDAKAILSARLSKSRRLENLIAQLPGEKKNGLFGNLIALSLGLTPNFKSNFDLAEDAKLQLSKDTYDDDLDNLLAQIGDQYADLFLAAKNLSDAILLSDILRVNTEITKAPLSASMIKRYDEHHQDLTLLKALVRQQLPEKYKEIFFDQSKNGYAGYIDGGASQEEFYKFIKPILEKMDGTEELLVKLNREDLLRKQRTFDNGSIPHQIHLGELHAILRRQEDFYPFLKDNREKIEKILTFRIPYYVGPLARGNSRFAWMTRKSEETITPWNFEEVVDKGASAQSFIERMTNFDKNLPNEKVLPKHSLLYEYFTVYNELTKVKYVTEGMRKPAFLSGEQKKAIVDLLFKTNRKVTVKQLKEDYFKKIECFDSVEISGVEDRFNASLGTYHDLLKIIKDKDFLDNEENEDILEDIVLTLTLFEDREMIEERLKTYAHLFDDKVMKQLKRRRYTGWGRLSRKLINGIRDKQSGKTILDFLKSDGFANRNFMQLIHDDSLTFKEDIQKAQVSGQGDSLHEHIANLAGSPAIKKGILQTVKVVDELVKVMGRHKPENIVIEMARENQTTQKGQKNSRERMKRIEEGIKELGSQILKEHPVENTQLQNEKLYLYYLQNGRDMYVDQELDINRLSDYDVDHIVPQSFLKDDSIDNKVLTRSDKARGKSDNVPSEEVVKKMKNYWRQLLNAKLITQRKFDNLTKAERGGLSELDKAGFIKRQLVETRQITKHVAQILDSRMNTKYDENDKLIREVKVITLKSKLVSDFRKDFQFYKVREINNYHHAHDAYLNAVVGTALIKKYPKLESEFVYGDYKVYDVRKMIAKSEQEIGKATAKYFFYSNIMNFFKTEITLANGEIRKRPLIETNGETGEIVWDKGRDFATVRKVLSMPQVNIVKKTEVQTGGFSKESILPKRNSDKLIARKKDWDPKKYGGFDSPTVAYSVLVVAKVEKGKSKKLKSVKELLGITIMERSSFEKNPIDFLEAKGYKEVKKDLIIKLPKYSLFELENGRKRMLASAGELQKGNELALPSKYVNFLYLASHYEKLKGSPEDNEQKQLFVEQHKHYLDEIIEQISEFSKRVILADANLDKVLSAYNKHRDKPIREQAENIIHLFTLTNLGAPAAFKYFDTTIDRKRYTSTKEVLDATLIHQSITGLYETRIDLSQLGGDGGGSSGSSGSSGGTLQLDDEYRLYSPLVKPDQNIQFWLEQFPQAWAETAGMGLAKQVPPQVIQLKASATPVSVRQYPLSKEAQEGIRPHVQRLIQQGILVPVQSPWNTPLLPVRKPGTNDYRPVQDLREVNKRVQDIHPTVPNPYNLLCALPPQRSWYTVLDLKDAFFCLRLHPTSQPLFAFEWRDPGTGRTGQLTWTRLPQGFKNSPTIFNEALHRDLANFRIQHPQVTLLQYVDDLLLAGATKQDCLEGTKALLLELSDLGYRASAKKAQICRREVTYLGYSLRDGQRWLTEARKKTVVQIPAPTTAKQVREFLGTAGFCRLWIPGFATLAAPLYPLTKPKGEFSWAPEHQKAFDAIKKALLSAPALALPDVTKPFTLYVDERKGVARGVLTQTLGPWRRPVAYLSKKLDPVASGWPVCLKAIAAVAILVKDADKLTLGQNITVIAPHALENIVRQPPDRWMTNARMTHYQSLLLTERVTFAPPAALNPATLLPEETDEPVTHDCHQLLIEETGVRKDLTDIPLTGEVLTWFTDGSSYVVEGKRMAGAAVVDGTRTIWASSLPEGTSAQKAELMALTQALRLAEGKSINIYTDSRYAFATAHVHGAIYKQRGWLTSAGREIKNKEEILSLLEALHLPKRLAIIHCPGHQKAKDPISRGNQMADRVAKQAAQGVNLLAGKRTADGSEFEKRTADGSEFESPKKKAKVE

SEQ ID NO: 182 - protein, 2088 aa, synthetic construct
  source 1..2088: note = Description of Artificial Sequence: Synthetic polypeptide
MPAAKRVKLDGGDKKYSIGLDIGTNSVGWAVITDEYKVPSKKFKVLGNTDRHSIKKNLIGALLFDSGETAEATRLKRTARRRYTRRKNRICYLQEIFSNEMAKVDDSFFHRLEESFLVEEDKKHERHPIFGNIVDEVAYHEKYPTIYHLRKKLVDSTDKADLRLIYLALAHMIKFRGHFLIEGDLNPDNSDVDKLFIQLVQTYNQLFEENPINASGVDAKAILSARLSKSRRLENLIAQLPGEKKNGLFGNLIALSLGLTPNFKSNFDLAEDAKLQLSKDTYDDDLDNLLAQIGDQYADLFLAAKNLSDAILLSDILRVNTEITKAPLSASMIKRYDEHHQDLTLLKALVRQQLPEKYKEIFFDQSKNGYAGYIDGGASQEEFYKFIKPILEKMDGTEELLVKLNREDLLRKQRTFDNGSIPHQIHLGELHAILRRQEDFYPFLKDNREKIEKILTFRIPYYVGPLARGNSRFAWMTRKSEETITPWNFEEVVDKGASAQSFIERMTNFDKNLPNEKVLPKHSLLYEYFTVYNELTKVKYVTEGMRKPAFLSGEQKKAIVDLLFKTNRKVTVKQLKEDYFKKIECFDSVEISGVEDRFNASLGTYHDLLKIIKDKDFLDNEENEDILEDIVLTLTLFEDREMIEERLKTYAHLFDDKVMKQLKRRRYTGWGRLSRKLINGIRDKQSGKTILDFLKSDGFANRNFMQLIHDDSLTFKEDIQKAQVSGQGDSLHEHIANLAGSPAIKKGILQTVKVVDELVKVMGRHKPENIVIEMARENQTTQKGQKNSRERMKRIEEGIKELGSQILKEHPVENTQLQNEKLYLYYLQNGRDMYVDQELDINRLSDYDVDHIVPQSFLKDDSIDNKVLTRSDKARGKSDNVPSEEVVKKMKNYWRQLLNAKLITQRKFDNLTKAERGGLSELDKAGFIKRQLVETRQITKHVAQILDSRMNTKYDENDKLIREVKVITLKSKLVSDFRKDFQFYKVREINNYHHAHDAYLNAVVGTALIKKYPKLESEFVYGDYKVYDVRKMIAKSEQEIGKATAKYFFYSNIMNFFKTEITLANGEIRKRPLIETNGETGEIVWDKGRDFATVRKVLSMPQVNIVKKTEVQTGGFSKESILPKRNSDKLIARKKDWDPKKYGGFDSPTVAYSVLVVAKVEKGKSKKLKSVKELLGITIMERSSFEKNPIDFLEAKGYKEVKKDLIIKLPKYSLFELENGRKRMLASAGELQKGNELALPSKYVNFLYLASHYEKLKGSPEDNEQKQLFVEQHKHYLDEIIEQISEFSKRVILADANLDKVLSAYNKHRDKPIREQAENIIHLFTLTNLGAPAAFKYFDTTIDRKRYTSTKEVLDATLIHQSITGLYETRIDLSQLGGDGGGSSGGSGGGGGTLQLDDEYRLYSPLVKPDQNIQFWLEQFPQAWAETAGMGLAKQVPPQVIQLKASATPVSVRQYPLSKEAQEGIRPHVQRLIQQGILVPVQSPWNTPLLPVRKPGTNDYRPVQDLREVNKRVQDIHPTVPNPYNLLCALPPQRSWYTVLDLKDAFFCLRLHPTSQPLFAFEWRDPGTGRTGQLTWTRLPQGFKNSPTIFNEALHRDLANFRIQHPQVTLLQYVDDLLLAGATKQDCLEGTKALLLELSDLGYRASAKKAQICRREVTYLGYSLRDGQRWLTEARKKTVVQIPAPTTAKQVREFLGTAGFCRLWIPGFATLAAPLYPLTKPKGEFSWAPEHQKAFDAIKKALLSAPALALPDVTKPFTLYVDERKGVARGVLTQTLGPWRRPVAYLSKKLDPVASGWPVCLKAIAAVAILVKDADKLTLGQNITVIAPHALENIVRQPPDRWMTNARMTHYQSLLLTERVTFAPPAALNPATLLPEETDEPVTHDCHQLLIEETGVRKDLTDIPLTGEVLTWFTDGSSYVVEGKRMAGAAVVDGTRTIWASSLPEGTSAQKAELMALTQALRLAEGKSINIYTDSRYAFATAHVHGAIYKQRGWLTSAGREIKNKEEILSLLEALHLPKRLAIIHCPGHQKAKDPISRGNQMADRVAKQAAQGVNLLAGKRTADGSEFEKRTADGSEFESPKKKAKVE

SEQ ID NO: 183 - protein, 2085 aa, synthetic construct
  source 1..2085: note = Description of Artificial Sequence: Synthetic polypeptide
MPAAKRVKLDGGDKKYSIGLDIGTNSVGWAVITDEYKVPSKKFKVLGNTDRHSIKKNLIGALLFDSGETAEATRLKRTARRRYTRRKNRICYLQEIFSNEMAKVDDSFFHRLEESFLVEEDKKHERHPIFGNIVDEVAYHEKYPTIYHLRKKLVDSTDKADLRLIYLALAHMIKFRGHFLIEGDLNPDNSDVDKLFIQLVQTYNQLFEENPINASGVDAKAILSARLSKSRRLENLIAQLPGEKKNGLFGNLIALSLGLTPNFKSNFDLAEDAKLQLSKDTYDDDLDNLLAQIGDQYADLFLAAKNLSDAILLSDILRVNTEITKAPLSASMIKRYDEHHQDLTLLKALVRQQLPEKYKEIFFDQSKNGYAGYIDGGASQEEFYKFIKPILEKMDGTEELLVKLNREDLLRKQRTFDNGSIPHQIHLGELHAILRRQEDFYPFLKDNREKIEKILTFRIPYYVGPLARGNSRFAWMTRKSEETITPWNFEEVVDKGASAQSFIERMTNFDKNLPNEKVLPKHSLLYEYFTVYNELTKVKYVTEGMRKPAFLSGEQKKAIVDLLFKTNRKVTVKQLKEDYFKKIECFDSVEISGVEDRFNASLGTYHDLLKIIKDKDFLDNEENEDILEDIVLTLTLFEDREMIEERLKTYAHLFDDKVMKQLKRRRYTGWGRLSRKLINGIRDKQSGKTILDFLKSDGFANRNFMQLIHDDSLTFKEDIQKAQVSGQGDSLHEHIANLAGSPAIKKGILQTVKVVDELVKVMGRHKPENIVIEMARENQTTQKGQKNSRERMKRIEEGIKELGSQILKEHPVENTQLQNEKLYLYYLQNGRDMYVDQELDINRLSDYDVDHIVPQSFLKDDSIDNKVLTRSDKARGKSDNVPSEEVVKKMKNYWRQLLNAKLITQRKFDNLTKAERGGLSELDKAGFIKRQLVETRQITKHVAQILDSRMNTKYDENDKLIREVKVITLKSKLVSDFRKDFQFYKVREINNYHHAHDAYLNAVVGTALIKKYPKLESEFVYGDYKVYDVRKMIAKSEQEIGKATAKYFFYSNIMNFFKTEITLANGEIRKRPLIETNGETGEIVWDKGRDFATVRKVLSMPQVNIVKKTEVQTGGFSKESILPKRNSDKLIARKKDWDPKKYGGFDSPTVAYSVLVVAKVEKGKSKKLKSVKELLGITIMERSSFEKNPIDFLEAKGYKEVKKDLIIKLPKYSLFELENGRKRMLASAGELQKGNELALPSKYVNFLYLASHYEKLKGSPEDNEQKQLFVEQHKHYLDEIIEQISEFSKRVILADANLDKVLSAYNKHRDKPIREQAENIIHLFTLTNLGAPAAFKYFDTTIDRKRYTSTKEVLDATLIHQSITGLYETRIDLSQLGGDGGGGGGGGGGTLQLDDEYRLYSPLVKPDQNIQFWLEQFPQAWAETAGMGLAKQVPPQVIQLKASATPVSVRQYPLSKEAQEGIRPHVQRLIQQGILVPVQSPWNTPLLPVRKPGTNDYRPVQDLREVNKRVQDIHPTVPNPYNLLCALPPQRSWYTVLDLKDAFFCLRLHPTSQPLFAFEWRDPGTGRTGQLTWTRLPQGFKNSPTIFNEALHRDLANFRIQHPQVTLLQYVDDLLLAGATKQDCLEGTKALLLELSDLGYRASAKKAQICRREVTYLGYSLRDGQRWLTEARKKTVVQIPAPTTAKQVREFLGTAGFCRLWIPGFATLAAPLYPLTKPKGEFSWAPEHQKAFDAIKKALLSAPALALPDVTKPFTLYVDERKGVARGVLTQTLGPWRRPVAYLSKKLDPVASGWPVCLKAIAAVAILVKDADKLTLGQNITVIAPHALENIVRQPPDRWMTNARMTHYQSLLLTERVTFAPPAALNPATLLPEETDEPVTHDCHQLLIEETGVRKDLTDIPLTGEVLTWFTDGSSYVVEGKRMAGAAVVDGTRTIWASSLPEGTSAQKAELMALTQALRLAEGKSINIYTDSRYAFATAHVHGAIYKQRGWLTSAGREIKNKEEILSLLEALHLPKRLAIIHCPGHQKAKDPISRGNQMADRVAKQAAQGVNLLAGKRTADGSEFEKRTADGSEFESPKKKAKVE

SEQ ID NO: 184 - protein, 2085 aa, synthetic construct
  source 1..2085: note = Description of Artificial Sequence: Synthetic polypeptide
MPAAKRVKLDGGDKKYSIGLDIGTNSVGWAVITDEYKVPSKKFKVLGNTDRHSIKKNLIGALLFDSGETAEATRLKRTARRRYTRRKNRICYLQEIFSNEMAKVDDSFFHRLEESFLVEEDKKHERHPIFGNIVDEVAYHEKYPTIYHLRKKLVDSTDKADLRLIYLALAHMIKFRGHFLIEGDLNPDNSDVDKLFIQLVQTYNQLFEENPINASGVDAKAILSARLSKSRRLENLIAQLPGEKKNGLFGNLIALSLGLTPNFKSNFDLAEDAKLQLSKDTYDDDLDNLLAQIGDQYADLFLAAKNLSDAILLSDILRVNTEITKAPLSASMIKRYDEHHQDLTLLKALVRQQLPEKYKEIFFDQSKNGYAGYIDGGASQEEFYKFIKPILEKMDGTEELLVKLNREDLLRKQRTFDNGSIPHQIHLGELHAILRRQEDFYPFLKDNREKIEKILTFRIPYYVGPLARGNSRFAWMTRKSEETITPWNFEEVVDKGASAQSFIERMTNFDKNLPNEKVLPKHSLLYEYFTVYNELTKVKYVTEGMRKPAFLSGEQKKAIVDLLFKTNRKVTVKQLKEDYFKKIECFDSVEISGVEDRFNASLGTYHDLLKIIKDKDFLDNEENEDILEDIVLTLTLFEDREMIEERLKTYAHLFDDKVMKQLKRRRYTGWGRLSRKLINGIRDKQSGKTILDFLKSDGFANRNFMQLIHDDSLTFKEDIQKAQVSGQGDSLHEHIANLAGSPAIKKGILQTVKVVDELVKVMGRHKPENIVIEMARENQTTQKGQKNSRERMKRIEEGIKELGSQILKEHPVENTQLQNEKLYLYYLQNGRDMYVDQELDINRLSDYDVDHIVPQSFLKDDSIDNKVLTRSDKARGKSDNVPSEEVVKKMKNYWRQLLNAKLITQRKFDNLTKAERGGLSELDKAGFIKRQLVETRQITKHVAQILDSRMNTKYDENDKLIREVKVITLKSKLVSDFRKDFQFYKVREINNYHHAHDAYLNAVVGTALIKKYPKLESEFVYGDYKVYDVRKMIAKSEQEIGKATAKYFFYSNIMNFFKTEITLANGEIRKRPLIETNGETGEIVWDKGRDFATVRKVLSMPQVNIVKKTEVQTGGFSKESILPKRNSDKLIARKKDWDPKKYGGFDSPTVAYSVLVVAKVEKGKSKKLKSVKELLGITIMERSSFEKNPIDFLEAKGYKEVKKDLIIKLPKYSLFELENGRKRMLASAGELQKGNELALPSKYVNFLYLASHYEKLKGSPEDNEQKQLFVEQHKHYLDEIIEQISEFSKRVILADANLDKVLSAYNKHRDKPIREQAENIIHLFTLTNLGAPAAFKYFDTTIDRKRYTSTKEVLDATLIHQSITGLYETRIDLSQLGGDGGGGSGGGGGTLQLDDEYRLYSPLVKPDQNIQFWLEQFPQAWAETAGMGLAKQVPPQVIQLKASATPVSVRQYPLSKEAQEGIRPHVQRLIQQGILVPVQSPWNTPLLPVRKPGTNDYRPVQDLREVNKRVQDIHPTVPNPYNLLCALPPQRSWYTVLDLKDAFFCLRLHPTSQPLFAFEWRDPGTGRTGQLTWTRLPQGFKNSPTIFNEALHRDLANFRIQHPQVTLLQYVDDLLLAGATKQDCLEGTKALLLELSDLGYRASAKKAQICRREVTYLGYSLRDGQRWLTEARKKTVVQIPAPTTAKQVREFLGTAGFCRLWIPGFATLAAPLYPLTKPKGEFSWAPEHQKAFDAIKKALLSAPALALPDVTKPFTLYVDERKGVARGVLTQTLGPWRRPVAYLSKKLDPVASGWPVCLKAIAAVAILVKDADKLTLGQNITVIAPHALENIVRQPPDRWMTNARMTHYQSLLLTERVTFAPPAALNPATLLPEETDEPVTHDCHQLLIEETGVRKDLTDIPLTGEVLTWFTDGSSYVVEGKRMAGAAVVDGTRTIWASSLPEGTSAQKAELMALTQALRLAEGKSINIYTDSRYAFATAHVHGAIYKQRGWLTSAGREIKNKEEILSLLEALHLPKRLAIIHCPGHQKAKDPISRGNQMADRVAKQAAQGVNLLAGKRTADGSEFEKRTADGSEFESPKKKAKVE

SEQ ID NO: 185 - protein, 2087 aa, synthetic construct
  source 1..2087: note = Description of Artificial Sequence: Synthetic polypeptide
MPAAKRVKLDGGDKKYSIGLDIGTNSVGWAVITDEYKVPSKKFKVLGNTDRHSIKKNLIGALLFDSGETAEATRLKRTARRRYTRRKNRICYLQEIFSNEMAKVDDSFFHRLEESFLVEEDKKHERHPIFGNIVDEVAYHEKYPTIYHLRKKLVDSTDKADLRLIYLALAHMIKFRGHFLIEGDLNPDNSDVDKLFIQLVQTYNQLFEENPINASGVDAKAILSARLSKSRRLENLIAQLPGEKKNGLFGNLIALSLGLTPNFKSNFDLAEDAKLQLSKDTYDDDLDNLLAQIGDQYADLFLAAKNLSDAILLSDILRVNTEITKAPLSASMIKRYDEHHQDLTLLKALVRQQLPEKYKEIFFDQSKNGYAGYIDGGASQEEFYKFIKPILEKMDGTEELLVKLNREDLLRKQRTFDNGSIPHQIHLGELHAILRRQEDFYPFLKDNREKIEKILTFRIPYYVGPLARGNSRFAWMTRKSEETITPWNFEEVVDKGASAQSFIERMTNFDKNLPNEKVLPKHSLLYEYFTVYNELTKVKYVTEGMRKPAFLSGEQKKAIVDLLFKTNRKVTVKQLKEDYFKKIECFDSVEISGVEDRFNASLGTYHDLLKIIKDKDFLDNEENEDILEDIVLTLTLFEDREMIEERLKTYAHLFDDKVMKQLKRRRYTGWGRLSRKLINGIRDKQSGKTILDFLKSDGFANRNFMQLIHDDSLTFKEDIQKAQVSGQGDSLHEHIANLAGSPAIKKGILQTVKVVDELVKVMGRHKPENIVIEMARENQTTQKGQKNSRERMKRIEEGIKELGSQILKEHPVENTQLQNEKLYLYYLQNGRDMYVDQELDINRLSDYDVDHIVPQSFLKDDSIDNKVLTRSDKARGKSDNVPSEEVVKKMKNYWRQLLNAKLITQRKFDNLTKAERGGLSELDKAGFIKRQLVETRQITKHVAQILDSRMNTKYDENDKLIREVKVITLKSKLVSDFRKDFQFYKVREINNYHHAHDAYLNAVVGTALIKKYPKLESEFVYGDYKVYDVRKMIAKSEQEIGKATAKYFFYSNIMNFFKTEITLANGEIRKRPLIETNGETGEIVWDKGRDFATVRKVLSMPQVNIVKKTEVQTGGFSKESILPKRNSDKLIARKKDWDPKKYGGFDSPTVAYSVLVVAKVEKGKSKKLKSVKELLGITIMERSSFEKNPIDFLEAKGYKEVKKDLIIKLPKYSLFELENGRKRMLASAGELQKGNELALPSKYVNFLYLASHYEKLKGSPEDNEQKQLFVEQHKHYLDEIIEQISEFSKRVILADANLDKVLSAYNKHRDKPIREQAENIIHLFTLTNLGAPAAFKYFDTTIDRKRYTSTKEVLDATLIHQSITGLYETRIDLSQLGGDGGGGGEAAAKGGTLQLDDEYRLYSPLVKPDQNIQFWLEQFPQAWAETAGMGLAKQVPPQVIQLKASATPVSVRQYPLSKEAQEGIRPHVQRLIQQGILVPVQSPWNTPLLPVRKPGTNDYRPVQDLREVNKRVQDIHPTVPNPYNLLCALPPQRSWYTVLDLKDAFFCLRLHPTSQPLFAFEWRDPGTGRTGQLTWTRLPQGFKNSPTIFNEALHRDLANFRIQHPQVTLLQYVDDLLLAGATKQDCLEGTKALLLELSDLGYRASAKKAQICRREVTYLGYSLRDGQRWLTEARKKTVVQIPAPTTAKQVREFLGTAGFCRLWIPGFATLAAPLYPLTKPKGEFSWAPEHQKAFDAIKKALLSAPALALPDVTKPFTLYVDERKGVARGVLTQTLGPWRRPVAYLSKKLDPVASGWPVCLKAIAAVAILVKDADKLTLGQNITVIAPHALENIVRQPPDRWMTNARMTHYQSLLLTERVTFAPPAALNPATLLPEETDEPVTHDCHQLLIEETGVRKDLTDIPLTGEVLTWFTDGSSYVVEGKRMAGAAVVDGTRTIWASSLPEGTSAQKAELMALTQALRLAEGKSINIYTDSRYAFATAHVHGAIYKQRGWLTSAGREIKNKEEILSLLEALHLPKRLAIIHCPGHQKAKDPISRGNQMADRVAKQAAQGVNLLAGKRTADGSEFEKRTADGSEFESPKKKAKVE

SEQ ID NO: 186 - protein, 2085 aa, synthetic construct
  source 1..2085: note = Description of Artificial Sequence: Synthetic polypeptide
MPAAKRVKLDGGDKKYSIGLDIGTNSVGWAVITDEYKVPSKKFKVLGNTDRHSIKKNLIGALLFDSGETAEATRLKRTARRRYTRRKNRICYLQEIFSNEMAKVDDSFFHRLEESFLVEEDKKHERHPIFGNIVDEVAYHEKYPTIYHLRKKLVDSTDKADLRLIYLALAHMIKFRGHFLIEGDLNPDNSDVDKLFIQLVQTYNQLFEENPINASGVDAKAILSARLSKSRRLENLIAQLPGEKKNGLFGNLIALSLGLTPNFKSNFDLAEDAKLQLSKDTYDDDLDNLLAQIGDQYADLFLAAKNLSDAILLSDILRVNTEITKAPLSASMIKRYDEHHQDLTLLKALVRQQLPEKYKEIFFDQSKNGYAGYIDGGASQEEFYKFIKPILEKMDGTEELLVKLNREDLLRKQRTFDNGSIPHQIHLGELHAILRRQEDFYPFLKDNREKIEKILTFRIPYYVGPLARGNSRFAWMTRKSEETITPWNFEEVVDKGASAQSFIERMTNFDKNLPNEKVLPKHSLLYEYFTVYNELTKVKYVTEGMRKPAFLSGEQKKAIVDLLFKTNRKVTVKQLKEDYFKKIECFDSVEISGVEDRFNASLGTYHDLLKIIKDKDFLDNEENEDILEDIVLTLTLFEDREMIEERLKTYAHLFDDKVMKQLKRRRYTGWGRLSRKLINGIRDKQSGKTILDFLKSDGFANRNFMQLIHDDSLTFKEDIQKAQVSGQGDSLHEHIANLAGSPAIKKGILQTVKVVDELVKVMGRHKPENIVIEMARENQTTQKGQKNSRERMKRIEEGIKELGSQILKEHPVENTQLQNEKLYLYYLQNGRDMYVDQELDINRLSDYDVDHIVPQSFLKDDSIDNKVLTRSDKARGKSDNVPSEEVVKKMKNYWRQLLNAKLITQRKFDNLTKAERGGLSELDKAGFIKRQLVETRQITKHVAQILDSRMNTKYDENDKLIREVKVITLKSKLVSDFRKDFQFYKVREINNYHHAHDAYLNAVVGTALIKKYPKLESEFVYGDYKVYDVRKMIAKSEQEIGKATAKYFFYSNIMNFFKTEITLANGEIRKRPLIETNGETGEIVWDKGRDFATVRKVLSMPQVNIVKKTEVQTGGFSKESILPKRNSDKLIARKKDWDPKKYGGFDSPTVAYSVLVVAKVEKGKSKKLKSVKELLGITIMERSSFEKNPIDFLEAKGYKEVKKDLIIKLPKYSLFELENGRKRMLASAGELQKGNELALPSKYVNFLYLASHYEKLKGSPEDNEQKQLFVEQHKHYLDEIIEQISEFSKRVILADANLDKVLSAYNKHRDKPIREQAENIIHLFTLTNLGAPAAFKYFDTTIDRKRYTSTKEVLDATLIHQSITGLYETRIDLSQLGGDGGGGSGGSGGTLQLDDEYRLYSPLVKPDQNIQFWLEQFPQAWAETAGMGLAKQVPPQVIQLKASATPVSVRQYPLSKEAQEGIRPHVQRLIQQGILVPVQSPWNTPLLPVRKPGTNDYRPVQDLREVNKRVQDIHPTVPNPYNLLCALPPQRSWYTVLDLKDAFFCLRLHPTSQPLFAFEWRDPGTGRTGQLTWTRLPQGFKNSPTIFNEALHRDLANFRIQHPQVTLLQYVDDLLLAGATKQDCLEGTKALLLELSDLGYRASAKKAQICRREVTYLGYSLRDGQRWLTEARKKTVVQIPAPTTAKQVREFLGTAGFCRLWIPGFATLAAPLYPLTKPKGEFSWAPEHQKAFDAIKKALLSAPALALPDVTKPFTLYVDERKGVARGVLTQTLGPWRRPVAYLSKKLDPVASGWPVCLKAIAAVAILVKDADKLTLGQNITVIAPHALENIVRQPPDRWMTNARMTHYQSLLLTERVTFAPPAALNPATLLPEETDEPVTHDCHQLLIEETGVRKDLTDIPLTGEVLTWFTDGSSYVVEGKRMAGAAVVDGTRTIWASSLPEGTSAQKAELMALTQALRLAEGKSINIYTDSRYAFATAHVHGAIYKQRGWLTSAGREIKNKEEILSLLEALHLPKRLAIIHCPGHQKAKDPISRGNQMADRVAKQAAQGVNLLAGKRTADGSEFEKRTADGSEFESPKKKAKVE

SEQ ID NO: 187 - protein, 1999 aa, synthetic construct
  source 1..1999: note = Description of Artificial Sequence: Synthetic polypeptide
MPAAKRVKLDGGDKKYSIGLDIGTNSVGWAVITDEYKVPSKKFKVLGNTDRHSIKKNLIGALLFDSGETAEATRLKRTARRRYTRRKNRICYLQEIFSNEMAKVDDSFFHRLEESFLVEEDKKHERHPIFGNIVDEVAYHEKYPTIYHLRKKLVDSTDKADLRLIYLALAHMIKFRGHFLIEGDLNPDNSDVDKLFIQLVQTYNQLFEENPINASGVDAKAILSARLSKSRRLENLIAQLPGEKKNGLFGNLIALSLGLTPNFKSNFDLAEDAKLQLSKDTYDDDLDNLLAQIGDQYADLFLAAKNLSDAILLSDILRVNTEITKAPLSASMIKRYDEHHQDLTLLKALVRQQLPEKYKEIFFDQSKNGYAGYIDGGASQEEFYKFIKPILEKMDGTEELLVKLNREDLLRKQRTFDNGSIPHQIHLGELHAILRRQEDFYPFLKDNREKIEKILTFRIPYYVGPLARGNSRFAWMTRKSEETITPWNFEEVVDKGASAQSFIERMTNFDKNLPNEKVLPKHSLLYEYFTVYNELTKVKYVTEGMRKPAFLSGEQKKAIVDLLFKTNRKVTVKQLKEDYFKKIECFDSVEISGVEDRFNASLGTYHDLLKIIKDKDFLDNEENEDILEDIVLTLTLFEDREMIEERLKTYAHLFDDKVMKQLKRRRYTGWGRLSRKLINGIRDKQSGKTILDFLKSDGFANRNFMQLIHDDSLTFKEDIQKAQVSGQGDSLHEHIANLAGSPAIKKGILQTVKVVDELVKVMGRHKPENIVIEMARENQTTQKGQKNSRERMKRIEEGIKELGSQILKEHPVENTQLQNEKLYLYYLQNGRDMYVDQELDINRLSDYDVDHIVPQSFLKDDSIDNKVLTRSDKARGKSDNVPSEEVVKKMKNYWRQLLNAKLITQRKFDNLTKAERGGLSELDKAGFIKRQLVETRQITKHVAQILDSRMNTKYDENDKLIREVKVITLKSKLVSDFRKDFQFYKVREINNYHHAHDAYLNAVVGTALIKKYPKLESEFVYGDYKVYDVRKMIAKSEQEIGKATAKYFFYSNIMNFFKTEITLANGEIRKRPLIETNGETGEIVWDKGRDFATVRKVLSMPQVNIVKKTEVQTGGFSKESILPKRNSDKLIARKKDWDPKKYGGFDSPTVAYSVLVVAKVEKGKSKKLKSVKELLGITIMERSSFEKNPIDFLEAKGYKEVKKDLIIKLPKYSLFELENGRKRMLASAGELQKGNELALPSKYVNFLYLASHYEKLKGSPEDNEQKQLFVEQHKHYLDEIIEQISEFSKRVILADANLDKVLSAYNKHRDKPIREQAENIIHLFTLTNLGAPAAFKYFDTTIDRKRYTSTKEVLDATLIHQSITGLYETRIDLSQLGGDGGGGSGGGGSSGGGVLDTPPSHIGLEHLPPPPEVPQFPLNLERLQALQDLVHRSLEAGYISPWDGPGNNPVFPVRKPNGAWRFVHDLRATNALTKPIPALSPGPPDLTAIPTHPPHIICLDLKDAFFQIPVEDRFRFYLSFTLPSPGGLQPHRRFAWRVLPQGFINSPALFNRALQEPLRQVSAAFSQSLLVSYMDDILYASPTEEQRSQCYQALAARLRDLGFQVASEKTSQTPSPVPFLGQMVHEQIVTYQSLPTLQISSPISLHQLQAVLGDLQWVSRGTPTTRRPLQLLYSSLKRHHDPRAIIQLSPEQLQGIAELRQALSHNARSRYNEQEPLLAYVHLTRAGSTLVLFQKGAQFPLAYFQTPLTDNQASPWGLLLLLGCQYLQTQALSSYAKPILKYYHNLPKTSLDNWIQSSEDPRVQELLQLWPQISSQGIQPPGPWKTLITRAEVFLTPQFSPDPIPAALCLFSDGATGRGAYCLWKDHLLDFQAVPAPESAQKGELAGLLAGLAAAPPEPVNIWVDSKYLYSLLRTWVLGAWLQPDPVPSYALLYKSLLRHPAIVVGHVRSHSSASHPIASLNNYVDQLAGKRTADGSEFEKRTADGSEFESPKKKAKVE

SEQ ID NO: 188 - protein, 2015 aa, synthetic construct
  source 1..2015: note = Description of Artificial Sequence: Synthetic polypeptide
MPAAKRVKLDGGDKKYSIGLDIGTNSVGWAVITDEYKVPSKKFKVLGNTDRHSIKKNLIGALLFDSGETAEATRLKRTARRRYTRRKNRICYLQEIFSNEMAKVDDSFFHRLEESFLVEEDKKHERHPIFGNIVDEVAYHEKYPTIYHLRKKLVDSTDKADLRLIYLALAHMIKFRGHFLIEGDLNPDNSDVDKLFIQLVQTYNQLFEENPINASGVDAKAILSARLSKSRRLENLIAQLPGEKKNGLFGNLIALSLGLTPNFKSNFDLAEDAKLQLSKDTYDDDLDNLLAQIGDQYADLFLAAKNLSDAILLSDILRVNTEITKAPLSASMIKRYDEHHQDLTLLKALVRQQLPEKYKEIFFDQSKNGYAGYIDGGASQEEFYKFIKPILEKMDGTEELLVKLNREDLLRKQRTFDNGSIPHQIHLGELHAILRRQEDFYPFLKDNREKIEKILTFRIPYYVGPLARGNSRFAWMTRKSEETITPWNFEEVVDKGASAQSFIERMTNFDKNLPNEKVLPKHSLLYEYFTVYNELTKVKYVTEGMRKPAFLSGEQKKAIVDLLFKTNRKVTVKQLKEDYFKKIECFDSVEISGVEDRFNASLGTYHDLLKIIKDKDFLDNEENEDILEDIVLTLTLFEDREMIEERLKTYAHLFDDKVMKQLKRRRYTGWGRLSRKLINGIRDKQSGKTILDFLKSDGFANRNFMQLIHDDSLTFKEDIQKAQVSGQGDSLHEHIANLAGSPAIKKGILQTVKVVDELVKVMGRHKPENIVIEMARENQTTQKGQKNSRERMKRIEEGIKELGSQILKEHPVENTQLQNEKLYLYYLQNGRDMYVDQELDINRLSDYDVDHIVPQSFLKDDSIDNKVLTRSDKARGKSDNVPSEEVVKKMKNYWRQLLNAKLITQRKFDNLTKAERGGLSELDKAGFIKRQLVETRQITKHVAQILDSRMNTKYDENDKLIREVKVITLKSKLVSDFRKDFQFYKVREINNYHHAHDAYLNAVVGTALIKKYPKLESEFVYGDYKVYDVRKMIAKSEQEIGKATAKYFFYSNIMNFFKTEITLANGEIRKRPLIETNGETGEIVWDKGRDFATVRKVLSMPQVNIVKKTEVQTGGFSKESILPKRNSDKLIARKKDWDPKKYGGFDSPTVAYSVLVVAKVEKGKSKKLKSVKELLGITIMERSSFEKNPIDFLEAKGYKEVKKDLIIKLPKYSLFELENGRKRMLASAGELQKGNELALPSKYVNFLYLASHYEKLKGSPEDNEQKQLFVEQHKHYLDEIIEQISEFSKRVILADANLDKVLSAYNKHRDKPIREQAENIIHLFTLTNLGAPAAFKYFDTTIDRKRYTSTKEVLDATLIHQSITGLYETRIDLSQLGGDGGGGGGSGGGGSGGGGSGGGGSGGGGSGGGVLDTPPSHIGLEHLPPPPEVPQFPLNLERLQALQDLVHRSLEAGYISPWDGPGNNPVFPVRKPNGAWRFVHDLRATNALTKPIPALSPGPPDLTAIPTHPPHIICLDLKDAFFQIPVEDRFRFYLSFTLPSPGGLQPHRRFAWRVLPQGFINSPALFNRALQEPLRQVSAAFSQSLLVSYMDDILYASPTEEQRSQCYQALAARLRDLGFQVASEKTSQTPSPVPFLGQMVHEQIVTYQSLPTLQISSPISLHQLQAVLGDLQWVSRGTPTTRRPLQLLYSSLKRHHDPRAIIQLSPEQLQGIAELRQALSHNARSRYNEQEPLLAYVHLTRAGSTLVLFQKGAQFPLAYFQTPLTDNQASPWGLLLLLGCQYLQTQALSSYAKPILKYYHNLPKTSLDNWIQSSEDPRVQELLQLWPQISSQGIQPPGPWKTLITRAEVFLTPQFSPDPIPAALCLFSDGATGRGAYCLWKDHLLDFQAVPAPESAQKGELAGLLAGLAAAPPEPVNIWVDSKYLYSLLRTWVLGAWLQPDPVPSYALLYKSLLRHPAIVVGHVRSHSSASHPIASLNNYVDQLAGKRTADGSEFEKRTADGSEFESPKKKAKVE

SEQ ID NO: 189 - protein, 1996 aa, synthetic construct
  source 1..1996: note = Description of Artificial Sequence: Synthetic polypeptide
MPAAKRVKLDGGDKKYSIGLDIGTNSVGWAVITDEYKVPSKKFKVLGNTDRHSIKKNLIGALLFDSGETAEATRLKRTARRRYTRRKNRICYLQEIFSNEMAKVDDSFFHRLEESFLVEEDKKHERHPIFGNIVDEVAYHEKYPTIYHLRKKLVDSTDKADLRLIYLALAHMIKFRGHFLIEGDLNPDNSDVDKLFIQLVQTYNQLFEENPINASGVDAKAILSARLSKSRRLENLIAQLPGEKKNGLFGNLIALSLGLTPNFKSNFDLAEDAKLQLSKDTYDDDLDNLLAQIGDQYADLFLAAKNLSDAILLSDILRVNTEITKAPLSASMIKRYDEHHQDLTLLKALVRQQLPEKYKEIFFDQSKNGYAGYIDGGASQEEFYKFIKPILEKMDGTEELLVKLNREDLLRKQRTFDNGSIPHQIHLGELHAILRRQEDFYPFLKDNREKIEKILTFRIPYYVGPLARGNSRFAWMTRKSEETITPWNFEEVVDKGASAQSFIERMTNFDKNLPNEKVLPKHSLLYEYFTVYNELTKVKYVTEGMRKPAFLSGEQKKAIVDLLFKTNRKVTVKQLKEDYFKKIECFDSVEISGVEDRFNASLGTYHDLLKIIKDKDFLDNEENEDILEDIVLTLTLFEDREMIEERLKTYAHLFDDKVMKQLKRRRYTGWGRLSRKLINGIRDKQSGKTILDFLKSDGFANRNFMQLIHDDSLTFKEDIQKAQVSGQGDSLHEHIANLAGSPAIKKGILQTVKVVDELVKVMGRHKPENIVIEMARENQTTQKGQKNSRERMKRIEEGIKELGSQILKEHPVENTQLQNEKLYLYYLQNGRDMYVDQELDINRLSDYDVDHIVPQSFLKDDSIDNKVLTRSDKARGKSDNVPSEEVVKKMKNYWRQLLNAKLITQRKFDNLTKAERGGLSELDKAGFIKRQLVETRQITKHVAQILDSRMNTKYDENDKLIREVKVITLKSKLVSDFRKDFQFYKVREINNYHHAHDAYLNAVVGTALIKKYPKLESEFVYGDYKVYDVRKMIAKSEQEIGKATAKYFFYSNIMNFFKTEITLANGEIRKRPLIETNGETGEIVWDKGRDFATVRKVLSMPQVNIVKKTEVQTGGFSKESILPKRNSDKLIARKKDWDPKKYGGFDSPTVAYSVLVVAKVEKGKSKKLKSVKELLGITIMERSSFEKNPIDFLEAKGYKEVKKDLIIKLPKYSLFELENGRKRMLASAGELQKGNELALPSKYVNFLYLASHYEKLKGSPEDNEQKQLFVEQHKHYLDEIIEQISEFSKRVILADANLDKVLSAYNKHRDKPIREQAENIIHLFTLTNLGAPAAFKYFDTTIDRKRYTSTKEVLDATLIHQSITGLYETRIDLSQLGGDGGGGGGSSGGGVLDTPPSHIGLEHLPPPPEVPQFPLNLERLQALQDLVHRSLEAGYISPWDGPGNNPVFPVRKPNGAWRFVHDLRATNALTKPIPALSPGPPDLTAIPTHPPHIICLDLKDAFFQIPVEDRFRFYLSFTLPSPGGLQPHRRFAWRVLPQGFINSPALFNRALQEPLRQVSAAFSQSLLVSYMDDILYASPTEEQRSQCYQALAARLRDLGFQVASEKTSQTPSPVPFLGQMVHEQIVTYQSLPTLQISSPISLHQLQAVLGDLQWVSRGTPTTRRPLQLLYSSLKRHHDPRAIIQLSPEQLQGIAELRQALSHNARSRYNEQEPLLAYVHLTRAGSTLVLFQKGAQFPLAYFQTPLTDNQASPWGLLLLLGCQYLQTQALSSYAKPILKYYHNLPKTSLDNWIQSSEDPRVQELLQLWPQISSQGIQPPGPWKTLITRAEVFLTPQFSPDPIPAALCLFSDGATGRGAYCLWKDHLLDFQAVPAPESAQKGELAGLLAGLAAAPPEPVNIWVDSKYLYSLLRTWVLGAWLQPDPVPSYALLYKSLLRHPAIVVGHVRSHSSASHPIASLNNYVDQLAGKRTADGSEFEKRTADGSEFESPKKKAKVE

SEQ ID NO: 190 - protein, 2123 aa, synthetic construct; identical to SEQ ID NO: 36
  source 1..2123: note = Description of Artificial Sequence: Synthetic polypeptide

SEQ ID NO: 191 - protein, 2095 aa, synthetic construct
  source 1..2095: note = Description of Artificial Sequence: Synthetic polypeptide
MPAAKRVKLDGGDKKYSIGLDIGTNSVGWAVITDEYKVPSKKFKVLGNTDRHSIKKNLIGALLFDSGETAEATRLKRTARRRYTRRKNRICYLQEIFSNEMAKVDDSFFHRLEESFLVEEDKKHERHPIFGNIVDEVAYHEKYPTIYHLRKKLVDSTDKADLRLIYLALAHMIKFRGHFLIEGDLNPDNSDVDKLFIQLVQTYNQLFEENPINASGVDAKAILSARLSKSRRLENLIAQLPGEKKNGLFGNLIALSLGLTPNFKSNFDLAEDAKLQLSKDTYDDDLDNLLAQIGDQYADLFLAAKNLSDAILLSDILRVNTEITKAPLSASMIKRYDEHHQDLTLLKALVRQQLPEKYKEIFFDQSKNGYAGYIDGGASQEEFYKFIKPILEKMDGTEELLVKLNREDLLRKQRTFDNGSIPHQIHLGELHAILRRQEDFYPFLKDNREKIEKILTFRIPYYVGPLARGNSRFAWMTRKSEETITPWNFEEVVDKGASAQSFIERMTNFDKNLPNEKVLPKHSLLYEYFTVYNELTKVKYVTEGMRKPAFLSGEQKKAIVDLLFKTNRKVTVKQLKEDYFKKIECFDSVEISGVEDRFNASLGTYHDLLKIIKDKDFLDNEENEDILEDIVLTLTLFEDREMIEERLKTYAHLFDDKVMKQLKRRRYTGWGRLSRKLINGIRDKQSGKTILDFLKSDGFANRNFMQLIHDDSLTFKEDIQKAQVSGQGDSLHEHIANLAGSPAIKKGILQTVKVVDELVKVMGRHKPENIVIEMARENQTTQKGQKNSRERMKRIEEGIKELGSQILKEHPVENTQLQNEKLYLYYLQNGRDMYVDQELDINRLSDYDVDHIVPQSFLKDDSIDNKVLTRSDKARGKSDNVPSEEVVKKMKNYWRQLLNAKLITQRKFDNLTKAERGGLSELDKAGFIKRQLVETRQITKHVAQILDSRMNTKYDENDKLIREVKVITLKSKLVSDFRKDFQFYKVREINNYHHAHDAYLNAVVGTALIKKYPKLESEFVYGDYKVYDVRKMIAKSEQEIGKATAKYFFYSNIMNFFKTEITLANGEIRKRPLIETNGETGEIVWDKGRDFATVRKVLSMPQVNIVKKTEVQTGGFSKESILPKRNSDKLIARKKDWDPKKYGGFDSPTVAYSVLVVAKVEKGKSKKLKSVKELLGITIMERSSFEKNPIDFLEAKGYKEVKKDLIIKLPKYSLFELENGRKRMLASAGELQKGNELALPSKYVNFLYLASHYEKLKGSPEDNEQKQLFVEQHKHYLDEIIEQISEFSKRVILADANLDKVLSAYNKHRDKPIREQAENIIHLFTLTNLGAPAAFKYFDTTIDRKRYTSTKEVLDATLIHQSITGLYETRIDLSQLGGDGGGGSGGSGGSGGSGGSGGSGGLDDEYRLYSPLVKPDQNIQFWLEQFPQAWAETAGMGLAKQVPPQVIQLKASATPVSVRQYPLSKEAQEGIRPHVQRLIQQGILVPVQSPWNTPLLPVRKPGTNDYRPVQDLREVNKRVQDIHPTVPNPYNLLCALPPQRSWYTVLDLKDAFFCLRLHPTSQPLFAFEWRDPGTGRTGQLTWTRLPQGFKNSPTIFNEALHRDLANFRIQHPQVTLLQYVDDLLLAGATKQDCLEGTKALLLELSDLGYRASAKKAQICRREVTYLGYSLRDGQRWLTEARKKTVVQIPAPTTAKQVREFLGKAGFCRLFIPGFATLAAPLYPLTKPKGEFSWAPEHQKAFDAIKKALLSAPALALPDVTKPFTLYVDERKGVARGVLTQTLGPWRRPVAYLSKKLDPVASGWPVCLKAIAAVAILVKDADKLTLGQNITVIAPHALENIVRQPPDRWMTNARMTHYQSLLLTERVTFAPPAALNPATLLPEETDEPVTHDCHQLLIEETGVRKDLTDIPLTGEVLTWFTDGSSYVVEGKRMAGAAVVDGTRTIWASSLPEGTSAQKAELMALTQALRLAEGKSINIYTDSRYAFATAHVHGAIYKQRGWLTSAGREIKNKEEILSLLEALHLPKRLAIIHCPGHQKAKDPISRGNQMADRVAKQAAQGVNLLPAGKRTADGSEFEKRTADGSEFESPKKKAKVE

SEQ ID NO: 192 - protein, 2088 aa, synthetic construct
  source 1..2088: note = Description of Artificial Sequence: Synthetic polypeptide
MPAAKRVKLDGGDKKYSIGLDIGTNSVGWAVITDEYKVPSKKFKVLGNTDRHSIKKNLIGALLFDSGETAEATRLKRTARRRYTRRKNRICYLQEIFSNEMAKVDDSFFHRLEESFLVEEDKKHERHPIFGNIVDEVAYHEKYPTIYHLRKKLVDSTDKADLRLIYLALAHMIKFRGHFLIEGDLNPDNSDVDKLFIQLVQTYNQLFEENPINASGVDAKAILSARLSKSRRLENLIAQLPGEKKNGLFGNLIALSLGLTPNFKSNFDLAEDAKLQLSKDTYDDDLDNLLAQIGDQYADLFLAAKNLSDAILLSDILRVNTEITKAPLSASMIKRYDEHHQDLTLLKALVRQQLPEKYKEIFFDQSKNGYAGYIDGGASQEEFYKFIKPILEKMDGTEELLVKLNREDLLRKQRTFDNGSIPHQIHLGELHAILRRQEDFYPFLKDNREKIEKILTFRIPYYVGPLARGNSRFAWMTRKSEETITPWNFEEVVDKGASAQSFIERMTNFDKNLPNEKVLPKHSLLYEYFTVYNELTKVKYVTEGMRKPAFLSGEQKKAIVDLLFKTNRKVTVKQLKEDYFKKIECFDSVEISGVEDRFNASLGTYHDLLKIIKDKDFLDNEENEDILEDIVLTLTLFEDREMIEERLKTYAHLFDDKVMKQLKRRRYTGWGRLSRKLINGIRDKQSGKTILDFLKSDGFANRNFMQLIHDDSLTFKEDIQKAQVSGQGDSLHEHIANLAGSPAIKKGILQTVKVVDELVKVMGRHKPENIVIEMARENQTTQKGQKNSRERMKRIEEGIKELGSQILKEHPVENTQLQNEKLYLYYLQNGRDMYVDQELDINRLSDYDVDHIVPQSFLKDDSIDNKVLTRSDKARGKSDNVPSEEVVKKMKNYWRQLLNAKLITQRKFDNLTKAERGGLSELDKAGFIKRQLVETRQITKHVAQILDSRMNTKYDENDKLIREVKVITLKSKLVSDFRKDFQFYKVREINNYHHAHDAYLNAVVGTALIKKYPKLESEFVYGDYKVYDVRKMIAKSEQEIGKATAKYFFYSNIMNFFKTEITLANGEIRKRPLIETNGETGEIVWDKGRDFATVRKVLSMPQVNIVKKTEVQTGGFSKESILPKRNSDKLIARKKDWDPKKYGGFDSPTVAYSVLVVAKVEKGKSKKLKSVKELLGITIMERSSFEKNPIDFLEAKGYKEVKKDLIIKLPKYSLFELENGRKRMLASAGELQKGNELALPSKYVNFLYLASHYEKLKGSPEDNEQKQLFVEQHKHYLDEIIEQISEFSKRVILADANLDKVLSAYNKHRDKPIREQAENIIHLFTLTNLGAPAAFKYFDTTIDRKRYTSTKEVLDATLIHQSITGLYETRIDLSQLGGDGGPAPEAAAKGGGGGLDDEYRLYSPLVKPDQNIQFWLEQFPQAWAETAGMGLAKQVPPQVIQLKASATPVSVRQYPLSKEAQEGIRPHVQRLIQQGILVPVQSPWNTPLLPVRKPGTNDYRPVQDLREVNKRVQDIHPTVPNPYNLLCALPPQRSWYTVLDLKDAFFCLRLHPTSQPLFAFEWRDPGTGRTGQLTWTRLPQGFKNSPTIFNEALHRDLANFRIQHPQVTLLQYVDDLLLAGATKQDCLEGTKALLLELSDLGYRASAKKAQICRREVTYLGYSLRDGQRWLTEARKKTVVQIPAPTTAKQVREFLGKAGFCRLFIPGFATLAAPLYPLTKPKGEFSWAPEHQKAFDAIKKALLSAPALALPDVTKPFTLYVDERKGVARGVLTQTLGPWRRPVAYLSKKLDPVASGWPVCLKAIAAVAILVKDADKLTLGQNITVIAPHALENIVRQPPDRWMTNARMTHYQSLLLTERVTFAPPAALNPATLLPEETDEPVTHDCHQLLIEETGVRKDLTDIPLTGEVLTWFTDGSSYVVEGKRMAGAAVVDGTRTIWASSLPEGTSAQKAELMALTQALRLAEGKSINIYTDSRYAFATAHVHGAIYKQRGWLTSAGREIKNKEEILSLLEALHLPKRLAIIHCPGHQKAKDPISRGNQMADRVAKQAAQGVNLLPAGKRTADGSEFEKRTADGSEFESPKKKAKVE

SEQ ID NO: 193 - protein, 2107 aa, synthetic construct
  source 1..2107: note = Description of Artificial Sequence: Synthetic polypeptide
MPAAKRVKLDGGDKKYSIGLDIGTNSVGWAVITDEYKVPSKKFKVLGNTDRHSIKKNLIGALLFDSGETAEATRLKRTARRRYTRRKNRICYLQEIFSNEMAKVDDSFFHRLEESFLVEEDKKHERHPIFGNIVDEVAYHEKYPTIYHLRKKLVDSTDKADLRLIYLALAHMIKFRGHFLIEGDLNPDNSDVDKLFIQLVQTYNQLFEENPINASGVDAKAILSARLSKSRRLENLIAQLPGEKKNGLFGNLIALSLGLTPNFKSNFDLAEDAKLQLSKDTYDDDLDNLLAQIGDQYADLFLAAKNLSDAILLSDILRVNTEITKAPLSASMIKRYDEHHQDLTLLKALVRQQLPEKYKEIFFDQSKNGYAGYIDGGASQEEFYKFIKPILEKMDGTEELLVKLNREDLLRKQRTFDNGSIPHQIHLGELHAILRRQEDFYPFLKDNREKIEKILTFRIPYYVGPLARGNSRFAWMTRKSEETITPWNFEEVVDKGASAQSFIERMTNFDKNLPNEKVLPKHSLLYEYFTVYNELTKVKYVTEGMRKPAFLSGEQKKAIVDLLFKTNRKVTVKQLKEDYFKKIECFDSVEISGVEDRFNASLGTYHDLLKIIKDKDFLDNEENEDILEDIVLTLTLFEDREMIEERLKTYAHLFDDKVMKQLKRRRYTGWGRLSRKLINGIRDKQSGKTILDFLKSDGFANRNFMQLIHDDSLTFKEDIQKAQVSGQGDSLHEHIANLAGSPAIKKGILQTVKVVDELVKVMGRHKPENIVIEMARENQTTQKGQKNSRERMKRIEEGIKELGSQILKEHPVENTQLQNEKLYLYYLQNGRDMYVDQELDINRLSDYDVDHIVPQSFLKDDSIDNKVLTRSDKARGKSDNVPSEEVVKKMKNYWRQLLNAKLITQRKFDNLTKAERGGLSELDKAGFIKRQLVETRQITKHVAQILDSRMNTKYDENDKLIREVKVITLKSKLVSDFRKDFQFYKVREINNYHHAHDAYLNAVVGTALIKKYPKLESEFVYGDYKVYDVRKMIAKSEQEIGKATAKYFFYSNIMNFFKTEITLANGEIRKRPLIETNGETGEIVWDKGRDFATVRKVLSMPQVNIVKKTEVQTGGFSKESILPKRNSDKLIARKKDWDPKKYGGFDSPTVAYSVLVVAKVEKGKSKKLKSVKELLGITIMERSSFEKNPIDFLEAKGYKEVKKDLIIKLPKYSLFELENGRKRMLASAGELQKGNELALPSKYVNFLYLASHYEKLKGSPEDNEQKQLFVEQHKHYLDEIIEQISEFSKRVILADANLDKVLSAYNKHRDKPIREQAENIIHLFTLTNLGAPAAFKYFDTTIDRKRYTSTKEVLDATLIHQSITGLYETRIDLSQLGGDGGEAAAKEAAAKEAAAKEAAAKEAAAKEAAAKGGLDDEYRLYSPLVKPDQNIQFWLEQFPQAWAETAGMGLAKQVPPQVIQLKASATPVSVRQYPLSKEAQEGIRPHVQRLIQQGILVPVQSPWNTPLLPVRKPGTNDYRPVQDLREVNKRVQDIHPTVPNPYNLLCALPPQRSWYTVLDLKDAFFCLRLHPTSQPLFAFEWRDPGTGRTGQLTWTRLPQGFKNSPTIFNEALHRDLANFRIQHPQVTLLQYVDDLLLAGATKQDCLEGTKALLLELSDLGYRASAKKAQICRREVTYLGYSLRDGQRWLTEARKKTVVQIPAPTTAKQVREFLGKAGFCRLFIPGFATLAAPLYPLTKPKGEFSWAPEHQKAFDAIKKALLSAPALALPDVTKPFTLYVDERKGVARGVLTQTLGPWRRPVAYLSKKLDPVASGWPVCLKAIAAVAILVKDADKLTLGQNITVIAPHALENIVRQPPDRWMTNARMTHYQSLLLTERVTFAPPAALNPATLLPEETDEPVTHDCHQLLIEETGVRKDLTDIPLTGEVLTWFTDGSSYVVEGKRMAGAAVVDGTRTIWASSLPEGTSAQKAELMALTQALRLAEGKSINIYTDSRYAFATAHVHGAIYKQRGWLTSAGREIKNKEEILSLLEALHLPKRLAIIHCPGHQKAKDPISRGNQMADRVAKQAAQGVNLLPAGKRTADGSEFEKRTADGSEFESPKKKAKVE

SEQ ID NO: 194 - protein, 2090 aa, synthetic construct; identical to SEQ ID NO: 54
  source 1..2090: note = Description of Artificial Sequence: Synthetic polypeptide

SEQ ID NO: 195 - protein, 2088 aa, synthetic construct; identical to SEQ ID NO: 35
  source 1..2088: note = Description of Artificial Sequence: Synthetic polypeptide

SEQ ID NO: 196 - protein, 2093 aa, synthetic construct; identical to SEQ ID NO: 90
  source 1..2093: note = Description of Artificial Sequence: Synthetic polypeptide

SEQ ID NO: 197 - protein, 2086 aa, synthetic construct
  source 1..2086: note = Description of Artificial Sequence: Synthetic polypeptide
MPAAKRVKLDGGDKKYSIGLDIGTNSVGWAVITDEYKVPSKKFKVLGNTDRHSIKKNLIGALLFDSGETAEATRLKRTARRRYTRRKNRICYLQEIFSNEMAKVDDSFFHRLEESFLVEEDKKHERHPIFGNIVDEVAYHEKYPTIYHLRKKLVDSTDKADLRLIYLALAHMIKFRGHFLIEGDLNPDNSDVDKLFIQLVQTYNQLFEENPINASGVDAKAILSARLSKSRRLENLIAQLPGEKKNGLFGNLIALSLGLTPNFKSNFDLAEDAKLQLSKDTYDDDLDNLLAQIGDQYADLFLAAKNLSDAILLSDILRVNTEITKAPLSASMIKRYDEHHQDLTLLKALVRQQLPEKYKEIFFDQSKNGYAGYIDGGASQEEFYKFIKPILEKMDGTEELLVKLNREDLLRKQRTFDNGSIPHQIHLGELHAILRRQEDFYPFLKDNREKIEKILTFRIPYYVGPLARGNSRFAWMTRKSEETITPWNFEEVVDKGASAQSFIERMTNFDKNLPNEKVLPKHSLLYEYFTVYNELTKVKYVTEGMRKPAFLSGEQKKAIVDLLFKTNRKVTVKQLKEDYFKKIECFDSVEISGVEDRFNASLGTYHDLLKIIKDKDFLDNEENEDILEDIVLTLTLFEDREMIEERLKTYAHLFDDKVMKQLKRRRYTGWGRLSRKLINGIRDKQSGKTILDFLKSDGFANRNFMQLIHDDSLTFKEDIQKAQVSGQGDSLHEHIANLAGSPAIKKGILQTVKVVDELVKVMGRHKPENIVIEMARENQTTQKGQKNSRERMKRIEEGIKELGSQILKEHPVENTQLQNEKLYLYYLQNGRDMYVDQELDINRLSDYDVDHIVPQSFLKDDSIDNKVLTRSDKARGKSDNVPSEEVVKKMKNYWRQLLNAKLITQRKFDNLTKAERGGLSELDKAGFIKRQLVETRQITKHVAQILDSRMNTKYDENDKLIREVKVITLKSKLVSDFRKDFQFYKVREINNYHHAHDAYLNAVVGTALIKKYPKLESEFVYGDYKVYDVRKMIAKSEQEIGKATAKYFFYSNIMNFFKTEITLANGEIRKRPLIETNGETGEIVWDKGRDFATVRKVLSMPQVNIVKKTEVQTGGFSKESILPKRNSDKLIARKKDWDPKKYGGFDSPTVAYSVLVVAKVEKGKSKKLKSVKELLGITIMERSSFEKNPIDFLEAKGYKEVKKDLIIKLPKYSLFELENGRKRMLASAGELQKGNELALPSKYVNFLYLASHYEKLKGSPEDNEQKQLFVEQHKHYLDEIIEQISEFSKRVILADANLDKVLSAYNKHRDKPIREQAENIIHLFTLTNLGAPAAFKYFDTTIDRKRYTSTKEVLDATLIHQSITGLYETRIDLSQLGGDGGGGGGGSPAPGGLDDEYRLYSPLVKPDQNIQFWLEQFPQAWAETAGMGLAKQVPPQVIQLKASATPVSVRQYPLSKEAQEGIRPHVQRLIQQGILVPVQSPWNTPLLPVRKPGTNDYRPVQDLREVNKRVQDIHPTVPNPYNLLCALPPQRSWYTVLDLKDAFFCLRLHPTSQPLFAFEWRDPGTGRTGQLTWTRLPQGFKNSPTIFNEALHRDLANFRIQHPQVTLLQYVDDLLLAGATKQDCLEGTKALLLELSDLGYRASAKKAQICRREVTYLGYSLRDGQRWLTEARKKTVVQIPAPTTAKQVREFLGKAGFCRLFIPGFATLAAPLYPLTKPKGEFSWAPEHQKAFDAIKKALLSAPALALPDVTKPFTLYVDERKGVARGVLTQTLGPWRRPVAYLSKKLDPVASGWPVCLKAIAAVAILVKDADKLTLGQNITVIAPHALENIVRQPPDRWMTNARMTHYQSLLLTERVTFAPPAALNPATLLPEETDEPVTHDCHQLLIEETGVRKDLTDIPLTGEVLTWFTDGSSYVVEGKRMAGAAVVDGTRTIWASSLPEGTSAQKAELMALTQALRLAEGKSINIYTDSRYAFATAHVHGAIYKQRGWLTSAGREIKNKEEILSLLEALHLPKRLAIIHCPGHQKAKDPISRGNQMADRVAKQAAQGVNLLPAGKRTADGSEFEKRTADGSEFESPKKKAKVE

SEQ ID NO: 198 - protein, 2086 aa, synthetic construct; identical to SEQ ID NO: 58
  source 1..2086: note = Description of Artificial Sequence: Synthetic polypeptide

SEQ ID NO: 199 - protein, 2088 aa, synthetic construct; identical to SEQ ID NO: 40
  source 1..2088: note = Description of Artificial Sequence: Synthetic polypeptide

SEQ ID NO: 200 - protein, 2088 aa, synthetic construct; identical to SEQ ID NO: 63
  source 1..2088: note = Description of Artificial Sequence: Synthetic polypeptide

SEQ ID NO: 201 - protein, 2089 aa, synthetic construct; identical to SEQ ID NO: 74
  source 1..2089: note = Description of Artificial Sequence: Synthetic polypeptide

SEQ ID NO: 202 - protein, 2092 aa, synthetic construct
  source 1..2092: note = Description of Artificial Sequence: Synthetic polypeptide
MPAAKRVKLDGGDKKYSIGLDIGTNSVGWAVITDEYKVPSKKFKVLGNTDRHSIKKNLIGALLFDSGETAEATRLKRTARRRYTRRKNRICYLQEIFSNEMAKVDDSFFHRLEESFLVEEDKKHERHPIFGNIVDEVAYHEKYPTIYHLRKKLVDSTDKADLRLIYLALAHMIKFRGHFLIEGDLNPDNSDVDKLFIQLVQTYNQLFEENPINASGVDAKAILSARLSKSRRLENLIAQLPGEKKNGLFGNLIALSLGLTPNFKSNFDLAEDAKLQLSKDTYDDDLDNLLAQIGDQYADLFLAAKNLSDAILLSDILRVNTEITKAPLSASMIKRYDEHHQDLTLLKALVRQQLPEKYKEIFFDQSKNGYAGYIDGGASQEEFYKFIKPILEKMDGTEELLVKLNREDLLRKQRTFDNGSIPHQIHLGELHAILRRQEDFYPFLKDNREKIEKILTFRIPYYVGPLARGNSRFAWMTRKSEETITPWNFEEVVDKGASAQSFIERMTNFDKNLPNEKVLPKHSLLYEYFTVYNELTKVKYVTEGMRKPAFLSGEQKKAIVDLLFKTNRKVTVKQLKEDYFKKIECFDSVEISGVEDRFNASLGTYHDLLKIIKDKDFLDNEENEDILEDIVLTLTLFEDREMIEERLKTYAHLFDDKVMKQLKRRRYTGWGRLSRKLINGIRDKQSGKTILDFLKSDGFANRNFMQLIHDDSLTFKEDIQKAQVSGQGDSLHEHIANLAGSPAIKKGILQTVKVVDELVKVMGRHKPENIVIEMARENQTTQKGQKNSRERMKRIEEGIKELGSQILKEHPVENTQLQNEKLYLYYLQNGRDMYVDQELDINRLSDYDVDHIVPQSFLKDDSIDNKVLTRSDKARGKSDNVPSEEVVKKMKNYWRQLLNAKLITQRKFDNLTKAERGGLSELDKAGFIKRQLVETRQITKHVAQILDSRMNTKYDENDKLIREVKVITLKSKLVSDFRKDFQFYKVREINNYHHAHDAYLNAVVGTALIKKYPKLESEFVYGDYKVYDVRKMIAKSEQEIGKATAKYFFYSNIMNFFKTEITLANGEIRKRPLIETNGETGEIVWDKGRDFATVRKVLSMPQVNIVKKTEVQTGGFSKESILPKRNSDKLIARKKDWDPKKYGGFDSPTVAYSVLVVAKVEKGKSKKLKSVKELLGITIMERSSFEKNPIDFLEAKGYKEVKKDLIIKLPKYSLFELENGRKRMLASAGELQKGNELALPSKYVNFLYLASHYEKLKGSPEDNEQKQLFVEQHKHYLDEIIEQISEFSKRVILADANLDKVLSAYNKHRDKPIREQAENIIHLFTLTNLGAPAAFKYFDTTIDRKRYTSTKEVLDATLIHQSITGLYETRIDLSQLGGDGGGSSGSSGSSGSSGSSGGLDDEYRLYSPLVKPDQNIQFWLEQFPQAWAETAGMGLAKQVPPQVIQLKASATPVSVRQYPLSKEAQEGIRPHVQRLIQQGILVPVQSPWNTPLLPVRKPGTNDYRPVQDLREVNKRVQDIHPTVPNPYNLLCALPPQRSWYTVLDLKDAFFCLRLHPTSQPLFAFEWRDPGTGRTGQLTWTRLPQGFKNSPTIFNEALHRDLANFRIQHPQVTLLQYVDDLLLAGATKQDCLEGTKALLLELSDLGYRASAKKAQICRREVTYLGYSLRDGQRWLTEARKKTVVQIPAPTTAKQVREFLGKAGFCRLFIPGFATLAAPLYPLTKPKGEFSWAPEHQKAFDAIKKALLSAPALALPDVTKPFTLYVDERKGVARGVLTQTLGPWRRPVAYLSKKLDPVASGWPVCLKAIAAVAILVKDADKLTLGQNITVIAPHALENIVRQPPDRWMTNARMTHYQSLLLTERVTFAPPAALNPATLLPEETDEPVTHDCHQLLIEETGVRKDLTDIPLTGEVLTWFTDGSSYVVEGKRMAGAAVVDGTRTIWASSLPEGTSAQKAELMALTQALRLAEGKSINIYTDSRYAFATAHVHGAIYKQRGWLTSAGREIKNKEEILSLLEALHLPKRLAIIHCPGHQKAKDPISRGNQMADRVAKQAAQGVNLLPAGKRTADGSEFEKRTADGSEFESPKKKAKVE

SEQ ID NO: 203 - protein, 2083 aa, synthetic construct; identical to SEQ ID NO: 76
  source 1..2083: note = Description of Artificial Sequence: Synthetic polypeptide

SEQ ID NO: 204 - protein, 2088 aa, synthetic construct; identical to SEQ ID NO: 71
  source 1..2088: note = Description of Artificial Sequence: Synthetic polypeptide

SEQ ID NO: 205 - protein, 2086 aa, synthetic construct; identical to SEQ ID NO: 73
  source 1..2086: note = Description of Artificial Sequence: Synthetic polypeptide

SEQ ID NO: 206 - protein, 2085 aa, synthetic construct; identical to SEQ ID NO: 57
  source 1..2085: note = Description of Artificial Sequence: Synthetic polypeptide

SEQ ID NO: 207 - protein, 2086 aa, synthetic construct; identical to SEQ ID NO: 43
  source 1..2086: note = Description of Artificial Sequence: Synthetic polypeptide

SEQ ID NO: 208 - protein, 2086 aa, synthetic construct
  source 1..2086: note = Description of Artificial Sequence: Synthetic polypeptide
MPAAKRVKLDGGDKKYSIGLDIGTNSVGWAVITDEYKVPSKKFKVLGNTDRHSIKKNLIGALLFDSGETAEATRLKRTARRRYTRRKNRICYLQEIFSNEMAKVDDSFFHRLEESFLVEEDKKHERHPIFGNIVDEVAYHEKYPTIYHLRKKLVDSTDKADLRLIYLALAHMIKFRGHFLIEGDLNPDNSDVDKLFIQLVQTYNQLFEENPINASGVDAKAILSARLSKSRRLENLIAQLPGEKKNGLFGNLIALSLGLTPNFKSNFDLAEDAKLQLSKDTYDDDLDNLLAQIGDQYADLFLAAKNLSDAILLSDILRVNTEITKAPLSASMIKRYDEHHQDLTLLKALVRQQLPEKYKEIFFDQSKNGYAGYIDGGASQEEFYKFIKPILEKMDGTEELLVKLNREDLLRKQRTFDNGSIPHQIHLGELHAILRRQEDFYPFLKDNREKIEKILTFRIPYYVGPLARGNSRFAWMTRKSEETITPWNFEEVVDKGASAQSFIERMTNFDKNLPNEKVLPKHSLLYEYFTVYNELTKVKYVTEGMRKPAFLSGEQKKAIVDLLFKTNRKVTVKQLKEDYFKKIECFDSVEISGVEDRFNASLGTYHDLLKIIKDKDFLDNEENEDILEDIVLTLTLFEDREMIEERLKTYAHLFDDKVMKQLKRRRYTGWGRLSRKLINGIRDKQSGKTILDFLKSDGFANRNFMQLIHDDSLTFKEDIQKAQVSGQGDSLHEHIANLAGSPAIKKGILQTVKVVDELVKVMGRHKPENIVIEMARENQTTQKGQKNSRERMKRIEEGIKELGSQILKEHPVENTQLQNEKLYLYYLQNGRDMYVDQELDINRLSDYDVDHIVPQSFLKDDSIDNKVLTRSDKARGKSDNVPSEEVVKKMKNYWRQLLNAKLITQRKFDNLTKAERGGLSELDKAGFIKRQLVETRQITKHVAQILDSRMNTKYDENDKLIREVKVITLKSKLVSDFRKDFQFYKVREINNYHHAHDAYLNAVVGTALIKKYPKLESEFVYGDYKVYDVRKMIAKSEQEIGKATAKYFFYSNIMNFFKTEITLANGEIRKRPLIETNGETGEIVWDKGRDFATVRKVLSMPQVNIVKKTEVQTGGFSKESILPKRNSDKLIARKKDWDPKKYGGFDSPTVAYSVLVVAKVEKGKSKKLKSVKELLGITIMERSSFEKNPIDFLEAKGYKEVKKDLIIKLPKYSLFELENGRKRMLASAGELQKGNELALPSKYVNFLYLASHYEKLKGSPEDNEQKQLFVEQHKHYLDEIIEQISEFSKRVILADANLDKVLSAYNKHRDKPIREQAENIIHLFTLTNLGAPAAFKYFDTTIDRKRYTSTKEVLDATLIHQSITGLYETRIDLSQLGGDGGGSSGSSGSSGGLDDEYRLYSPLVKPDQNIQFWLEQFPQAWAETAGMGLAKQVPPQVIQLKASATPVSVRQYPLSKEAQEGIRPHVQRLIQQGILVPVQSPWNTPLLPVRKPGTNDYRPVQDLREVNKRVQDIHPTVPNPYNLLCALPPQRSWYTVLDLKDAFFCLRLHPTSQPLFAFEWRDPGTGRTGQLTWTRLPQGFKNSPTIFNEALHRDLANFRIQHPQVTLLQYVDDLLLAGATKQDCLEGTKALLLELSDLGYRASAKKAQICRREVTYLGYSLRDGQRWLTEARKKTVVQIPAPTTAKQVREFLGKAGFCRLFIPGFATLAAPLYPLTKPKGEFSWAPEHQKAFDAIKKALLSAPALALPDVTKPFTLYVDERKGVARGVLTQTLGPWRRPVAYLSKKLDPVASGWPVCLKAIAAVAILVKDADKLTLGQNITVIAPHALENIVRQPPDRWMTNARMTHYQSLLLTERVTFAPPAALNPATLLPEETDEPVTHDCHQLLIEETGVRKDLTDIPLTGEVLTWFTDGSSYVVEGKRMAGAAVVDGTRTIWASSLPEGTSAQKAELMALTQALRLAEGKSINIYTDSRYAFATAHVHGAIYKQRGWLTSAGREIKNKEEILSLLEALHLPKRLAIIHCPGHQKAKDPISRGNQMADRVAKQAAQGVNLLPAGKRTADGSEFEKRTADGSEFESPKKKAKVE

SEQ ID NO: 209 - protein, 2088 aa, synthetic construct
  source 1..2088: note = Description of Artificial Sequence: Synthetic polypeptide
MPAAKRVKLDGGDKKYSIGLDIGTNSVGWAVITDEYKVPSKKFKVLGNTDRHSIKKNLIGALLFDSGETAEATRLKRTARRRYTRRKNRICYLQEIFSNEMAKVDDSFFHRLEESFLVEEDKKHERHPIFGNIVDEVAYHEKYPTIYHLRKKLVDSTDKADLRLIYLALAHMIKFRGHFLIEGDLNPDNSDVDKLFIQLVQTYNQLFEENPINASGVDAKAILSARLSKSRRLENLIAQLPGEKKNGLFGNLIALSLGLTPNFKSNFDLAEDAKLQLSKDTYDDDLDNLLAQIGDQYADLFLAAKNLSDAILLSDILRVNTEITKAPLSASMIKRYDEHHQDLTLLKALVRQQLPEKYKEIFFDQSKNGYAGYIDGGASQEEFYKFIKPILEKMDGTEELLVKLNREDLLRKQRTFDNGSIPHQIHLGELHAILRRQEDFYPFLKDNREKIEKILTFRIPYYVGPLARGNSRFAWMTRKSEETITPWNFEEVVDKGASAQSFIERMTNFDKNLPNEKVLPKHSLLYEYFTVYNELTKVKYVTEGMRKPAFLSGEQKKAIVDLLFKTNRKVTVKQLKEDYFKKIECFDSVEISGVEDRFNASLGTYHDLLKIIKDKDFLDNEENEDILEDIVLTLTLFEDREMIEERLKTYAHLFDDKVMKQLKRRRYTGWGRLSRKLINGIRDKQSGKTILDFLKSDGFANRNFMQLIHDDSLTFKEDIQKAQVSGQGDSLHEHIANLAGSPAIKKGILQTVKVVDELVKVMGRHKPENIVIEMARENQTTQKGQKNSRERMKRIEEGIKELGSQILKEHPVENTQLQNEKLYLYYLQNGRDMYVDQELDINRLSDYDVDHIVPQSFLKDDSIDNKVLTRSDKARGKSDNVPSEEVVKKMKNYWRQLLNAKLITQRKFDNLTKAERGGLSELDKAGFIKRQLVETRQITKHVAQILDSRMNTKYDENDKLIREVKVITLKSKLVSDFRKDFQFYKVREINNYHHAHDAYLNAVVGTALIKKYPKLESEFVYGDYKVYDVRKMIAKSEQEIGKATAKYFFYSNIMNFFKTEITLANGEIRKRPLIETNGETGEIVWDKGRDFATVRKVLSMPQVNIVKKTEVQTGGFSKESILPKRNSDKLIARKKDWDPKKYGGFDSPTVAYSVLVVAKVEKGKSKKLKSVKELLGITIMERSSFEKNPIDFLEAKGYKEVKKDLIIKLPKYSLFELENGRKRMLASAGELQKGNELALPSKYVNFLYLASHYEKLKGSPEDNEQKQLFVEQHKHYLDEIIEQISEFSKRVILADANLDKVLSAYNKHRDKPIREQAENIIHLFTLTNLGAPAAFKYFDTTIDRKRYTSTKEVLDATLIHQSITGLYETRIDLSQLGGDGGGSSEAAAKPAPGGLDDEYRLYSPLVKPDQNIQFWLEQFPQAWAETAGMGLAKQVPPQVIQLKASATPVSVRQYPLSKEAQEGIRPHVQRLIQQGILVPVQSPWNTPLLPVRKPGTNDYRPVQDLREVNKRVQDIHPTVPNPYNLLCALPPQRSWYTVLDLKDAFFCLRLHPTSQPLFAFEWRDPGTGRTGQLTWTRLPQGFKNSPTIFNEALHRDLANFRIQHPQVTLLQYVDDLLLAGATKQDCLEGTKALLLELSDLGYRASAKKAQICRREVTYLGYSLRDGQRWLTEARKKTVVQIPAPTTAKQVREFLGKAGFCRLFIPGFATLAAPLYPLTKPKGEFSWAPEHQKAFDAIKKALLSAPALALPDVTKPFTLYVDERKGVARGVLTQTLGPWRRPVAYLSKKLDPVASGWPVCLKAIAAVAILVKDADKLTLGQNITVIAPHALENIVRQPPDRWMTNARMTHYQSLLLTERVTFAPPAALNPATLLPEETDEPVTHDCHQLLIEETGVRKDLTDIPLTGEVLTWFTDGSSYVVEGKRMAGAAVVDGTRTIWASSLPEGTSAQKAELMALTQALRLAEGKSINIYTDSRYAFATAHVHGAIYKQRGWLTSAGREIKNKEEILSLLEALHLPKRLAIIHCPGHQKAKDPISRGNQMADRVAKQAAQGVNLLPAGKRTADGSEFEKRTADGSEFESPKKKAKVE

SEQ ID NO: 210 - protein, 2086 aa, synthetic construct; identical to SEQ ID NO: 89
  source 1..2086: note = Description of Artificial Sequence: Synthetic polypeptide

SEQ ID NO: 211 - protein, 2088 aa, synthetic construct; identical to SEQ ID NO: 42
  source 1..2088: note = Description of Artificial Sequence: Synthetic polypeptide

SEQ ID NO: 212 - protein, 2083 aa, synthetic construct
  source 1..2083: note = Description of Artificial Sequence: Synthetic polypeptide
MPAAKRVKLDGGDKKYSIGLDIGTNSVGWAVITDEYKVPSKKFKVLGNTDRHSIKKNLIGALLFDSGETAEATRLKRTARRRYTRRKNRICYLQEIFSNEMAKVDDSFFHRLEESFLVEEDKKHERHPIFGNIVDEVAYHEKYPTIYHLRKKLVDSTDKADLRLIYLALAHMIKFRGHFLIEGDLNPDNSDVDKLFIQLVQTYNQLFEENPINASGVDAKAILSARLSKSRRLENLIAQLPGEKKNGLFGNLIALSLGLTPNFKSNFDLAEDAKLQLSKDTYDDDLDNLLAQIGDQYADLFLAAKNLSDAILLSDILRVNTEITKAPLSASMIKRYDEHHQDLTLLKALVRQQLPEKYKEIFFDQSKNGYAGYIDGGASQEEFYKFIKPILEKMDGTEELLVKLNREDLLRKQRTFDNGSIPHQIHLGELHAILRRQEDFYPFLKDNREKIEKILTFRIPYYVGPLARGNSRFAWMTRKSEETITPWNFEEVVDKGASAQSFIERMTNFDKNLPNEKVLPKHSLLYEYFTVYNELTKVKYVTEGMRKPAFLSGEQKKAIVDLLFKTNRKVTVKQLKEDYFKKIECFDSVEISGVEDRFNASLGTYHDLLKIIKDKDFLDNEENEDILEDIVLTLTLFEDREMIEERLKTYAHLFDDKVMKQLKRRRYTGWGRLSRKLINGIRDKQSGKTILDFLKSDGFANRNFMQLIHDDSLTFKEDIQKAQVSGQGDSLHEHIANLAGSPAIKKGILQTVKVVDELVKVMGRHKPENIVIEMARENQTTQKGQKNSRERMKRIEEGIKELGSQILKEHPVENTQLQNEKLYLYYLQNGRDMYVDQELDINRLSDYDVDHIVPQSFLKDDSIDNKVLTRSDKARGKSDNVPSEEVVKKMKNYWRQLLNAKLITQRKFDNLTKAERGGLSELDKAGFIKRQLVETRQITKHVAQILDSRMNTKYDENDKLIREVKVITLKSKLVSDFRKDFQFYKVREINNYHHAHDAYLNAVVGTALIKKYPKLESEFVYGDYKVYDVRKMIAKSEQEIGKATAKYFFYSNIMNFFKTEITLANGEIRKRPLIETNGETGEIVWDKGRDFATVRKVLSMPQVNIVKKTEVQTGGFSKESILPKRNSDKLIARKKDWDPKKYGGFDSPTVAYSVLVVAKVEKGKSKKLKSVKELLGITIMERSSFEKNPIDFLEAKGYKEVKKDLIIKLPKYSLFELENGRKRMLASAGELQKGNELALPSKYVNFLYLASHYEKLKGSPEDNEQKQLFVEQHKHYLDEIIEQISEFSKRVILADANLDKVLSAYNKHRDKPIREQAENIIHLFTLTNLGAPAAFKYFDTTIDRKRYTSTKEVLDATLIHQSITGLYETRIDLSQLGGDGGGGSGSSGGLDDEYRLYSPLVKPDQNIQFWLEQFPQAWAETAGMGLAKQVPPQVIQLKASATPVSVRQYPLSKEAQEGIRPHVQRLIQQGILVPVQSPWNTPLLPVRKPGTNDYRPVQDLREVNKRVQDIHPTVPNPYNLLCALPPQRSWYTVLDLKDAFFCLRLHPTSQPLFAFEWRDPGTGRTGQLTWTRLPQGFKNSPTIFNEALHRDLANFRIQHPQVTLLQYVDDLLLAGATKQDCLEGTKALLLELSDLGYRASAKKAQICRREVTYLGYSLRDGQRWLTEARKKTVVQIPAPTTAKQVREFLGKAGFCRLFIPGFATLAAPLYPLTKPKGEFSWAPEHQKAFDAIKKALLSAPALALPDVTKPFTLYVDERKGVARGVLTQTLGPWRRPVAYLSKKLDPVASGWPVCLKAIAAVAILVKDADKLTLGQNITVIAPHALENIVRQPPDRWMTNARMTHYQSLLLTERVTFAPPAALNPATLLPEETDEPVTHDCHQLLIEETGVRKDLTDIPLTGEVLTWFTDGSSYVVEGKRMAGAAVVDGTRTIWASSLPEGTSAQKAELMALTQALRLAEGKSINIYTDSRYAFATAHVHGAIYKQRGWLTSAGREIKNKEEILSLLEALHLPKRLAIIHCPGHQKAKDPISRGNQMADRVAKQAAQGVNLLPAGKRTADGSEFEKRTADGSEFESPKKKAKVE

SEQ ID NO: 213 - protein, 2086 aa, synthetic construct
  source 1..2086: note = Description of Artificial Sequence: Synthetic polypeptide
MPAAKRVKLDGGDKKYSIGLDIGTNSVGWAVITDEYKVPSKKFKVLGNTDRHSIKKNLIGALLFDSGETAEATRLKRTARRRYTRRKNRICYLQEIFSNEMAKVDDSFFHRLEESFLVEEDKKHERHPIFGNIVDEVAYHEKYPTIYHLRKKLVDSTDKADLRLIYLALAHMIKFRGHFLIEGDLNPDNSDVDKLFIQLVQTYNQLFEENPINASGVDAKAILSARLSKSRRLENLIAQLPGEKKNGLFGNLIALSLGLTPNFKSNFDLAEDAKLQLSKDTYDDDLDNLLAQIGDQYADLFLAAKNLSDAILLSDILRVNTEITKAPLSASMIKRYDEHHQDLTLLKALVRQQLPEKYKEIFFDQSKNGYAGYIDGGASQEEFYKFIKPILEKMDGTEELLVKLNREDLLRKQRTFDNGSIPHQIHLGELHAILRRQEDFYPFLKDNREKIEKILTFRIPYYVGPLARGNSRFAWMTRKSEETITPWNFEEVVDKGASAQSFIERMTNFDKNLPNEKVLPKHSLLYEYFTVYNELTKVKYVTEGMRKPAFLSGEQKKAIVDLLFKTNRKVTVKQLKEDYFKKIECFDSVEISGVEDRFNASLGTYHDLLKIIKDKDFLDNEENEDILEDIVLTLTLFEDREMIEERLKTYAHLFDDKVMKQLKRRRYTGWGRLSRKLINGIRDKQSGKTILDFLKSDGFANRNFMQLIHDDSLTFKEDIQKAQVSGQGDSLHEHIANLAGSPAIKKGILQTVKVVDELVKVMGRHKPENIVIEMARENQTTQKGQKNSRERMKRIEEGIKELGSQILKEHPVENTQLQNEKLYLYYLQNGRDMYVDQELDINRLSDYDVDHIVPQSFLKDDSIDNKVLTRSDKARGKSDNVPSEEVVKKMKNYWRQLLNAKLITQRKFDNLTKAERGGLSELDKAGFIKRQLVETRQITKHVAQILDSRMNTKYDENDKLIREVKVITLKSKLVSDFRKDFQFYKVREINNYHHAHDAYLNAVVGTALIKKYPKLESEFVYGDYKVYDVRKMIAKSEQEIGKATAKYFFYSNIMNFFKTEITLANGEIRKRPLIETNGETGEIVWDKGRDFATVRKVLSMPQVNIVKKTEVQTGGFSKESILPKRNSDKLIARKKDWDPKKYGGFDSPTVAYSVLVVAKVEKGKSKKLKSVKELLGITIMERSSFEKNPIDFLEAKGYKEVKKDLIIKLPKYSLFELENGRKRMLASAGELQKGNELALPSKYVNFLYLASHYEKLKGSPEDNEQKQLFVEQHKHYLDEIIEQISEFSKRVILADANLDKVLSAYNKHRDKPIREQAENIIHLFTLTNLGAPAAFKYFDTTIDRKRYTSTKEVLDATLIHQSITGLYETRIDLSQLGGDGGGGSGGGPAPGGLDDEYRLYSPLVKPDQNIQFWLEQFPQAWAETAGMGLAKQVPPQVIQLKASATPVSVRQYPLSKEAQEGIRPHVQRLIQQGILVPVQSPWNTPLLPVRKPGTNDYRPVQDLREVNKRVQDIHPTVPNPYNLLCALPPQRSWYTVLDLKDAFFCLRLHPTSQPLFAFEWRDPGTGRTGQLTWTRLPQGFKNSPTIFNEALHRDLANFRIQHPQVTLLQYVDDLLLAGATKQDCLEGTKALLLELSDLGYRASAKKAQICRREVTYLGYSLRDGQRWLTEARKKTVVQIPAPTTAKQVREFLGKAGFCRLFIPGFATLAAPLYPLTKPKGEFSWAPEHQKAFDAIKKALLSAPALALPDVTKPFTLYVDERKGVARGVLTQTLGPWRRPVAYLSKKLDPVASGWPVCLKAIAAVAILVKDADKLTLGQNITVIAPHALENIVRQPPDRWMTNARMTHYQSLLLTERVTFAPPAALNPATLLPEETDEPVTHDCHQLLIEETGVRKDLTDIPLTGEVLTWFTDGSSYVVEGKRMAGAAVVDGTRTIWASSLPEGTSAQKAELMALTQALRLAEGKSINIYTDSRYAFATAHVHGAIYKQRGWLTSAGREIKNKEEILSLLEALHLPKRLAIIHCPGHQKAKDPISRGNQMADRVAKQAAQGVNLLPAGKRTADGSEFEKRTADGSEFESPKKKAKVE

SEQ ID NO: 214 - protein, 2095 aa, synthetic construct
  source 1..2095: note = Description of Artificial Sequence: Synthetic polypeptide
MPAAKRVKLDGGDKKYSIGLDIGTNSVGWAVITDEYKVPSKKFKVLGNTDRHSIKKNLIGALLFDSGETAEATRLKRTARRRYTRRKNRICYLQEIFSNEMAKVDDSFFHRLEESFLVEEDKKHERHPIFGNIVDEVAYHEKYPTIYHLRKKLVDSTDKADLRLIYLALAHMIKFRGHFLIEGDLNPDNSDVDKLFIQLVQTYNQLFEENPINASGVDAKAILSARLSKSRRLENLIAQLPGEKKNGLFGNLIALSLGLTPNFKSNFDLAEDAKLQLSKDTYDDDLDNLLAQIGDQYADLFLAAKNLSDAILLSDILRVNTEITKAPLSASMIKRYDEHHQDLTLLKALVRQQLPEKYKEIFFDQSKNGYAGYIDGGASQEEFYKFIKPILEKMDGTEELLVKLNREDLLRKQRTFDNGSIPHQIHLGELHAILRRQEDFYPFLKDNREKIEKILTFRIPYYVGPLARGNSRFAWMTRKSEETITPWNFEEVVDKGASAQSFIERMTNFDKNLPNEKVLPKHSLLYEYFTVYNELTKVKYVTEGMRKPAFLSGEQKKAIVDLLFKTNRKVTVKQLKEDYFKKIECFDSVEISGVEDRFNASLGTYHDLLKIIKDKDFLDNEENEDILEDIVLTLTLFEDREMIEERLKTYAHLFDDKVMKQLKRRRYTGWGRLSRKLINGIRDKQSGKTILDFLKSDGFANRNFMQLIHDDSLTFKEDIQKAQVSGQGDSLHEHIANLAGSPAIKKGILQTVKVVDELVKVMGRHKPENIVIEMARENQTTQKGQKNSRERMKRIEEGIKELGSQILKEHPVENTQLQNEKLYLYYLQNGRDMYVDQELDINRLSDYDVDHIVPQSFLKDDSIDNKVLTRSDKARGKSDNVPSEEVVKKMKNYWRQLLNAKLITQRKFDNLTKAERGGLSELDKAGFIKRQLVETRQITKHVAQILDSRMNTKYDENDKLIREVKVITLKSKLVSDFRKDFQFYKVREINNYHHAHDAYLNAVVGTALIKKYPKLESEFVYGDYKVYDVRKMIAKSEQEIGKATAKYFFYSNIMNFFKTEITLANGEIRKRPLIETNGETGEIVWDKGRDFATVRKVLSMPQVNIVKKTEVQTGGFSKESILPKRNSDKLIARKKDWDPKKYGGFDSPTVAYSVLVVAKVEKGKSKKLKSVKELLGITIMERSSFEKNPIDFLEAKGYKEVKKDLIIKLPKYSLFELENGRKRMLASAGELQKGNELALPSKYVNFLYLASHYEKLKGSPEDNEQKQLFVEQHKHYLDEIIEQISEFSKRVILADANLDKVLSAYNKHRDKPIREQAENIIHLFTLTNLGAPAAFKYFDTTIDRKRYTSTKEVLDATLIHQSITGLYETRIDLSQLGGDGGGSSGSSGSSGSSGSSGSSGGLDDEYRLYSPLVKPDQNIQFWLEQFPQAWAETAGMGLAKQVPPQVIQLKASATPVSVRQYPLSKEAQEGIRPHVQRLIQQGILVPVQSPWNTPLLPVRKPGTNDYRPVQDLREVNKRVQDIHPTVPNPYNLLCALPPQRSWYTVLDLKDAFFCLRLHPTSQPLFAFEWRDPGTGRTGQLTWTRLPQGFKNSPTIFNEALHRDLANFRIQHPQVTLLQYVDDLLLAGATKQDCLEGTKALLLELSDLGYRASAKKAQICRREVTYLGYSLRDGQRWLTEARKKTVVQIPAPTTAKQVREFLGKAGFCRLFIPGFATLAAPLYPLTKPKGEFSWAPEHQKAFDAIKKALLSAPALALPDVTKPFTLYVDERKGVARGVLTQTLGPWRRPVAYLSKKLDPVASGWPVCLKAIAAVAILVKDADKLTLGQNITVIAPHALENIVRQPPDRWMTNARMTHYQSLLLTERVTFAPPAALNPATLLPEETDEPVTHDCHQLLIEETGVRKDLTDIPLTGEVLTWFTDGSSYVVEGKRMAGAAVVDGTRTIWASSLPEGTSAQKAELMALTQALRLAEGKSINIYTDSRYAFATAHVHGAIYKQRGWLTSAGREIKNKEEILSLLEALHLPKRLAIIHCPGHQKAKDPISRGNQMADRVAKQAAQGVNLLPAGKRTADGSEFEKRTADGSEFESPKKKAKVE

SEQ ID NO: 215 - protein, 2097 aa, synthetic construct; identical to SEQ ID NO: 46
  source 1..2097: note = Description of Artificial Sequence: Synthetic polypeptide

SEQ ID NO: 216 - protein, 2092 aa, synthetic construct; identical to SEQ ID NO: 51
  source 1..2092: note = Description of Artificial Sequence: Synthetic polypeptide

SEQ ID NO: 217 - protein, 2088 aa, synthetic construct
  source 1..2088: note = Description of Artificial Sequence: Synthetic polypeptide
MPAAKRVKLDGGDKKYSIGLDIGTNSVGWAVITDEYKVPSKKFKVLGNTDRHSIKKNLIGALLFDSGETAEATRLKRTARRRYTRRKNRICYLQEIFSNEMAKVDDSFFHRLEESFLVEEDKKHERHPIFGNIVDEVAYHEKYPTIYHLRKKLVDSTDKADLRLIYLALAHMIKFRGHFLIEGDLNPDNSDVDKLFIQLVQTYNQLFEENPINASGVDAKAILSARLSKSRRLENLIAQLPGEKKNGLFGNLIALSLGLTPNFKSNFDLAEDAKLQLSKDTYDDDLDNLLAQIGDQYADLFLAAKNLSDAILLSDILRVNTEITKAPLSASMIKRYDEHHQDLTLLKALVRQQLPEKYKEIFFDQSKNGYAGYIDGGASQEEFYKFIKPILEKMDGTEELLVKLNREDLLRKQRTFDNGSIPHQIHLGELHAILRRQEDFYPFLKDNREKIEKILTFRIPYYVGPLARGNSRFAWMTRKSEETITPWNFEEVVDKGASAQSFIERMTNFDKNLPNEKVLPKHSLLYEYFTVYNELTKVKYVTEGMRKPAFLSGEQKKAIVDLLFKTNRKVTVKQLKEDYFKKIECFDSVEISGVEDRFNASLGTYHDLLKIIKDKDFLDNEENEDILEDIVLTLTLFEDREMIEERLKTYAHLFDDKVMKQLKRRRYTGWGRLSRKLINGIRDKQSGKTILDFLKSDGFANRNFMQLIHDDSLTFKEDIQKAQVSGQGDSLHEHIANLAGSPAIKKGILQTVKVVDELVKVMGRHKPENIVIEMARENQTTQKGQKNSRERMKRIEEGIKELGSQILKEHPVENTQLQNEKLYLYYLQNGRDMYVDQELDINRLSDYDVDHIVPQSFLKDDSIDNKVLTRSDKARGKSDNVPSEEVVKKMKNYWRQLLNAKLITQRKFDNLTKAERGGLSELDKAGFIKRQLVETRQITKHVAQILDSRMNTKYDENDKLIREVKVITLKSKLVSDFRKDFQFYKVREINNYHHAHDAYLNAVVGTALIKKYPKLESEFVYGDYKVYDVRKMIAKSEQEIGKATAKYFFYSNIMNFFKTEITLANGEIRKRPLIETNGETGEIVWDKGRDFATVRKVLSMPQVNIVKKTEVQTGGFSKESILPKRNSDKLIARKKDWDPKKYGGFDSPTVAYSVLVVAKVEKGKSKKLKSVKELLGITIMERSSFEKNPIDFLEAKGYKEVKKDLIIKLPKYSLFELENGRKRMLASAGELQKGNELALPSKYVNFLYLASHYEKLKGSPEDNEQKQLFVEQHKHYLDEIIEQISEFSKRVILADANLDKVLSAYNKHRDKPIREQAENIIHLFTLTNLGAPAAFKYFDTTIDRKRYTSTKEVLDATLIHQSITGLYETRIDLSQLGGDGGPAPGGSEAAAKGGLDDEYRLYSPLVKPDQNIQFWLEQFPQAWAETAGMGLAKQVPPQVIQLKASATPVSVRQYPLSKEAQEGIRPHVQRLIQQGILVPVQSPWNTPLLPVRKPGTNDYRPVQDLREVNKRVQDIHPTVPNPYNLLCALPPQRSWYTVLDLKDAFFCLRLHPTSQPLFAFEWRDPGTGRTGQLTWTRLPQGFKNSPTIFNEALHRDLANFRIQHPQVTLLQYVDDLLLAGATKQDCLEGTKALLLELSDLGYRASAKKAQICRREVTYLGYSLRDGQRWLTEARKKTVVQIPAPTTAKQVREFLGKAGFCRLFIPGFATLAAPLYPLTKPKGEFSWAPEHQKAFDAIKKALLSAPALALPDVTKPFTLYVDERKGVARGVLTQTLGPWRRPVAYLSKKLDPVASGWPVCLKAIAAVAILVKDADKLTLGQNITVIAPHALENIVRQPPDRWMTNARMTHYQSLLLTERVTFAPPAALNPATLLPEETDEPVTHDCHQLLIEETGVRKDLTDIPLTGEVLTWFTDGSSYVVEGKRMAGAAVVDGTRTIWASSLPEGTSAQKAELMALTQALRLAEGKSINIYTDSRYAFATAHVHGAIYKQRGWLTSAGREIKNKEEILSLLEALHLPKRLAIIHCPGHQKAKDPISRGNQMADRVAKQAAQGVNLLPAGKRTADGSEFEKRTADGSEFESPKKKAKVE

SEQ ID NO: 218 - protein, 2082 aa, synthetic construct; identical to SEQ ID NO: 70
  source 1..2082: note = Description of Artificial Sequence: Synthetic polypeptide

SEQ ID NO: 219 - protein, 2085 aa, synthetic construct; identical to SEQ ID NO: 48
  source 1..2085: note = Description of Artificial Sequence: Synthetic polypeptide

SEQ ID NO: 220 - protein, 2086 aa, synthetic construct
  source 1..2086: note = Description of Artificial Sequence: Synthetic polypeptide
MPAAKRVKLDGGDKKYSIGLDIGTNSVGWAVITDEYKVPSKKFKVLGNTDRHSIKKNLIGALLFDSGETAEATRLKRTARRRYTRRKNRICYLQEIFSNEMAKVDDSFFHRLEESFLVEEDKKHERHPIFGNIVDEVAYHEKYPTIYHLRKKLVDSTDKADLRLIYLALAHMIKFRGHFLIEGDLNPDNSDVDKLFIQLVQTYNQLFEENPINASGVDAKAILSARLSKSRRLENLIAQLPGEKKNGLFGNLIALSLGLTPNFKSNFDLAEDAKLQLSKDTYDDDLDNLLAQIGDQYADLFLAAKNLSDAILLSDILRVNTEITKAPLSASMIKRYDEHHQDLTLLKALVRQQLPEKYKEIFFDQSKNGYAGYIDGGASQEEFYKFIKPILEKMDGTEELLVKLNREDLLRKQRTFDNGSIPHQIHLGELHAILRRQEDFYPFLKDNREKIEKILTFRIPYYVGPLARGNSRFAWMTRKSEETITPWNFEEVVDKGASAQSFIERMTNFDKNLPNEKVLPKHSLLYEYFTVYNELTKVKYVTEGMRKPAFLSGEQKKAIVDLLFKTNRKVTVKQLKEDYFKKIECFDSVEISGVEDRFNASLGTYHDLLKIIKDKDFLDNEENEDILEDIVLTLTLFEDREMIEERLKTYAHLFDDKVMKQLKRRRYTGWGRLSRKLINGIRDKQSGKTILDFLKSDGFANRNFMQLIHDDSLTFKEDIQKAQVSGQGDSLHEHIANLAGSPAIKKGILQTVKVVDELVKVMGRHKPENIVIEMARENQTTQKGQKNSRERMKRIEEGIKELGSQILKEHPVENTQLQNEKLYLYYLQNGRDMYVDQELDINRLSDYDVDHIVPQSFLKDDSIDNKVLTRSDKARGKSDNVPSEEVVKKMKNYWRQLLNAKLITQRKFDNLTKAERGGLSELDKAGFIKRQLVETRQITKHVAQILDSRMNTKYDENDKLIREVKVITLKSKLVSDFRKDFQFYKVREINNYHHAHDAYLNAVVGTALIKKYPKLESEFVYGDYKVYDVRKMIAKSEQEIGKATAKYFFYSNIMNFFKTEITLANGEIRKRPLIETNGETGEIVWDKGRDFATVRKVLSMPQVNIVKKTEVQTGGFSKESILPKRNSDKLIARKKDWDPKKYGGFDSPTVAYSVLVVAKVEKGKSKKLKSVKELLGITIMERSSFEKNPIDFLEAKGYKEVKKDLIIKLPKYSLFELENGRKRMLASAGELQKGNELALPSKYVNFLYLASHYEKLKGSPEDNEQKQLFVEQHKHYLDEIIEQISEFSKRVILADANLDKVLSAYNKHRDKPIREQAENIIHLFTLTNLGAPAAFKYFDTTIDRKRYTSTKEVLDATLIHQSITGLYETRIDLSQLGGDGGGGGPAPGSSGGLDDEYRLYSPLVKPDQNIQFWLEQFPQAWAETAGMGLAKQVPPQVIQLKASATPVSVRQYPLSKEAQEGIRPHVQRLIQQGILVPVQSPWNTPLLPVRKPGTNDYRPVQDLREVNKRVQDIHPTVPNPYNLLCALPPQRSWYTVLDLKDAFFCLRLHPTSQPLFAFEWRDPGTGRTGQLTWTRLPQGFKNSPTIFNEALHRDLANFRIQHPQVTLLQYVDDLLLAGATKQDCLEGTKALLLELSDLGYRASAKKAQICRREVTYLGYSLRDGQRWLTEARKKTVVQIPAPTTAKQVREFLGKAGFCRLFIPGFATLAAPLYPLTKPKGEFSWAPEHQKAFDAIKKALLSAPALALPDVTKPFTLYVDERKGVARGVLTQTLGPWRRPVAYLSKKLDPVASGWPVCLKAIAAVAILVKDADKLTLGQNITVIAPHALENIVRQPPDRWMTNARMTHYQSLLLTERVTFAPPAALNPATLLPEETDEPVTHDCHQLLIEETGVRKDLTDIPLTGEVLTWFTDGSSYVVEGKRMAGAAVVDGTRTIWASSLPEGTSAQKAELMALTQALRLAEGKSINIYTDSRYAFATAHVHGAIYKQRGWLTSAGREIKNKEEILSLLEALHLPKRLAIIHCPGHQKAKDPISRGNQMADRVAKQAAQGVNLLPAGKRTADGSEFEKRTADGSEFESPKKKAKVE

SEQ ID NO: 221 - protein, 2085 aa, synthetic construct
  source 1..2085: note = Description of Artificial Sequence: Synthetic polypeptide
MPAAKRVKLDGGDKKYSIGLDIGTNSVGWAVITDEYKVPSKKFKVLGNTDRHSIKKNLIGALLFDSGETAEATRLKRTARRRYTRRKNRICYLQEIFSNEMAKVDDSFFHRLEESFLVEEDKKHERHPIFGNIVDEVAYHEKYPTIYHLRKKLVDSTDKADLRLIYLALAHMIKFRGHFLIEGDLNPDNSDVDKLFIQLVQTYNQLFEENPINASGVDAKAILSARLSKSRRLENLIAQLPGEKKNGLFGNLIALSLGLTPNFKSNFDLAEDAKLQLSKDTYDDDLDNLLAQIGDQYADLFLAAKNLSDAILLSDILRVNTEITKAPLSASMIKRYDEHHQDLTLLKALVRQQLPEKYKEIFFDQSKNGYAGYIDGGASQEEFYKFIKPILEKMDGTEELLVKLNREDLLRKQRTFDNGSIPHQIHLGELHAILRRQEDFYPFLKDNREKIEKILTFRIPYYVGPLARGNSRFAWMTRKSEETITPWNFEEVVDKGASAQSFIERMTNFDKNLPNEKVLPKHSLLYEYFTVYNELTKVKYVTEGMRKPAFLSGEQKKAIVDLLFKTNRKVTVKQLKEDYFKKIECFDSVEISGVEDRFNASLGTYHDLLKIIKDKDFLDNEENEDILEDIVLTLTLFEDREMIEERLKTYAHLFDDKVMKQLKRRRYTGWGRLSRKLINGIRDKQSGKTILDFLKSDGFANRNFMQLIHDDSLTFKEDIQKAQVSGQGDSLHEHIANLAGSPAIKKGILQTVKVVDELVKVMGRHKPENIVIEMARENQTTQKGQKNSRERMKRIEEGIKELGSQILKEHPVENTQLQNEKLYLYYLQNGRDMYVDQELDINRLSDYDVDHIVPQSFLKDDSIDNKVLTRSDKARGKSDNVPSEEVVKKMKNYWRQLLNAKLITQRKFDNLTKAERGGLSELDKAGFIKRQLVETRQITKHVAQILDSRMNTKYDENDKLIREVKVITLKSKLVSDFRKDFQFYKVREINNYHHAHDAYLNAVVGTALIKKYPKLESEFVYGDYKVYDVRKMIAKSEQEIGKATAKYFFYSNIMNFFKTEITLANGEIRKRPLIETNGETGEIVWDKGRDFATVRKVLSMPQVNIVKKTEVQTGGFSKESILPKRNSDKLIARKKDWDPKKYGGFDSPTVAYSVLVVAKVEKGKSKKLKSVKELLGITIMERSSFEKNPIDFLEAKGYKEVKKDLIIKLPKYSLFELENGRKRMLASAGELQKGNELALPSKYVNFLYLASHYEKLKGSPEDNEQKQLFVEQHKHYLDEIIEQISEFSKRVILADANLDKVLSAYNKHRDKPIREQAENIIHLFTLTNLGAPAAFKYFDTTIDRKRYTSTKEVLDATLIHQSITGLYETRIDLSQLGGDGGEAAAKGGSGGLDDEYRLYSPLVKPDQNIQFWLEQFPQAWAETAGMGLAKQVPPQVIQLKASATPVSVRQYPLSKEAQEGIRPHVQRLIQQGILVPVQSPWNTPLLPVRKPGTNDYRPVQDLREVNKRVQDIHPTVPNPYNLLCALPPQRSWYTVLDLKDAFFCLRLHPTSQPLFAFEWRDPGTGRTGQLTWTRLPQGFKNSPTIFNEALHRDLANFRIQHPQVTLLQYVDDLLLAGATKQDCLEGTKALLLELSDLGYRASAKKAQICRREVTYLGYSLRDGQRWLTEARKKTVVQIPAPTTAKQVREFLGKAGFCRLFIPGFATLAAPLYPLTKPKGEFSWAPEHQKAFDAIKKALLSAPALALPDVTKPFTLYVDERKGVARGVLTQTLGPWRRPVAYLSKKLDPVASGWPVCLKAIAAVAILVKDADKLTLGQNITVIAPHALENIVRQPPDRWMTNARMTHYQSLLLTERVTFAPPAALNPATLLPEETDEPVTHDCHQLLIEETGVRKDLTDIPLTGEVLTWFTDGSSYVVEGKRMAGAAVVDGTRTIWASSLPEGTSAQKAELMALTQALRLAEGKSINIYTDSRYAFATAHVHGAIYKQRGWLTSAGREIKNKEEILSLLEALHLPKRLAIIHCPGHQKAKDPISRGNQMADRVAKQAAQGVNLLPAGKRTADGSEFEKRTADGSEFESPKKKAKVE

SEQ ID NO: 222 - protein, 2083 aa, synthetic construct
  source 1..2083: note = Description of Artificial Sequence: Synthetic polypeptide
MPAAKRVKLDGGDKKYSIGLDIGTNSVGWAVITDEYKVPSKKFKVLGNTDRHSIKKNLIGALLFDSGETAEATRLKRTARRRYTRRKNRICYLQEIFSNEMAKVDDSFFHRLEESFLVEEDKKHERHPIFGNIVDEVAYHEKYPTIYHLRKKLVDSTDKADLRLIYLALAHMIKFRGHFLIEGDLNPDNSDVDKLFIQLVQTYNQLFEENPINASGVDAKAILSARLSKSRRLENLIAQLPGEKKNGLFGNLIALSLGLTPNFKSNFDLAEDAKLQLSKDTYDDDLDNLLAQIGDQYADLFLAAKNLSDAILLSDILRVNTEITKAPLSASMIKRYDEHHQDLTLLKALVRQQLPEKYKEIFFDQSKNGYAGYIDGGASQEEFYKFIKPILEKMDGTEELLVKLNREDLLRKQRTFDNGSIPHQIHLGELHAILRRQEDFYPFLKDNREKIEKILTFRIPYYVGPLARGNSRFAWMTRKSEETITPWNFEEVVDKGASAQSFIERMTNFDKNLPNEKVLPKHSLLYEYFTVYNELTKVKYVTEGMRKPAFLSGEQKKAIVDLLFKTNRKVTVKQLKEDYFKKIECFDSVEISGVEDRFNASLGTYHDLLKIIKDKDFLDNEENEDILEDIVLTLTLFEDREMIEERLKTYAHLFDDKVMKQLKRRRYTGWGRLSRKLINGIRDKQSGKTILDFLKSDGFANRNFMQLIHDDSLTFKEDIQKAQVSGQGDSLHEHIANLAGSPAIKKGILQTVKVVDELVKVMGRHKPENIVIEMARENQTTQKGQKNSRERMKRIEEGIKELGSQILKEHPVENTQLQNEKLYLYYLQNGRDMYVDQELDINRLSDYDVDHIVPQSFLKDDSIDNKVLTRSDKARGKSDNVPSEEVVKKMKNYWRQLLNAKLITQRKFDNLTKAERGGLSELDKAGFIKRQLVETRQITKHVAQILDSRMNTKYDENDKLIREVKVITLKSKLVSDFRKDFQFYKVREINNYHHAHDAYLNAVVGTALIKKYPKLESEFVYGDYKVYDVRKMIAKSEQEIGKATAKYFFYSNIMNFFKTEITLANGEIRKRPLIETNGETGEIVWDKGRDFATVRKVLSMPQVNIVKKTEVQTGGFSKESILPKRNSDKLIARKKDWDPKKYGGFDSPTVAYSVLVVAKVEKGKSKKLKSVKELLGITIMERSSFEKNPIDFLEAKGYKEVKKDLIIKLPKYSLFELENGRKRMLASAGELQKGNELALPSKYVNFLYLASHYEKLKGSPEDNEQKQLFVEQHKHYLDEIIEQISEFSKRVILADANLDKVLSAYNKHRDKPIREQAENIIHLFTLTNLGAPAAFKYFDTTIDRKRYTSTKEVLDATLIHQSITGLYETRIDLSQLGGDGGGGSGGGGGLDDEYRLYSPLVKPDQNIQFWLEQFPQAWAETAGMGLAKQVPPQVIQLKASATPVSVRQYPLSKEAQEGIRPHVQRLIQQGILVPVQSPWNTPLLPVRKPGTNDYRPVQDLREVNKRVQDIHPTVPNPYNLLCALPPQRSWYTVLDLKDAFFCLRLHPTSQPLFAFEWRDPGTGRTGQLTWTRLPQGFKNSPTIFNEALHRDLANFRIQHPQVTLLQYVDDLLLAGATKQDCLEGTKALLLELSDLGYRASAKKAQICRREVTYLGYSLRDGQRWLTEARKKTVVQIPAPTTAKQVREFLGKAGFCRLFIPGFATLAAPLYPLTKPKGEFSWAPEHQKAFDAIKKALLSAPALALPDVTKPFTLYVDERKGVARGVLTQTLGPWRRPVAYLSKKLDPVASGWPVCLKAIAAVAILVKDADKLTLGQNITVIAPHALENIVRQPPDRWMTNARMTHYQSLLLTERVTFAPPAALNPATLLPEETDEPVTHDCHQLLIEETGVRKDLTDIPLTGEVLTWFTDGSSYVVEGKRMAGAAVVDGTRTIWASSLPEGTSAQKAELMALTQALRLAEGKSINIYTDSRYAFATAHVHGAIYKQRGWLTSAGREIKNKEEILSLLEALHLPKRLAIIHCPGHQKAKDPISRGNQMADRVAKQAAQGVNLLPAGKRTADGSEFEKRTADGSEFESPKKKAKVE

SEQ ID NO: 223 - protein, 2083 aa, synthetic construct; identical to SEQ ID NO: 47
  source 1..2083: note = Description of Artificial Sequence: Synthetic polypeptide

SEQ ID NO: 224 - protein, 2088 aa, synthetic construct
  source 1..2088: note = Description of Artificial Sequence: Synthetic polypeptide
MPAAKRVKLDGGDKKYSIGLDIGTNSVGWAVITDEYKVPSKKFKVLGNTDRHSIKKNLIGALLFDSGETAEATRLKRTARRRYTRRKNRICYLQEIFSNEMAKVDDSFFHRLEESFLVEEDKKHERHPIFGNIVDEVAYHEKYPTIYHLRKKLVDSTDKADLRLIYLALAHMIKFRGHFLIEGDLNPDNSDVDKLFIQLVQTYNQLFEENPINASGVDAKAILSARLSKSRRLENLIAQLPGEKKNGLFGNLIALSLGLTPNFKSNFDLAEDAKLQLSKDTYDDDLDNLLAQIGDQYADLFLAAKNLSDAILLSDILRVNTEITKAPLSASMIKRYDEHHQDLTLLKALVRQQLPEKYKEIFFDQSKNGYAGYIDGGASQEEFYKFIKPILEKMDGTEELLVKLNREDLLRKQRTFDNGSIPHQIHLGELHAILRRQEDFYPFLKDNREKIEKILTFRIPYYVGPLARGNSRFAWMTRKSEETITPWNFEEVVDKGASAQSFIERMTNFDKNLPNEKVLPKHSLLYEYFTVYNELTKVKYVTEGMRKPAFLSGEQKKAIVDLLFKTNRKVTVKQLKEDYFKKIECFDSVEISGVEDRFNASLGTYHDLLKIIKDKDFLDNEENEDILEDIVLTLTLFEDREMIEERLKTYAHLFDDKVMKQLKRRRYTGWGRLSRKLINGIRDKQSGKTILDFLKSDGFANRNFMQLIHDDSLTFKEDIQKAQVSGQGDSLHEHIANLAGSPAIKKGILQTVKVVDELVKVMGRHKPENIVIEMARENQTTQKGQKNSRERMKRIEEGIKELGSQILKEHPVENTQLQNEKLYLYYLQNGRDMYVDQELDINRLSDYDVDHIVPQSFLKDDSIDNKVLTRSDKARGKSDNVPSEEVVKKMKNYWRQLLNAKLITQRKFDNLTKAERGGLSELDKAGFIKRQLVETRQITKHVAQILDSRMNTKYDENDKLIREVKVITLKSKLVSDFRKDFQFYKVREINNYHHAHDAYLNAVVGTALIKKYPKLESEFVYGDYKVYDVRKMIAKSEQEIGKATAKYFFYSNIMNFFKTEITLANGEIRKRPLIETNGETGEIVWDKGRDFATVRKVLSMPQVNIVKKTEVQTGGFSKESILPKRNSDKLIARKKDWDPKKYGGFDSPTVAYSVLVVAKVEKGKSKKLKSVKELLGITIMERSSFEKNPIDFLEAKGYKEVKKDLIIKLPKYSLFELENGRKRMLASAGELQKGNELALPSKYVNFLYLASHYEKLKGSPEDNEQKQLFVEQHKHYLDEIIEQISEFSKRVILADANLDKVLSAYNKHRDKPIREQAENIIHLFTLTNLGAPAAFKYFDTTIDRKRYTSTKEVLDATLIHQSITGLYETRIDLSQLGGDGGEAAAKPAPGSSGGLDDEYRLYSPLVKPDQNIQFWLEQFPQAWAETAGMGLAKQVPPQVIQLKASATPVSVRQYPLSKEAQEGIRPHVQRLIQQGILVPVQSPWNTPLLPVRKPGTNDYRPVQDLREVNKRVQDIHPTVPNPYNLLCALPPQRSWYTVLDLKDAFFCLRLHPTSQPLFAFEWRDPGTGRTGQLTWTRLPQGFKNSPTIFNEALHRDLANFRIQHPQVTLLQYVDDLLLAGATKQDCLEGTKALLLELSDLGYRASAKKAQICRREVTYLGYSLRDGQRWLTEARKKTVVQIPAPTTAKQVREFLGKAGFCRLFIPGFATLAAPLYPLTKPKGEFSWAPEHQKAFDAIKKALLSAPALALPDVTKPFTLYVDERKGVARGVLTQTLGPWRRPVAYLSKKLDPVASGWPVCLKAIAAVAILVKDADKLTLGQNITVIAPHALENIVRQPPDRWMTNARMTHYQSLLLTERVTFAPPAALNPATLLPEETDEPVTHDCHQLLIEETGVRKDLTDIPLTGEVLTWFTDGSSYVVEGKRMAGAAVVDGTRTIWASSLPEGTSAQKAELMALTQALRLAEGKSINIYTDSRYAFATAHVHGAIYKQRGWLTSAGREIKNKEEILSLLEALHLPKRLAIIHCPGHQKAKDPISRGNQMADRVAKQAAQGVNLLPAGKRTADGSEFEKRTADGSEFESPKKKAKVE

SEQ ID NO: 225 - protein, 2088 aa, synthetic construct
  source 1..2088: note = Description of Artificial Sequence: Synthetic polypeptide
MPAAKRVKLDGGDKKYSIGLDIGTNSVGWAVITDEYKVPSKKFKVLGNTDRHSIKKNLIGALLFDSGETAEATRLKRTARRRYTRRKNRICYLQEIFSNEMAKVDDSFFHRLEESFLVEEDKKHERHPIFGNIVDEVAYHEKYPTIYHLRKKLVDSTDKADLRLIYLALAHMIKFRGHFLIEGDLNPDNSDVDKLFIQLVQTYNQLFEENPINASGVDAKAILSARLSKSRRLENLIAQLPGEKKNGLFGNLIALSLGLTPNFKSNFDLAEDAKLQLSKDTYDDDLDNLLAQIGDQYADLFLAAKNLSDAILLSDILRVNTEITKAPLSASMIKRYDEHHQDLTLLKALVRQQLPEKYKEIFFDQSKNGYAGYIDGGASQEEFYKFIKPILEKMDGTEELLVKLNREDLLRKQRTFDNGSIPHQIHLGELHAILRRQEDFYPFLKDNREKIEKILTFRIPYYVGPLARGNSRFAWMTRKSEETITPWNFEEVVDKGASAQSFIERMTNFDKNLPNEKVLPKHSLLYEYFTVYNELTKVKYVTEGMRKPAFLSGEQKKAIVDLLFKTNRKVTVKQLKEDYFKKIECFDSVEISGVEDRFNASLGTYHDLLKIIKDKDFLDNEENEDILEDIVLTLTLFEDREMIEERLKTYAHLFDDKVMKQLKRRRYTGWGRLSRKLINGIRDKQSGKTILDFLKSDGFANRNFMQLIHDDSLTFKEDIQKAQVSGQGDSLHEHIANLAGSPAIKKGILQTVKVVDELVKVMGRHKPENIVIEMARENQTTQKGQKNSRERMKRIEEGIKELGSQILKEHPVENTQLQNEKLYLYYLQNGRDMYVDQELDINRLSDYDVDHIVPQSFLKDDSIDNKVLTRSDKARGKSDNVPSEEVVKKMKNYWRQLLNAKLITQRKFDNLTKAERGGLSELDKAGFIKRQLVETRQITKHVAQILDSRMNTKYDENDKLIREVKVITLKSKLVSDFRKDFQFYKVREINNYHHAHDAYLNAVVGTALIKKYPKLESEFVYGDYKVYDVRKMIAKSEQEIGKATAKYFFYSNIMNFFKTEITLANGEIRKRPLIETNGETGEIVWDKGRDFATVRKVLSMPQVNIVKKTEVQTGGFSKESILPKRNSDKLIARKKDWDPKKYGGFDSPTVAYSVLVVAKVEKGKSKKLKSVKELLGITIMERSSFEKNPIDFLEAKGYKEVKKDLIIKLPKYSLFELENGRKRMLASAGELQKGNELALPSKYVNFLYLASHYEKLKGSPEDNEQKQLFVEQHKHYLDEIIEQISEFSKRVILADANLDKVLSAYNKHRDKPIREQAENIIHLFTLTNLGAPAAFKYFDTTIDRKRYTSTKEVLDATLIHQSITGLYETRIDLSQLGGDGGPAPGSSEAAAKGGLDDEYRLYSPLVKPDQNIQFWLEQFPQAWAETAGMGLAKQVPPQVIQLKASATPVSVRQYPLSKEAQEGIRPHVQRLIQQGILVPVQSPWNTPLLPVRKPGTNDYRPVQDLREVNKRVQDIHPTVPNPYNLLCALPPQRSWYTVLDLKDAFFCLRLHPTSQPLFAFEWRDPGTGRTGQLTWTRLPQGFKNSPTIFNEALHRDLANFRIQHPQVTLLQYVDDLLLAGATKQDCLEGTKALLLELSDLGYRASAKKAQICRREVTYLGYSLRDGQRWLTEARKKTVVQIPAPTTAKQVREFLGKAGFCRLFIPGFATLAAPLYPLTKPKGEFSWAPEHQKAFDAIKKALLSAPALALPDVTKPFTLYVDERKGVARGVLTQTLGPWRRPVAYLSKKLDPVASGWPVCLKAIAAVAILVKDADKLTLGQNITVIAPHALENIVRQPPDRWMTNARMTHYQSLLLTERVTFAPPAALNPATLLPEETDEPVTHDCHQLLIEETGVRKDLTDIPLTGEVLTWFTDGSSYVVEGKRMAGAAVVDGTRTIWASSLPEGTSAQKAELMALTQALRLAEGKSINIYTDSRYAFATAHVHGAIYKQRGWLTSAGREIKNKEEILSLLEALHLPKRLAIIHCPGHQKAKDPISRGNQMADRVAKQAAQGVNLLPAGKRTADGSEFEKRTADGSEFESPKKKAKVE

SEQ ID NO: 226 - protein, 2086 aa, synthetic construct
  source 1..2086: note = Description of Artificial Sequence: Synthetic polypeptide
MPAAKRVKLDGGDKKYSIGLDIGTNSVGWAVITDEYKVPSKKFKVLGNTDRHSIKKNLIGALLFDSGETAEATRLKRTARRRYTRRKNRICYLQEIFSNEMAKVDDSFFHRLEESFLVEEDKKHERHPIFGNIVDEVAYHEKYPTIYHLRKKLVDSTDKADLRLIYLALAHMIKFRGHFLIEGDLNPDNSDVDKLFIQLVQTYNQLFEENPINASGVDAKAILSARLSKSRRLENLIAQLPGEKKNGLFGNLIALSLGLTPNFKSNFDLAEDAKLQLSKDTYDDDLDNLLAQIGDQYADLFLAAKNLSDAILLSDILRVNTEITKAPLSASMIKRYDEHHQDLTLLKALVRQQLPEKYKEIFFDQSKNGYAGYIDGGASQEEFYKFIKPILEKMDGTEELLVKLNREDLLRKQRTFDNGSIPHQIHLGELHAILRRQEDFYPFLKDNREKIEKILTFRIPYYVGPLARGNSRFAWMTRKSEETITPWNFEEVVDKGASAQSFIERMTNFDKNLPNEKVLPKHSLLYEYFTVYNELTKVKYVTEGMRKPAFLSGEQKKAIVDLLFKTNRKVTVKQLKEDYFKKIECFDSVEISGVEDRFNASLGTYHDLLKIIKDKDFLDNEENEDILEDIVLTLTLFEDREMIEERLKTYAHLFDDKVMKQLKRRRYTGWGRLSRKLINGIRDKQSGKTILDFLKSDGFANRNFMQLIHDDSLTFKEDIQKAQVSGQGDSLHEHIANLAGSPAIKKGILQTVKVVDELVKVMGRHKPENIVIEMARENQTTQKGQKNSRERMKRIEEGIKELGSQILKEHPVENTQLQNEKLYLYYLQNGRDMYVDQELDINRLSDYDVDHIVPQSFLKDDSIDNKVLTRSDKARGKSDNVPSEEVVKKMKNYWRQLLNAKLITQRKFDNLTKAERGGLSELDKAGFIKRQLVETRQITKHVAQILDSRMNTKYDENDKLIREVKVITLKSKLVSDFRKDFQFYKVREINNYHHAHDAYLNAVVGTALIKKYPKLESEFVYGDYKVYDVRKMIAKSEQEIGKATAKYFFYSNIMNFFKTEITLANGEIRKRPLIETNGETGEIVWDKGRDFATVRKVLSMPQVNIVKKTEVQTGGFSKESILPKRNSDKLIARKKDWDPKKYGGFDSPTVAYSVLVVAKVEKGKSKKLKSVKELLGITIMERSSFEKNPIDFLEAKGYKEVKKDLIIKLPKYSLFELENGRKRMLASAGELQKGNELALPSKYVNFLYLASHYEKLKGSPEDNEQKQLFVEQHKHYLDEIIEQISEFSKRVILADANLDKVLSAYNKHRDKPIREQAENIIHLFTLTNLGAPAAFKYFDTTIDRKRYTSTKEVLDATLIHQSITGLYETRIDLSQLGGDGGGGSGGSGGSGGLDDEYRLYSPLVKPDQNIQFWLEQFPQAWAETAGMGLAKQVPPQVIQLKASATPVSVRQYPLSKEAQEGIRPHVQRLIQQGILVPVQSPWNTPLLPVRKPGTNDYRPVQDLREVNKRVQDIHPTVPNPYNLLCALPPQRSWYTVLDLKDAFFCLRLHPTSQPLFAFEWRDPGTGRTGQLTWTRLPQGFKNSPTIFNEALHRDLANFRIQHPQVTLLQYVDDLLLAGATKQDCLEGTKALLLELSDLGYRASAKKAQICRREVTYLGYSLRDGQRWLTEARKKTVVQIPAPTTAKQVREFLGKAGFCRLFIPGFATLAAPLYPLTKPKGEFSWAPEHQKAFDAIKKALLSAPALALPDVTKPFTLYVDERKGVARGVLTQTLGPWRRPVAYLSKKLDPVASGWPVCLKAIAAVAILVKDADKLTLGQNITVIAPHALENIVRQPPDRWMTNARMTHYQSLLLTERVTFAPPAALNPATLLPEETDEPVTHDCHQLLIEETGVRKDLTDIPLTGEVLTWFTDGSSYVVEGKRMAGAAVVDGTRTIWASSLPEGTSAQKAELMALTQALRLAEGKSINIYTDSRYAFATAHVHGAIYKQRGWLTSAGREIKNKEEILSLLEALHLPKRLAIIHCPGHQKAKDPISRGNQMADRVAKQAAQGVNLLPAGKRTADGSEFEKRTADGSEFESPKKKAKVE

SEQ ID NO: 227 - protein, 2083 aa, synthetic construct; identical to SEQ ID NO: 78
  source 1..2083: note = Description of Artificial Sequence: Synthetic polypeptide

SEQ ID NO: 228 - protein, 2089 aa, synthetic construct; identical to SEQ ID NO: 41
  source 1..2089: note = Description of Artificial Sequence: Synthetic polypeptide

SEQ ID NO: 229 - protein, 2088 aa, synthetic construct; identical to SEQ ID NO: 65
  source 1..2088: note = Description of Artificial Sequence: Synthetic polypeptide

SEQ ID NO: 230 - protein, 2088 aa, synthetic construct; identical to SEQ ID NO: 80
  source 1..2088: note = Description of Artificial Sequence: Synthetic polypeptide

SEQ ID NO: 231 - protein, 2088 aa, synthetic construct
  source 1..2088: note = Description of Artificial Sequence: Synthetic polypeptide
MPAAKRVKLDGGDKKYSIGLDIGTNSVGWAVITDEYKVPSKKFKVLGNTDRHSIKKNLIGALLFDSGETAEATRLKRTARRRYTRRKNRICYLQEIFSNEMAKVDDSFFHRLEESFLVEEDKKHERHPIFGNIVDEVAYHEKYPTIYHLRKKLVDSTDKADLRLIYLALAHMIKFRGHFLIEGDLNPDNSDVDKLFIQLVQTYNQLFEENPINASGVDAKAILSARLSKSRRLENLIAQLPGEKKNGLFGNLIALSLGLTPNFKSNFDLAEDAKLQLSKDTYDDDLDNLLAQIGDQYADLFLAAKNLSDAILLSDILRVNTEITKAPLSASMIKRYDEHHQDLTLLKALVRQQLPEKYKEIFFDQSKNGYAGYIDGGASQEEFYKFIKPILEKMDGTEELLVKLNREDLLRKQRTFDNGSIPHQIHLGELHAILRRQEDFYPFLKDNREKIEKILTFRIPYYVGPLARGNSRFAWMTRKSEETITPWNFEEVVDKGASAQSFIERMTNFDKNLPNEKVLPKHSLLYEYFTVYNELTKVKYVTEGMRKPAFLSGEQKKAIVDLLFKTNRKVTVKQLKEDYFKKIECFDSVEISGVEDRFNASLGTYHDLLKIIKDKDFLDNEENEDILEDIVLTLTLFEDREMIEERLKTYAHLFDDKVMKQLKRRRYTGWGRLSRKLINGIRDKQSGKTILDFLKSDGFANRNFMQLIHDDSLTFKEDIQKAQVSGQGDSLHEHIANLAGSPAIKKGILQTVKVVDELVKVMGRHKPENIVIEMARENQTTQKGQKNSRERMKRIEEGIKELGSQILKEHPVENTQLQNEKLYLYYLQNGRDMYVDQELDINRLSDYDVDHIVPQSFLKDDSIDNKVLTRSDKARGKSDNVPSEEVVKKMKNYWRQLLNAKLITQRKFDNLTKAERGGLSELDKAGFIKRQLVETRQITKHVAQILDSRMNTKYDENDKLIREVKVITLKSKLVSDFRKDFQFYKVREINNYHHAHDAYLNAVVGTALIKKYPKLESEFVYGDYKVYDVRKMIAKSEQEIGKATAKYFFYSNIMNFFKTEITLANGEIRKRPLIETNGETGEIVWDKGRDFATVRKVLSMPQVNIVKKTEVQTGGFSKESILPKRNSDKLIARKKDWDPKKYGGFDSPTVAYSVLVVAKVEKGKSKKLKSVKELLGITIMERSSFEKNPIDFLEAKGYKEVKKDLIIKLPKYSLFELENGRKRMLASAGELQKGNELALPSKYVNFLYLASHYEKLKGSPEDNEQKQLFVEQHKHYLDEIIEQISEFSKRVILADANLDKVLSAYNKHRDKPIREQAENIIHLFTLTNLGAPAAFKYFDTTIDRKRYTSTKEVLDATLIHQSITGLYETRIDLSQLGGDGGEAAAKGGGGGSGGLDDEYRLYSPLVKPDQNIQFWLEQFPQAWAETAGMGLAKQVPPQVIQLKASATPVSVRQYPLSKEAQEGIRPHVQRLIQQGILVPVQSPWNTPLLPVRKPGTNDYRPVQDLREVNKRVQDIHPTVPNPYNLLCALPPQRSWYTVLDLKDAFFCLRLHPTSQPLFAFEWRDPGTGRTGQLTWTRLPQGFKNSPTIFNEALHRDLANFRIQHPQVTLLQYVDDLLLAGATKQDCLEGTKALLLELSDLGYRASAKKAQICRREVTYLGYSLRDGQRWLTEARKKTVVQIPAPTTAKQVREFLGKAGFCRLFIPGFATLAAPLYPLTKPKGEFSWAPEHQKAFDAIKKALLSAPALALPDVTKPFTLYVDERKGVARGVLTQTLGPWRRPVAYLSKKLDPVASGWPVCLKAIAAVAILVKDADKLTLGQNITVIAPHALENIVRQPPDRWMTNARMTHYQSLLLTERVTFAPPAALNPATLLPEETDEPVTHDCHQLLIEETGVRKDLTDIPLTGEVLTWFTDGSSYVVEGKRMAGAAVVDGTRTIWASSLPEGTSAQKAELMALTQALRLAEGKSINIYTDSRYAFATAHVHGAIYKQRGWLTSAGREIKNKEEILSLLEALHLPKRLAIIHCPGHQKAKDPISRGNQMADRVAKQAAQGVNLLPAGKRTADGSEFEKRTADGSEFESPKKKAKVE

SEQ ID NO: 232 - protein, 2102 aa, synthetic construct; identical to SEQ ID NO: 39
  source 1..2102: note = Description of Artificial Sequence: Synthetic polypeptide

SEQ ID NO: 233 - protein, 2085 aa, synthetic construct
  source 1..2085: note = Description of Artificial Sequence: Synthetic polypeptide
MPAAKRVKLDGGDKKYSIGLDIGTNSVGWAVITDEYKVPSKKFKVLGNTDRHSIKKNLIGALLFDSGETAEATRLKRTARRRYTRRKNRICYLQEIFSNEMAKVDDSFFHRLEESFLVEEDKKHERHPIFGNIVDEVAYHEKYPTIYHLRKKLVDSTDKADLRLIYLALAHMIKFRGHFLIEGDLNPDNSDVDKLFIQLVQTYNQLFEENPINASGVDAKAILSARLSKSRRLENLIAQLPGEKKNGLFGNLIALSLGLTPNFKSNFDLAEDAKLQLSKDTYDDDLDNLLAQIGDQYADLFLAAKNLSDAILLSDILRVNTEITKAPLSASMIKRYDEHHQDLTLLKALVRQQLPEKYKEIFFDQSKNGYAGYIDGGASQEEFYKFIKPILEKMDGTEELLVKLNREDLLRKQRTFDNGSIPHQIHLGELHAILRRQEDFYPFLKDNREKIEKILTFRIPYYVGPLARGNSRFAWMTRKSEETITPWNFEEVVDKGASAQSFIERMTNFDKNLPNEKVLPKHSLLYEYFTVYNELTKVKYVTEGMRKPAFLSGEQKKAIVDLLFKTNRKVTVKQLKEDYFKKIECFDSVEISGVEDRFNASLGTYHDLLKIIKDKDFLDNEENEDILEDIVLTLTLFEDREMIEERLKTYAHLFDDKVMKQLKRRRYTGWGRLSRKLINGIRDKQSGKTILDFLKSDGFANRNFMQLIHDDSLTFKEDIQKAQVSGQGDSLHEHIANLAGSPAIKKGILQTVKVVDELVKVMGRHKPENIVIEMARENQTTQKGQKNSRERMKRIEEGIKELGSQILKEHPVENTQLQNEKLYLYYLQNGRDMYVDQELDINRLSDYDVDHIVPQSFLKDDSIDNKVLTRSDKARGKSDNVPSEEVVKKMKNYWRQLLNAKLITQRKFDNLTKAERGGLSELDKAGFIKRQLVETRQITKHVAQILDSRMNTKYDENDKLIREVKVITLKSKLVSDFRKDFQFYKVREINNYHHAHDAYLNAVVGTALIKKYPKLESEFVYGDYKVYDVRKMIAKSEQEIGKATAKYFFYSNIMNFFKTEITLANGEIRKRPLIETNGETGEIVWDKGRDFATVRKVLSMPQVNIVKKTEVQTGGFSKESILPKRNSDKLIARKKDWDPKKYGGFDSPTVAYSVLVVAKVEKGKSKKLKSVKELLGITIMERSSFEKNPIDFLEAKGYKEVKKDLIIKLPKYSLFELENGRKRMLASAGELQKGNELALPSKYVNFLYLASHYEKLKGSPEDNEQKQLFVEQHKHYLDEIIEQISEFSKRVILADANLDKVLSAYNKHRDKPIREQAENIIHLFTLTNLGAPAAFKYFDTTIDRKRYTSTKEVLDATLIHQSITGLYETRIDLSQLGGDGGEAAAKPAPGGLDDEYRLYSPLVKPDQNIQFWLEQFPQAWAETAGMGLAKQVPPQVIQLKASATPVSVRQYPLSKEAQEGIRPHVQRLIQQGILVPVQSPWNTPLLPVRKPGTNDYRPVQDLREVNKRVQDIHPTVPNPYNLLCALPPQRSWYTVLDLKDAFFCLRLHPTSQPLFAFEWRDPGTGRTGQLTWTRLPQGFKNSPTIFNEALHRDLANFRIQHPQVTLLQYVDDLLLAGATKQDCLEGTKALLLELSDLGYRASAKKAQICRREVTYLGYSLRDGQRWLTEARKKTVVQIPAPTTAKQVREFLGKAGFCRLFIPGFATLAAPLYPLTKPKGEFSWAPEHQKAFDAIKKALLSAPALALPDVTKPFTLYVDERKGVARGVLTQTLGPWRRPVAYLSKKLDPVASGWPVCLKAIAAVAILVKDADKLTLGQNITVIAPHALENIVRQPPDRWMTNARMTHYQSLLLTERVTFAPPAALNPATLLPEETDEPVTHDCHQLLIEETGVRKDLTDIPLTGEVLTWFTDGSSYVVEGKRMAGAAVVDGTRTIWASSLPEGTSAQKAELMALTQALRLAEGKSINIYTDSRYAFATAHVHGAIYKQRGWLTSAGREIKNKEEILSLLEALHLPKRLAIIHCPGHQKAKDPISRGNQMADRVAKQAAQGVNLLPAGKRTADGSEFEKRTADGSEFESPKKKAKVE

SEQ ID NO: 234 - protein, 2092 aa, synthetic construct; identical to SEQ ID NO: 56
  source 1..2092: note = Description of Artificial Sequence: Synthetic polypeptide

SEQ ID NO: 235 - protein, 2083 aa, synthetic construct
  source 1..2083: note = Description of Artificial Sequence: Synthetic polypeptide
MPAAKRVKLDGGDKKYSIGLDIGTNSVGWAVITDEYKVPSKKFKVLGNTDRHSIKKNLIGALLFDSGETAEATRLKRTARRRYTRRKNRICYLQEIFSNEMAKVDDSFFHRLEESFLVEEDKKHERHPIFGNIVDEVAYHEKYPTIYHLRKKLVDSTDKADLRLIYLALAHMIKFRGHFLIEGDLNPDNSDVDKLFIQLVQTYNQLFEENPINASGVDAKAILSARLSKSRRLENLIAQLPGEKKNGLFGNLIALSLGLTPNFKSNFDLAEDAKLQLSKDTYDDDLDNLLAQIGDQYADLFLAAKNLSDAILLSDILRVNTEITKAPLSASMIKRYDEHHQDLTLLKALVRQQLPEKYKEIFFDQSKNGYAGYIDGGASQEEFYKFIKPILEKMDGTEELLVKLNREDLLRKQRTFDNGSIPHQIHLGELHAILRRQEDFYPFLKDNREKIEKILTFRIPYYVGPLARGNSRFAWMTRKSEETITPWNFEEVVDKGASAQSFIERMTNFDKNLPNEKVLPKHSLLYEYFTVYNELTKVKYVTEGMRKPAFLSGEQKKAIVDLLFKTNRKVTVKQLKEDYFKKIECFDSVEISGVEDRFNASLGTYHDLLKIIKDKDFLDNEENEDILEDIVLTLTLFEDREMIEERLKTYAHLFDDKVMKQLKRRRYTGWGRLSRKLINGIRDKQSGKTILDFLKSDGFANRNFMQLIHDDSLTFKEDIQKAQVSGQGDSLHEHIANLAGSPAIKKGILQTVKVVDELVKVMGRHKPENIVIEMARENQTTQKGQKNSRERMKRIEEGIKELGSQILKEHPVENTQLQNEKLYLYYLQNGRDMYVDQELDINRLSDYDVDHIVPQSFLKDDSIDNKVLTRSDKARGKSDNVPSEEVVKKMKNYWRQLLNAKLITQRKFDNLTKAERGGLSELDKAGFIKRQLVETRQITKHVAQILDSRMNTKYDENDKLIREVKVITLKSKLVSDFRKDFQFYKVREINNYHHAHDAYLNAVVGTALIKKYPKLESEFVYGDYKVYDVRKMIAKSEQEIGKATAKYFFYSNIMNFFKTEITLANGEIRKRPLIETNGETGEIVWDKGRDFATVRKVLSMPQVNIVKKTEVQTGGFSKESILPKRNSDKLIARKKDWDPKKYGGFDSPTVAYSVLVVAKVEKGKSKKLKSVKELLGITIMERSSFEKNPIDFLEAKGYKEVKKDLIIKLPKYSLFELENGRKRMLASAGELQKGNELALPSKYVNFLYLASHYEKLKGSPEDNEQKQLFVEQHKHYLDEIIEQISEFSKRVILADANLDKVLSAYNKHRDKPIREQAENIIHLFTLTNLGAPAAFKYFDTTIDRKRYTSTKEVLDATLIHQSITGLYETRIDLSQLGGDGGGSSGSSGGLDDEYRLYSPLVKPDQNIQFWLEQFPQAWAETAGMGLAKQVPPQVIQLKASATPVSVRQYPLSKEAQEGIRPHVQRLIQQGILVPVQSPWNTPLLPVRKPGTNDYRPVQDLREVNKRVQDIHPTVPNPYNLLCALPPQRSWYTVLDLKDAFFCLRLHPTSQPLFAFEWRDPGTGRTGQLTWTRLPQGFKNSPTIFNEALHRDLANFRIQHPQVTLLQYVDDLLLAGATKQDCLEGTKALLLELSDLGYRASAKKAQICRREVTYLGYSLRDGQRWLTEARKKTVVQIPAPTTAKQVREFLGKAGFCRLFIPGFATLAAPLYPLTKPKGEFSWAPEHQKAFDAIKKALLSAPALALPDVTKPFTLYVDERKGVARGVLTQTLGPWRRPVAYLSKKLDPVASGWPVCLKAIAAVAILVKDADKLTLGQNITVIAPHALENIVRQPPDRWMTNARMTHYQSLLLTERVTFAPPAALNPATLLPEETDEPVTHDCHQLLIEETGVRKDLTDIPLTGEVLTWFTDGSSYVVEGKRMAGAAVVDGTRTIWASSLPEGTSAQKAELMALTQALRLAEGKSINIYTDSRYAFATAHVHGAIYKQRGWLTSAGREIKNKEEILSLLEALHLPKRLAIIHCPGHQKAKDPISRGNQMADRVAKQAAQGVNLLPAGKRTADGSEFEKRTADGSEFESPKKKAKVE

SEQ ID NO: 236 - protein, 2089 aa, synthetic construct; identical to SEQ ID NO: 67
  source 1..2089: note = Description of Artificial Sequence: Synthetic polypeptide

SEQ ID NO: 237 - protein, 2085 aa, synthetic construct
  source 1..2085: note = Description of Artificial Sequence: Synthetic polypeptide
MPAAKRVKLDGGDKKYSIGLDIGTNSVGWAVITDEYKVPSKKFKVLGNTDRHSIKKNLIGALLFDSGETAEATRLKRTARRRYTRRKNRICYLQEIFSNEMAKVDDSFFHRLEESFLVEEDKKHERHPIFGNIVDEVAYHEKYPTIYHLRKKLVDSTDKADLRLIYLALAHMIKFRGHFLIEGDLNPDNSDVDKLFIQLVQTYNQLFEENPINASGVDAKAILSARLSKSRRLENLIAQLPGEKKNGLFGNLIALSLGLTPNFKSNFDLAEDAKLQLSKDTYDDDLDNLLAQIGDQYADLFLAAKNLSDAILLSDILRVNTEITKAPLSASMIKRYDEHHQDLTLLKALVRQQLPEKYKEIFFDQSKNGYAGYIDGGASQEEFYKFIKPILEKMDGTEELLVKLNREDLLRKQRTFDNGSIPHQIHLGELHAILRRQEDFYPFLKDNREKIEKILTFRIPYYVGPLARGNSRFAWMTRKSEETITPWNFEEVVDKGASAQSFIERMTNFDKNLPNEKVLPKHSLLYEYFTVYNELTKVKYVTEGMRKPAFLSGEQKKAIVDLLFKTNRKVTVKQLKEDYFKKIECFDSVEISGVEDRFNASLGTYHDLLKIIKDKDFLDNEENEDILEDIVLTLTLFEDREMIEERLKTYAHLFDDKVMKQLKRRRYTGWGRLSRKLINGIRDKQSGKTILDFLKSDGFANRNFMQLIHDDSLTFKEDIQKAQVSGQGDSLHEHIANLAGSPAIKKGILQTVKVVDELVKVMGRHKPENIVIEMARENQTTQKGQKNSRERMKRIEEGIKELGSQILKEHPVENTQLQNEKLYLYYLQNGRDMYVDQELDINRLSDYDVDHIVPQSFLKDDSIDNKVLTRSDKARGKSDNVPSEEVVKKMKNYWRQLLNAKLITQRKFDNLTKAERGGLSELDKAGFIKRQLVETRQITKHVAQILDSRMNTKYDENDKLIREVKVITLKSKLVSDFRKDFQFYKVREINNYHHAHDAYLNAVVGTALIKKYPKLESEFVYGDYKVYDVRKMIAKSEQEIGKATAKYFFYSNIMNFFKTEITLANGEIRKRPLIETNGETGEIVWDKGRDFATVRKVLSMPQVNIVKKTEVQTGGFSKESILPKRNSDKLIARKKDWDPKKYGGFDSPTVAYSVLVVAKVEKGKSKKLKSVKELLGITIMERSSFEKNPIDFLEAKGYKEVKKDLIIKLPKYSLFELENGRKRMLASAGELQKGNELALPSKYVNFLYLASHYEKLKGSPEDNEQKQLFVEQHKHYLDEIIEQISEFSKRVILADANLDKVLSAYNKHRDKPIREQAENIIHLFTLTNLGAPAAFKYFDTTIDRKRYTSTKEVLDATLIHQSITGLYETRIDLSQLGGDGGGSSEAAAKGGLDDEYRLYSPLVKPDQNIQFWLEQFPQAWAETAGMGLAKQVPPQVIQLKASATPVSVRQYPLSKEAQEGIRPHVQRLIQQGILVPVQSPWNTPLLPVRKPGTNDYRPVQDLREVNKRVQDIHPTVPNPYNLLCALPPQRSWYTVLDLKDAFFCLRLHPTSQPLFAFEWRDPGTGRTGQLTWTRLPQGFKNSPTIFNEALHRDLANFRIQHPQVTLLQYVDDLLLAGATKQDCLEGTKALLLELSDLGYRASAKKAQICRREVTYLGYSLRDGQRWLTEARKKTVVQIPAPTTAKQVREFLGKAGFCRLFIPGFATLAAPLYPLTKPKGEFSWAPEHQKAFDAIKKALLSAPALALPDVTKPFTLYVDERKGVARGVLTQTLGPWRRPVAYLSKKLDPVASGWPVCLKAIAAVAILVKDADKLTLGQNITVIAPHALENIVRQPPDRWMTNARMTHYQSLLLTERVTFAPPAALNPATLLPEETDEPVTHDCHQLLIEETGVRKDLTDIPLTGEVLTWFTDGSSYVVEGKRMAGAAVVDGTRTIWASSLPEGTSAQKAELMALTQALRLAEGKSINIYTDSRYAFATAHVHGAIYKQRGWLTSAGREIKNKEEILSLLEALHLPKRLAIIHCPGHQKAKDPISRGNQMADRVAKQAAQGVNLLPAGKRTADGSEFEKRTADGSEFESPKKKAKVE

SEQ ID NO: 238 - protein, 2092 aa, synthetic construct; identical to SEQ ID NO: 52
  source 1..2092: note = Description of Artificial Sequence: Synthetic polypeptide

SEQ ID NO: 239 - protein, 2088 aa, synthetic construct; identical to SEQ ID NO: 49
  source 1..2088: note = Description of Artificial Sequence: Synthetic polypeptide

SEQ ID NO: 240 - protein, 2088 aa, synthetic construct
  source 1..2088: note = Description of Artificial Sequence: Synthetic polypeptide
MPAAKRVKLDGGDKKYSIGLDIGTNSVGWAVITDEYKVPSKKFKVLGNTDRHSIKKNLIGALLFDSGETAEATRLKRTARRRYTRRKNRICYLQEIFSNEMAKVDDSFFHRLEESFLVEEDKKHERHPIFGNIVDEVAYHEKYPTIYHLRKKLVDSTDKADLRLIYLALAHMIKFRGHFLIEGDLNPDNSDVDKLFIQLVQTYNQLFEENPINASGVDAKAILSARLSKSRRLENLIAQLPGEKKNGLFGNLIALSLGLTPNFKSNFDLAEDAKLQLSKDTYDDDLDNLLAQIGDQYADLFLAAKNLSDAILLSDILRVNTEITKAPLSASMIKRYDEHHQDLTLLKALVRQQLPEKYKEIFFDQSKNGYAGYIDGGASQEEFYKFIKPILEKMDGTEELLVKLNREDLLRKQRTFDNGSIPHQIHLGELHAILRRQEDFYPFLKDNREKIEKILTFRIPYYVGPLARGNSRFAWMTRKSEETITPWNFEEVVDKGASAQSFIERMTNFDKNLPNEKVLPKHSLLYEYFTVYNELTKVKYVTEGMRKPAFLSGEQKKAIVDLLFKTNRKVTVKQLKEDYFKKIECFDSVEISGVEDRFNASLGTYHDLLKIIKDKDFLDNEENEDILEDIVLTLTLFEDREMIEERLKTYAHLFDDKVMKQLKRRRYTGWGRLSRKLINGIRDKQSGKTILDFLKSDGFANRNFMQLIHDDSLTFKEDIQKAQVSGQGDSLHEHIANLAGSPAIKKGILQTVKVVDELVKVMGRHKPENIVIEMARENQTTQKGQKNSRERMKRIEEGIKELGSQILKEHPVENTQLQNEKLYLYYLQNGRDMYVDQELDINRLSDYDVDHIVPQSFLKDDSIDNKVLTRSDKARGKSDNVPSEEVVKKMKNYWRQLLNAKLITQRKFDNLTKAERGGLSELDKAGFIKRQLVETRQITKHVAQILDSRMNTKYDENDKLIREVKVITLKSKLVSDFRKDFQFYKVREINNYHHAHDAYLNAVVGTALIKKYPKLESEFVYGDYKVYDVRKMIAKSEQEIGKATAKYFFYSNIMNFFKTEITLANGEIRKRPLIETNGETGEIVWDKGRDFATVRKVLSMPQVNIVKKTEVQTGGFSKESILPKRNSDKLIARKKDWDPKKYGGFDSPTVAYSVLVVAKVEKGKSKKLKSVKELLGITIMERSSFEKNPIDFLEAKGYKEVKKDLIIKLPKYSLFELENGRKRMLASAGELQKGNELALPSKYVNFLYLASHYEKLKGSPEDNEQKQLFVEQHKHYLDEIIEQISEFSKRVILADANLDKVLSAYNKHRDKPIREQAENIIHLFTLTNLGAPAAFKYFDTTIDRKRYTSTKEVLDATLIHQSITGLYETRIDLSQLGGDGGGGGEAAAKGSSGGLDDEYRLYSPLVKPDQNIQFWLEQFPQAWAETAGMGLAKQVPPQVIQLKASATPVSVRQYPLSKEAQEGIRPHVQRLIQQGILVPVQSPWNTPLLPVRKPGTNDYRPVQDLREVNKRVQDIHPTVPNPYNLLCALPPQRSWYTVLDLKDAFFCLRLHPTSQPLFAFEWRDPGTGRTGQLTWTRLPQGFKNSPTIFNEALHRDLANFRIQHPQVTLLQYVDDLLLAGATKQDCLEGTKALLLELSDLGYRASAKKAQICRREVTYLGYSLRDGQRWLTEARKKTVVQIPAPTTAKQVREFLGKAGFCRLFIPGFATLAAPLYPLTKPKGEFSWAPEHQKAFDAIKKALLSAPALALPDVTKPFTLYVDERKGVARGVLTQTLGPWRRPVAYLSKKLDPVASGWPVCLKAIAAVAILVKDADKLTLGQNITVIAPHALENIVRQPPDRWMTNARMTHYQSLLLTERVTFAPPAALNPATLLPEETDEPVTHDCHQLLIEETGVRKDLTDIPLTGEVLTWFTDGSSYVVEGKRMAGAAVVDGTRTIWASSLPEGTSAQKAELMALTQALRLAEGKSINIYTDSRYAFATAHVHGAIYKQRGWLTSAGREIKNKEEILSLLEALHLPKRLAIIHCPGHQKAKDPISRGNQMADRVAKQAAQGVNLLPAGKRTADGSEFEKRTADGSEFESPKKKAKVE

SEQ ID NO: 241 - protein, 2086 aa, synthetic construct
  source 1..2086: note = Description of Artificial Sequence: Synthetic polypeptide
MPAAKRVKLDGGDKKYSIGLDIGTNSVGWAVITDEYKVPSKKFKVLGNTDRHSIKKNLIGALLFDSGETAEATRLKRTARRRYTRRKNRICYLQEIFSNEMAKVDDSFFHRLEESFLVEEDKKHERHPIFGNIVDEVAYHEKYPTIYHLRKKLVDSTDKADLRLIYLALAHMIKFRGHFLIEGDLNPDNSDVDKLFIQLVQTYNQLFEENPINASGVDAKAILSARLSKSRRLENLIAQLPGEKKNGLFGNLIALSLGLTPNFKSNFDLAEDAKLQLSKDTYDDDLDNLLAQIGDQYADLFLAAKNLSDAILLSDILRVNTEITKAPLSASMIKRYDEHHQDLTLLKALVRQQLPEKYKEIFFDQSKNGYAGYIDGGASQEEFYKFIKPILEKMDGTEELLVKLNREDLLRKQRTFDNGSIPHQIHLGELHAILRRQEDFYPFLKDNREKIEKILTFRIPYYVGPLARGNSRFAWMTRKSEETITPWNFEEVVDKGASAQSFIERMTNFDKNLPNEKVLPKHSLLYEYFTVYNELTKVKYVTEGMRKPAFLSGEQKKAIVDLLFKTNRKVTVKQLKEDYFKKIECFDSVEISGVEDRFNASLGTYHDLLKIIKDKDFLDNEENEDILEDIVLTLTLFEDREMIEERLKTYAHLFDDKVMKQLKRRRYTGWGRLSRKLINGIRDKQSGKTILDFLKSDGFANRNFMQLIHDDSLTFKEDIQKAQVSGQGDSLHEHIANLAGSPAIKKGILQTVKVVDELVKVMGRHKPENIVIEMARENQTTQKGQKNSRERMKRIEEGIKELGSQILKEHPVENTQLQNEKLYLYYLQNGRDMYVDQELDINRLSDYDVDHIVPQSFLKDDSIDNKVLTRSDKARGKSDNVPSEEVVKKMKNYWRQLLNAKLITQRKFDNLTKAERGGLSELDKAGFIKRQLVETRQITKHVAQILDSRMNTKYDENDKLIREVKVITLKSKLVSDFRKDFQFYKVREINNYHHAHDAYLNAVVGTALIKKYPKLESEFVYGDYKVYDVRKMIAKSEQEIGKATAKYFFYSNIMNFFKTEITLANGEIRKRPLIETNGETGEIVWDKGRDFATVRKVLSMPQVNIVKKTEVQTGGFSKESILPKRNSDKLIARKKDWDPKKYGGFDSPTVAYSVLVVAKVEKGKSKKLKSVKELLGITIMERSSFEKNPIDFLEAKGYKEVKKDLIIKLPKYSLFELENGRKRMLASAGELQKGNELALPSKYVNFLYLASHYEKLKGSPEDNEQKQLFVEQHKHYLDEIIEQISEFSKRVILADANLDKVLSAYNKHRDKPIREQAENIIHLFTLTNLGAPAAFKYFDTTIDRKRYTSTKEVLDATLIHQSITGLYETRIDLSQLGGDGGGGSGSSGGGGGLDDEYRLYSPLVKPDQNIQFWLEQFPQAWAETAGMGLAKQVPPQVIQLKASATPVSVRQYPLSKEAQEGIRPHVQRLIQQGILVPVQSPWNTPLLPVRKPGTNDYRPVQDLREVNKRVQDIHPTVPNPYNLLCALPPQRSWYTVLDLKDAFFCLRLHPTSQPLFAFEWRDPGTGRTGQLTWTRLPQGFKNSPTIFNEALHRDLANFRIQHPQVTLLQYVDDLLLAGATKQDCLEGTKALLLELSDLGYRASAKKAQICRREVTYLGYSLRDGQRWLTEARKKTVVQIPAPTTAKQVREFLGKAGFCRLFIPGFATLAAPLYPLTKPKGEFSWAPEHQKAFDAIKKALLSAPALALPDVTKPFTLYVDERKGVARGVLTQTLGPWRRPVAYLSKKLDPVASGWPVCLKAIAAVAILVKDADKLTLGQNITVIAPHALENIVRQPPDRWMTNARMTHYQSLLLTERVTFAPPAALNPATLLPEETDEPVTHDCHQLLIEETGVRKDLTDIPLTGEVLTWFTDGSSYVVEGKRMAGAAVVDGTRTIWASSLPEGTSAQKAELMALTQALRLAEGKSINIYTDSRYAFATAHVHGAIYKQRGWLTSAGREIKNKEEILSLLEALHLPKRLAIIHCPGHQKAKDPISRGNQMADRVAKQAAQGVNLLPAGKRTADGSEFEKRTADGSEFESPKKKAKVE

SEQ ID NO: 242 - protein, 2088 aa, synthetic construct
  source 1..2088: note = Description of Artificial Sequence: Synthetic polypeptide
MPAAKRVKLDGGDKKYSIGLDIGTNSVGWAVITDEYKVPSKKFKVLGNTDRHSIKKNLIGALLFDSGETAEATRLKRTARRRYTRRKNRICYLQEIFSNEMAKVDDSFFHRLEESFLVEEDKKHERHPIFGNIVDEVAYHEKYPTIYHLRKKLVDSTDKADLRLIYLALAHMIKFRGHFLIEGDLNPDNSDVDKLFIQLVQTYNQLFEENPINASGVDAKAILSARLSKSRRLENLIAQLPGEKKNGLFGNLIALSLGLTPNFKSNFDLAEDAKLQLSKDTYDDDLDNLLAQIGDQYADLFLAAKNLSDAILLSDILRVNTEITKAPLSASMIKRYDEHHQDLTLLKALVRQQLPEKYKEIFFDQSKNGYAGYIDGGASQEEFYKFIKPILEKMDGTEELLVKLNREDLLRKQRTFDNGSIPHQIHLGELHAILRRQEDFYPFLKDNREKIEKILTFRIPYYVGPLARGNSRFAWMTRKSEETITPWNFEEVVDKGASAQSFIERMTNFDKNLPNEKVLPKHSLLYEYFTVYNELTKVKYVTEGMRKPAFLSGEQKKAIVDLLFKTNRKVTVKQLKEDYFKKIECFDSVEISGVEDRFNASLGTYHDLLKIIKDKDFLDNEENEDILEDIVLTLTLFEDREMIEERLKTYAHLFDDKVMKQLKRRRYTGWGRLSRKLINGIRDKQSGKTILDFLKSDGFANRNFMQLIHDDSLTFKEDIQKAQVSGQGDSLHEHIANLAGSPAIKKGILQTVKVVDELVKVMGRHKPENIVIEMARENQTTQKGQKNSRERMKRIEEGIKELGSQILKEHPVENTQLQNEKLYLYYLQNGRDMYVDQELDINRLSDYDVDHIVPQSFLKDDSIDNKVLTRSDKARGKSDNVPSEEVVKKMKNYWRQLLNAKLITQRKFDNLTKAERGGLSELDKAGFIKRQLVETRQITKHVAQILDSRMNTKYDENDKLIREVKVITLKSKLVSDFRKDFQFYKVREINNYHHAHDAYLNAVVGTALIKKYPKLESEFVYGDYKVYDVRKMIAKSEQEIGKATAKYFFYSNIMNFFKTEITLANGEIRKRPLIETNGETGEIVWDKGRDFATVRKVLSMPQVNIVKKTEVQTGGFSKESILPKRNSDKLIARKKDWDPKKYGGFDSPTVAYSVLVVAKVEKGKSKKLKSVKELLGITIMERSSFEKNPIDFLEAKGYKEVKKDLIIKLPKYSLFELENGRKRMLASAGELQKGNELALPSKYVNFLYLASHYEKLKGSPEDNEQKQLFVEQHKHYLDEIIEQISEFSKRVILADANLDKVLSAYNKHRDKPIREQAENIIHLFTLTNLGAPAAFKYFDTTIDRKRYTSTKEVLDATLIHQSITGLYETRIDLSQLGGDGGEAAAKGSSPAPGGLDDEYRLYSPLVKPDQNIQFWLEQFPQAWAETAGMGLAKQVPPQVIQLKASATPVSVRQYPLSKEAQEGIRPHVQRLIQQGILVPVQSPWNTPLLPVRKPGTNDYRPVQDLREVNKRVQDIHPTVPNPYNLLCALPPQRSWYTVLDLKDAFFCLRLHPTSQPLFAFEWRDPGTGRTGQLTWTRLPQGFKNSPTIFNEALHRDLANFRIQHPQVTLLQYVDDLLLAGATKQDCLEGTKALLLELSDLGYRASAKKAQICRREVTYLGYSLRDGQRWLTEARKKTVVQIPAPTTAKQVREFLGKAGFCRLFIPGFATLAAPLYPLTKPKGEFSWAPEHQKAFDAIKKALLSAPALALPDVTKPFTLYVDERKGVARGVLTQTLGPWRRPVAYLSKKLDPVASGWPVCLKAIAAVAILVKDADKLTLGQNITVIAPHALENIVRQPPDRWMTNARMTHYQSLLLTERVTFAPPAALNPATLLPEETDEPVTHDCHQLLIEETGVRKDLTDIPLTGEVLTWFTDGSSYVVEGKRMAGAAVVDGTRTIWASSLPEGTSAQKAELMALTQALRLAEGKSINIYTDSRYAFATAHVHGAIYKQRGWLTSAGREIKNKEEILSLLEALHLPKRLAIIHCPGHQKAKDPISRGNQMADRVAKQAAQGVNLLPAGKRTADGSEFEKRTADGSEFESPKKKAKVE

SEQ ID NO: 243 - protein, 2088 aa, synthetic construct
  source 1..2088: note = Description of Artificial Sequence: Synthetic polypeptide
MPAAKRVKLDGGDKKYSIGLDIGTNSVGWAVITDEYKVPSKKFKVLGNTDRHSIKKNLIGALLFDSGETAEATRLKRTARRRYTRRKNRICYLQEIFSNEMAKVDDSFFHRLEESFLVEEDKKHERHPIFGNIVDEVAYHEKYPTIYHLRKKLVDSTDKADLRLIYLALAHMIKFRGHFLIEGDLNPDNSDVDKLFIQLVQTYNQLFEENPINASGVDAKAILSARLSKSRRLENLIAQLPGEKKNGLFGNLIALSLGLTPNFKSNFDLAEDAKLQLSKDTYDDDLDNLLAQIGDQYADLFLAAKNLSDAILLSDILRVNTEITKAPLSASMIKRYDEHHQDLTLLKALVRQQLPEKYKEIFFDQSKNGYAGYIDGGASQEEFYKFIKPILEKMDGTEELLVKLNREDLLRKQRTFDNGSIPHQIHLGELHAILRRQEDFYPFLKDNREKIEKILTFRIPYYVGPLARGNSRFAWMTRKSEETITPWNFEEVVDKGASAQSFIERMTNFDKNLPNEKVLPKHSLLYEYFTVYNELTKVKYVTEGMRKPAFLSGEQKKAIVDLLFKTNRKVTVKQLKEDYFKKIECFDSVEISGVEDRFNASLGTYHDLLKIIKDKDFLDNEENEDILEDIVLTLTLFEDREMIEERLKTYAHLFDDKVMKQLKRRRYTGWGRLSRKLINGIRDKQSGKTILDFLKSDGFANRNFMQLIHDDSLTFKEDIQKAQVSGQGDSLHEHIANLAGSPAIKKGILQTVKVVDELVKVMGRHKPENIVIEMARENQTTQKGQKNSRERMKRIEEGIKELGSQILKEHPVENTQLQNEKLYLYYLQNGRDMYVDQELDINRLSDYDVDHIVPQSFLKDDSIDNKVLTRSDKARGKSDNVPSEEVVKKMKNYWRQLLNAKLITQRKFDNLTKAERGGLSELDKAGFIKRQLVETRQITKHVAQILDSRMNTKYDENDKLIREVKVITLKSKLVSDFRKDFQFYKVREINNYHHAHDAYLNAVVGTALIKKYPKLESEFVYGDYKVYDVRKMIAKSEQEIGKATAKYFFYSNIMNFFKTEITLANGEIRKRPLIETNGETGEIVWDKGRDFATVRKVLSMPQVNIVKKTEVQTGGFSKESILPKRNSDKLIARKKDWDPKKYGGFDSPTVAYSVLVVAKVEKGKSKKLKSVKELLGITIMERSSFEKNPIDFLEAKGYKEVKKDLIIKLPKYSLFELENGRKRMLASAGELQKGNELALPSKYVNFLYLASHYEKLKGSPEDNEQKQLFVEQHKHYLDEIIEQISEFSKRVILADANLDKVLSAYNKHRDKPIREQAENIIHLFTLTNLGAPAAFKYFDTTIDRKRYTSTKEVLDATLIHQSITGLYETRIDLSQLGGDGGGGSPAPEAAAKGGLDDEYRLYSPLVKPDQNIQFWLEQFPQAWAETAGMGLAKQVPPQVIQLKASATPVSVRQYPLSKEAQEGIRPHVQRLIQQGILVPVQSPWNTPLLPVRKPGTNDYRPVQDLREVNKRVQDIHPTVPNPYNLLCALPPQRSWYTVLDLKDAFFCLRLHPTSQPLFAFEWRDPGTGRTGQLTWTRLPQGFKNSPTIFNEALHRDLANFRIQHPQVTLLQYVDDLLLAGATKQDCLEGTKALLLELSDLGYRASAKKAQICRREVTYLGYSLRDGQRWLTEARKKTVVQIPAPTTAKQVREFLGKAGFCRLFIPGFATLAAPLYPLTKPKGEFSWAPEHQKAFDAIKKALLSAPALALPDVTKPFTLYVDERKGVARGVLTQTLGPWRRPVAYLSKKLDPVASGWPVCLKAIAAVAILVKDADKLTLGQNITVIAPHALENIVRQPPDRWMTNARMTHYQSLLLTERVTFAPPAALNPATLLPEETDEPVTHDCHQLLIEETGVRKDLTDIPLTGEVLTWFTDGSSYVVEGKRMAGAAVVDGTRTIWASSLPEGTSAQKAELMALTQALRLAEGKSINIYTDSRYAFATAHVHGAIYKQRGWLTSAGREIKNKEEILSLLEALHLPKRLAIIHCPGHQKAKDPISRGNQMADRVAKQAAQGVNLLPAGKRTADGSEFEKRTADGSEFESPKKKAKVE

SEQ ID NO: 244 - protein, 2084 aa, synthetic construct; identical to SEQ ID NO: 77
  source 1..2084: note = Description of Artificial Sequence: Synthetic polypeptide

SEQ ID NO: 245 - protein, 2081 aa, synthetic construct; identical to SEQ ID NO: 66
  source 1..2081: note = Description of Artificial Sequence: Synthetic polypeptide

SEQ ID NO: 246 - protein, 2080 aa, synthetic construct
  source 1..2080: note = Description of Artificial Sequence: Synthetic polypeptide
MPAAKRVKLDGGDKKYSIGLDIGTNSVGWAVITDEYKVPSKKFKVLGNTDRHSIKKNLIGALLFDSGETAEATRLKRTARRRYTRRKNRICYLQEIFSNEMAKVDDSFFHRLEESFLVEEDKKHERHPIFGNIVDEVAYHEKYPTIYHLRKKLVDSTDKADLRLIYLALAHMIKFRGHFLIEGDLNPDNSDVDKLFIQLVQTYNQLFEENPINASGVDAKAILSARLSKSRRLENLIAQLPGEKKNGLFGNLIALSLGLTPNFKSNFDLAEDAKLQLSKDTYDDDLDNLLAQIGDQYADLFLAAKNLSDAILLSDILRVNTEITKAPLSASMIKRYDEHHQDLTLLKALVRQQLPEKYKEIFFDQSKNGYAGYIDGGASQEEFYKFIKPILEKMDGTEELLVKLNREDLLRKQRTFDNGSIPHQIHLGELHAILRRQEDFYPFLKDNREKIEKILTFRIPYYVGPLARGNSRFAWMTRKSEETITPWNFEEVVDKGASAQSFIERMTNFDKNLPNEKVLPKHSLLYEYFTVYNELTKVKYVTEGMRKPAFLSGEQKKAIVDLLFKTNRKVTVKQLKEDYFKKIECFDSVEISGVEDRFNASLGTYHDLLKIIKDKDFLDNEENEDILEDIVLTLTLFEDREMIEERLKTYAHLFDDKVMKQLKRRRYTGWGRLSRKLINGIRDKQSGKTILDFLKSDGFANRNFMQLIHDDSLTFKEDIQKAQVSGQGDSLHEHIANLAGSPAIKKGILQTVKVVDELVKVMGRHKPENIVIEMARENQTTQKGQKNSRERMKRIEEGIKELGSQILKEHPVENTQLQNEKLYLYYLQNGRDMYVDQELDINRLSDYDVDHIVPQSFLKDDSIDNKVLTRSDKARGKSDNVPSEEVVKKMKNYWRQLLNAKLITQRKFDNLTKAERGGLSELDKAGFIKRQLVETRQITKHVAQILDSRMNTKYDENDKLIREVKVITLKSKLVSDFRKDFQFYKVREINNYHHAHDAYLNAVVGTALIKKYPKLESEFVYGDYKVYDVRKMIAKSEQEIGKATAKYFFYSNIMNFFKTEITLANGEIRKRPLIETNGETGEIVWDKGRDFATVRKVLSMPQVNIVKKTEVQTGGFSKESILPKRNSDKLIARKKDWDPKKYGGFDSPTVAYSVLVVAKVEKGKSKKLKSVKELLGITIMERSSFEKNPIDFLEAKGYKEVKKDLIIKLPKYSLFELENGRKRMLASAGELQKGNELALPSKYVNFLYLASHYEKLKGSPEDNEQKQLFVEQHKHYLDEIIEQISEFSKRVILADANLDKVLSAYNKHRDKPIREQAENIIHLFTLTNLGAPAAFKYFDTTIDRKRYTSTKEVLDATLIHQSITGLYETRIDLSQLGGDGGGGGGGLDDEYRLYSPLVKPDQNIQFWLEQFPQAWAETAGMGLAKQVPPQVIQLKASATPVSVRQYPLSKEAQEGIRPHVQRLIQQGILVPVQSPWNTPLLPVRKPGTNDYRPVQDLREVNKRVQDIHPTVPNPYNLLCALPPQRSWYTVLDLKDAFFCLRLHPTSQPLFAFEWRDPGTGRTGQLTWTRLPQGFKNSPTIFNEALHRDLANFRIQHPQVTLLQYVDDLLLAGATKQDCLEGTKALLLELSDLGYRASAKKAQICRREVTYLGYSLRDGQRWLTEARKKTVVQIPAPTTAKQVREFLGKAGFCRLFIPGFATLAAPLYPLTKPKGEFSWAPEHQKAFDAIKKALLSAPALALPDVTKPFTLYVDERKGVARGVLTQTLGPWRRPVAYLSKKLDPVASGWPVCLKAIAAVAILVKDADKLTLGQNITVIAPHALENIVRQPPDRWMTNARMTHYQSLLLTERVTFAPPAALNPATLLPEETDEPVTHDCHQLLIEETGVRKDLTDIPLTGEVLTWFTDGSSYVVEGKRMAGAAVVDGTRTIWASSLPEGTSAQKAELMALTQALRLAEGKSINIYTDSRYAFATAHVHGAIYKQRGWLTSAGREIKNKEEILSLLEALHLPKRLAIIHCPGHQKAKDPISRGNQMADRVAKQAAQGVNLLPAGKRTADGSEFEKRTADGSEFESPKKKAKVE

SEQ ID NO: 247 - protein, 2088 aa, synthetic construct
  source 1..2088: note = Description of Artificial Sequence: Synthetic polypeptide
MPAAKRVKLDGGDKKYSIGLDIGTNSVGWAVITDEYKVPSKKFKVLGNTDRHSIKKNLIGALLFDSGETAEATRLKRTARRRYTRRKNRICYLQEIFSNEMAKVDDSFFHRLEESFLVEEDKKHERHPIFGNIVDEVAYHEKYPTIYHLRKKLVDSTDKADLRLIYLALAHMIKFRGHFLIEGDLNPDNSDVDKLFIQLVQTYNQLFEENPINASGVDAKAILSARLSKSRRLENLIAQLPGEKKNGLFGNLIALSLGLTPNFKSNFDLAEDAKLQLSKDTYDDDLDNLLAQIGDQYADLFLAAKNLSDAILLSDILRVNTEITKAPLSASMIKRYDEHHQDLTLLKALVRQQLPEKYKEIFFDQSKNGYAGYIDGGASQEEFYKFIKPILEKMDGTEELLVKLNREDLLRKQRTFDNGSIPHQIHLGELHAILRRQEDFYPFLKDNREKIEKILTFRIPYYVGPLARGNSRFAWMTRKSEETITPWNFEEVVDKGASAQSFIERMTNFDKNLPNEKVLPKHSLLYEYFTVYNELTKVKYVTEGMRKPAFLSGEQKKAIVDLLFKTNRKVTVKQLKEDYFKKIECFDSVEISGVEDRFNASLGTYHDLLKIIKDKDFLDNEENEDILEDIVLTLTLFEDREMIEERLKTYAHLFDDKVMKQLKRRRYTGWGRLSRKLINGIRDKQSGKTILDFLKSDGFANRNFMQLIHDDSLTFKEDIQKAQVSGQGDSLHEHIANLAGSPAIKKGILQTVKVVDELVKVMGRHKPENIVIEMARENQTTQKGQKNSRERMKRIEEGIKELGSQILKEHPVENTQLQNEKLYLYYLQNGRDMYVDQELDINRLSDYDVDHIVPQSFLKDDSIDNKVLTRSDKARGKSDNVPSEEVVKKMKNYWRQLLNAKLITQRKFDNLTKAERGGLSELDKAGFIKRQLVETRQITKHVAQILDSRMNTKYDENDKLIREVKVITLKSKLVSDFRKDFQFYKVREINNYHHAHDAYLNAVVGTALIKKYPKLESEFVYGDYKVYDVRKMIAKSEQEIGKATAKYFFYSNIMNFFKTEITLANGEIRKRPLIETNGETGEIVWDKGRDFATVRKVLSMPQVNIVKKTEVQTGGFSKESILPKRNSDKLIARKKDWDPKKYGGFDSPTVAYSVLVVAKVEKGKSKKLKSVKELLGITIMERSSFEKNPIDFLEAKGYKEVKKDLIIKLPKYSLFELENGRKRMLASAGELQKGNELALPSKYVNFLYLASHYEKLKGSPEDNEQKQLFVEQHKHYLDEIIEQISEFSKRVILADANLDKVLSAYNKHRDKPIREQAENIIHLFTLTNLGAPAAFKYFDTTIDRKRYTSTKEVLDATLIHQSITGLYETRIDLSQLGGDGGEAAAKPAPGGSGGLDDEYRLYSPLVKPDQNIQFWLEQFPQAWAETAGMGLAKQVPPQVIQLKASATPVSVRQYPLSKEAQEGIRPHVQRLIQQGILVPVQSPWNTPLLPVRKPGTNDYRPVQDLREVNKRVQDIHPTVPNPYNLLCALPPQRSWYTVLDLKDAFFCLRLHPTSQPLFAFEWRDPGTGRTGQLTWTRLPQGFKNSPTIFNEALHRDLANFRIQHPQVTLLQYVDDLLLAGATKQDCLEGTKALLLELSDLGYRASAKKAQICRREVTYLGYSLRDGQRWLTEARKKTVVQIPAPTTAKQVREFLGKAGFCRLFIPGFATLAAPLYPLTKPKGEFSWAPEHQKAFDAIKKALLSAPALALPDVTKPFTLYVDERKGVARGVLTQTLGPWRRPVAYLSKKLDPVASGWPVCLKAIAAVAILVKDADKLTLGQNITVIAPHALENIVRQPPDRWMTNARMTHYQSLLLTERVTFAPPAALNPATLLPEETDEPVTHDCHQLLIEETGVRKDLTDIPLTGEVLTWFTDGSSYVVEGKRMAGAAVVDGTRTIWASSLPEGTSAQKAELMALTQALRLAEGKSINIYTDSRYAFATAHVHGAIYKQRGWLTSAGREIKNKEEILSLLEALHLPKRLAIIHCPGHQKAKDPISRGNQMADRVAKQAAQGVNLLPAGKRTADGSEFEKRTADGSEFESPKKKAKVE

SEQ ID NO: 248 - protein, 2088 aa, synthetic construct; identical to SEQ ID NO: 94
  source 1..2088: note = Description of Artificial Sequence: Synthetic polypeptide

SEQ ID NO: 249 - protein, 2086 aa, synthetic construct; identical to SEQ ID NO: 60
  source 1..2086: note = Description of Artificial Sequence: Synthetic polypeptide

SEQ ID NO: 250 - protein, 2088 aa, synthetic construct
  source 1..2088: note = Description of Artificial Sequence: Synthetic polypeptide
MPAAKRVKLDGGDKKYSIGLDIGTNSVGWAVITDEYKVPSKKFKVLGNTDRHSIKKNLIGALLFDSGETAEATRLKRTARRRYTRRKNRICYLQEIFSNEMAKVDDSFFHRLEESFLVEEDKKHERHPIFGNIVDEVAYHEKYPTIYHLRKKLVDSTDKADLRLIYLALAHMIKFRGHFLIEGDLNPDNSDVDKLFIQLVQTYNQLFEENPINASGVDAKAILSARLSKSRRLENLIAQLPGEKKNGLFGNLIALSLGLTPNFKSNFDLAEDAKLQLSKDTYDDDLDNLLAQIGDQYADLFLAAKNLSDAILLSDILRVNTEITKAPLSASMIKRYDEHHQDLTLLKALVRQQLPEKYKEIFFDQSKNGYAGYIDGGASQEEFYKFIKPILEKMDGTEELLVKLNREDLLRKQRTFDNGSIPHQIHLGELHAILRRQEDFYPFLKDNREKIEKILTFRIPYYVGPLARGNSRFAWMTRKSEETITPWNFEEVVDKGASAQSFIERMTNFDKNLPNEKVLPKHSLLYEYFTVYNELTKVKYVTEGMRKPAFLSGEQKKAIVDLLFKTNRKVTVKQLKEDYFKKIECFDSVEISGVEDRFNASLGTYHDLLKIIKDKDFLDNEENEDILEDIVLTLTLFEDREMIEERLKTYAHLFDDKVMKQLKRRRYTGWGRLSRKLINGIRDKQSGKTILDFLKSDGFANRNFMQLIHDDSLTFKEDIQKAQVSGQGDSLHEHIANLAGSPAIKKGILQTVKVVDELVKVMGRHKPENIVIEMARENQTTQKGQKNSRERMKRIEEGIKELGSQILKEHPVENTQLQNEKLYLYYLQNGRDMYVDQELDINRLSDYDVDHIVPQSFLKDDSIDNKVLTRSDKARGKSDNVPSEEVVKKMKNYWRQLLNAKLITQRKFDNLTKAERGGLSELDKAGFIKRQLVETRQITKHVAQILDSRMNTKYDENDKLIREVKVITLKSKLVSDFRKDFQFYKVREINNYHHAHDAYLNAVVGTALIKKYPKLESEFVYGDYKVYDVRKMIAKSEQEIGKATAKYFFYSNIMNFFKTEITLANGEIRKRPLIETNGETGEIVWDKGRDFATVRKVLSMPQVNIVKKTEVQTGGFSKESILPKRNSDKLIARKKDWDPKKYGGFDSPTVAYSVLVVAKVEKGKSKKLKSVKELLGITIMERSSFEKNPIDFLEAKGYKEVKKDLIIKLPKYSLFELENGRKRMLASAGELQKGNELALPSKYVNFLYLASHYEKLKGSPEDNEQKQLFVEQHKHYLDEIIEQISEFSKRVILADANLDKVLSAYNKHRDKPIREQAENIIHLFTLTNLGAPAAFKYFDTTIDRKRYTSTKEVLDATLIHQSITGLYETRIDLSQLGGDGGGGSEAAAKGGGGGLDDEYRLYSPLVKPDQNIQFWLEQFPQAWAETAGMGLAKQVPPQVIQLKASATPVSVRQYPLSKEAQEGIRPHVQRLIQQGILVPVQSPWNTPLLPVRKPGTNDYRPVQDLREVNKRVQDIHPTVPNPYNLLCALPPQRSWYTVLDLKDAFFCLRLHPTSQPLFAFEWRDPGTGRTGQLTWTRLPQGFKNSPTIFNEALHRDLANFRIQHPQVTLLQYVDDLLLAGATKQDCLEGTKALLLELSDLGYRASAKKAQICRREVTYLGYSLRDGQRWLTEARKKTVVQIPAPTTAKQVREFLGKAGFCRLFIPGFATLAAPLYPLTKPKGEFSWAPEHQKAFDAIKKALLSAPALALPDVTKPFTLYVDERKGVARGVLTQTLGPWRRPVAYLSKKLDPVASGWPVCLKAIAAVAILVKDADKLTLGQNITVIAPHALENIVRQPPDRWMTNARMTHYQSLLLTERVTFAPPAALNPATLLPEETDEPVTHDCHQLLIEETGVRKDLTDIPLTGEVLTWFTDGSSYVVEGKRMAGAAVVDGTRTIWASSLPEGTSAQKAELMALTQALRLAEGKSINIYTDSRYAFATAHVHGAIYKQRGWLTSAGREIKNKEEILSLLEALHLPKRLAIIHCPGHQKAKDPISRGNQMADRVAKQAAQGVNLLPAGKRTADGSEFEKRTADGSEFESPKKKAKVE

SEQ ID NO: 251 - protein, 2086 aa, synthetic construct; identical to SEQ ID NO: 82
  source 1..2086: note = Description of Artificial Sequence: Synthetic polypeptide

SEQ ID NO: 252 - protein, 2083 aa, synthetic construct
  source 1..2083: note = Description of Artificial Sequence: Synthetic polypeptide
MPAAKRVKLDGGDKKYSIGLDIGTNSVGWAVITDEYKVPSKKFKVLGNTDRHSIKKNLIGALLFDSGETAEATRLKRTARRRYTRRKNRICYLQEIFSNEMAKVDDSFFHRLEESFLVEEDKKHERHPIFGNIVDEVAYHEKYPTIYHLRKKLVDSTDKADLRLIYLALAHMIKFRGHFLIEGDLNPDNSDVDKLFIQLVQTYNQLFEENPINASGVDAKAILSARLSKSRRLENLIAQLPGEKKNGLFGNLIALSLGLTPNFKSNFDLAEDAKLQLSKDTYDDDLDNLLAQIGDQYADLFLAAKNLSDAILLSDILRVNTEITKAPLSASMIKRYDEHHQDLTLLKALVRQQLPEKYKEIFFDQSKNGYAGYIDGGASQEEFYKFIKPILEKMDGTEELLVKLNREDLLRKQRTFDNGSIPHQIHLGELHAILRRQEDFYPFLKDNREKIEKILTFRIPYYVGPLARGNSRFAWMTRKSEETITPWNFEEVVDKGASAQSFIERMTNFDKNLPNEKVLPKHSLLYEYFTVYNELTKVKYVTEGMRKPAFLSGEQKKAIVDLLFKTNRKVTVKQLKEDYFKKIECFDSVEISGVEDRFNASLGTYHDLLKIIKDKDFLDNEENEDILEDIVLTLTLFEDREMIEERLKTYAHLFDDKVMKQLKRRRYTGWGRLSRKLINGIRDKQSGKTILDFLKSDGFANRNFMQLIHDDSLTFKEDIQKAQVSGQGDSLHEHIANLAGSPAIKKGILQTVKVVDELVKVMGRHKPENIVIEMARENQTTQKGQKNSRERMKRIEEGIKELGSQILKEHPVENTQLQNEKLYLYYLQNGRDMYVDQELDINRLSDYDVDHIVPQSFLKDDSIDNKVLTRSDKARGKSDNVPSEEVVKKMKNYWRQLLNAKLITQRKFDNLTKAERGGLSELDKAGFIKRQLVETRQITKHVAQILDSRMNTKYDENDKLIREVKVITLKSKLVSDFRKDFQFYKVREINNYHHAHDAYLNAVVGTALIKKYPKLESEFVYGDYKVYDVRKMIAKSEQEIGKATAKYFFYSNIMNFFKTEITLANGEIRKRPLIETNGETGEIVWDKGRDFATVRKVLSMPQVNIVKKTEVQTGGFSKESILPKRNSDKLIARKKDWDPKKYGGFDSPTVAYSVLVVAKVEKGKSKKLKSVKELLGITIMERSSFEKNPIDFLEAKGYKEVKKDLIIKLPKYSLFELENGRKRMLASAGELQKGNELALPSKYVNFLYLASHYEKLKGSPEDNEQKQLFVEQHKHYLDEIIEQISEFSKRVILADANLDKVLSAYNKHRDKPIREQAENIIHLFTLTNLGAPAAFKYFDTTIDRKRYTSTKEVLDATLIHQSITGLYETRIDLSQLGGDGGPAPGGSGGLDDEYRLYSPLVKPDQNIQFWLEQFPQAWAETAGMGLAKQVPPQVIQLKASATPVSVRQYPLSKEAQEGIRPHVQRLIQQGILVPVQSPWNTPLLPVRKPGTNDYRPVQDLREVNKRVQDIHPTVPNPYNLLCALPPQRSWYTVLDLKDAFFCLRLHPTSQPLFAFEWRDPGTGRTGQLTWTRLPQGFKNSPTIFNEALHRDLANFRIQHPQVTLLQYVDDLLLAGATKQDCLEGTKALLLELSDLGYRASAKKAQICRREVTYLGYSLRDGQRWLTEARKKTVVQIPAPTTAKQVREFLGKAGFCRLFIPGFATLAAPLYPLTKPKGEFSWAPEHQKAFDAIKKALLSAPALALPDVTKPFTLYVDERKGVARGVLTQTLGPWRRPVAYLSKKLDPVASGWPVCLKAIAAVAILVKDADKLTLGQNITVIAPHALENIVRQPPDRWMTNARMTHYQSLLLTERVTFAPPAALNPATLLPEETDEPVTHDCHQLLIEETGVRKDLTDIPLTGEVLTWFTDGSSYVVEGKRMAGAAVVDGTRTIWASSLPEGTSAQKAELMALTQALRLAEGKSINIYTDSRYAFATAHVHGAIYKQRGWLTSAGREIKNKEEILSLLEALHLPKRLAIIHCPGHQKAKDPISRGNQMADRVAKQAAQGVNLLPAGKRTADGSEFEKRTADGSEFESPKKKAKVE

SEQ ID NO: 253 - protein, 2083 aa, synthetic construct; identical to SEQ ID NO: 59
  source 1..2083: note = Description of Artificial Sequence: Synthetic polypeptide

SEQ ID NO: 254 - protein, 2088 aa, synthetic construct
  source 1..2088: note = Description of Artificial Sequence: Synthetic polypeptide
MPAAKRVKLDGGDKKYSIGLDIGTNSVGWAVITDEYKVPSKKFKVLGNTDRHSIKKNLIGALLFDSGETAEATRLKRTARRRYTRRKNRICYLQEIFSNEMAKVDDSFFHRLEESFLVEEDKKHERHPIFGNIVDEVAYHEKYPTIYHLRKKLVDSTDKADLRLIYLALAHMIKFRGHFLIEGDLNPDNSDVDKLFIQLVQTYNQLFEENPINASGVDAKAILSARLSKSRRLENLIAQLPGEKKNGLFGNLIALSLGLTPNFKSNFDLAEDAKLQLSKDTYDDDLDNLLAQIGDQYADLFLAAKNLSDAILLSDILRVNTEITKAPLSASMIKRYDEHHQDLTLLKALVRQQLPEKYKEIFFDQSKNGYAGYIDGGASQEEFYKFIKPILEKMDGTEELLVKLNREDLLRKQRTFDNGSIPHQIHLGELHAILRRQEDFYPFLKDNREKIEKILTFRIPYYVGPLARGNSRFAWMTRKSEETITPWNFEEVVDKGASAQSFIERMTNFDKNLPNEKVLPKHSLLYEYFTVYNELTKVKYVTEGMRKPAFLSGEQKKAIVDLLFKTNRKVTVKQLKEDYFKKIECFDSVEISGVEDRFNASLGTYHDLLKIIKDKDFLDNEENEDILEDIVLTLTLFEDREMIEERLKTYAHLFDDKVMKQLKRRRYTGWGRLSRKLINGIRDKQSGKTILDFLKSDGFANRNFMQLIHDDSLTFKEDIQKAQVSGQGDSLHEHIANLAGSPAIKKGILQTVKVVDELVKVMGRHKPENIVIEMARENQTTQKGQKNSRERMKRIEEGIKELGSQILKEHPVENTQLQNEKLYLYYLQNGRDMYVDQELDINRLSDYDVDHIVPQSFLKDDSIDNKVLTRSDKARGKSDNVPSEEVVKKMKNYWRQLLNAKLITQRKFDNLTKAERGGLSELDKAGFIKRQLVETRQITKHVAQILDSRMNTKYDENDKLIREVKVITLKSKLVSDFRKDFQFYKVREINNYHHAHDAYLNAVVGTALIKKYPKLESEFVYGDYKVYDVRKMIAKSEQEIGKATAKYFFYSNIMNFFKTEITLANGEIRKRPLIETNGETGEIVWDKGRDFATVRKVLSMPQVNIVKKTEVQTGGFSKESILPKRNSDKLIARKKDWDPKKYGGFDSPTVAYSVLVVAKVEKGKSKKLKSVKELLGITIMERSSFEKNPIDFLEAKGYKEVKKDLIIKLPKYSLFELENGRKRMLASAGELQKGNELALPSKYVNFLYLASHYEKLKGSPEDNEQKQLFVEQHKHYLDEIIEQISEFSKRVILADANLDKVLSAYNKHRDKPIREQAENIIHLFTLTNLGAPAAFKYFDTTIDRKRYTSTKEVLDATLIHQSITGLYETRIDLSQLGGDGGGSSGGSEAAAKGGLDDEYRLYSPLVKPDQNIQFWLEQFPQAWAETAGMGLAKQVPPQVIQLKASATPVSVRQYPLSKEAQEGIRPHVQRLIQQGILVPVQSPWNTPLLPVRKPGTNDYRPVQDLREVNKRVQDIHPTVPNPYNLLCALPPQRSWYTVLDLKDAFFCLRLHPTSQPLFAFEWRDPGTGRTGQLTWTRLPQGFKNSPTIFNEALHRDLANFRIQHPQVTLLQYVDDLLLAGATKQDCLEGTKALLLELSDLGYRASAKKAQICRREVTYLGYSLRDGQRWLTEARKKTVVQIPAPTTAKQVREFLGKAGFCRLFIPGFATLAAPLYPLTKPKGEFSWAPEHQKAFDAIKKALLSAPALALPDVTKPFTLYVDERKGVARGVLTQTLGPWRRPVAYLSKKLDPVASGWPVCLKAIAAVAILVKDADKLTLGQNITVIAPHALENIVRQPPDRWMTNARMTHYQSLLLTERVTFAPPAALNPATLLPEETDEPVTHDCHQLLIEETGVRKDLTDIPLTGEVLTWFTDGSSYVVEGKRMAGAAVVDGTRTIWASSLPEGTSAQKAELMALTQALRLAEGKSINIYTDSRYAFATAHVHGAIYKQRGWLTSAGREIKNKEEILSLLEALHLPKRLAIIHCPGHQKAKDPISRGNQMADRVAKQAAQGVNLLPAGKRTADGSEFEKRTADGSEFESPKKKAKVE

SEQ ID NO: 255 - protein, 2088 aa, synthetic construct; identical to SEQ ID NO: 86
  source 1..2088: note = Description of Artificial Sequence: Synthetic polypeptide

SEQ ID NO: 256 - protein, 2107 aa, synthetic construct
  source 1..2107: note = Description of Artificial Sequence: Synthetic polypeptide
MPAAKRVKLDGGDKKYSIGLDIGTNSVGWAVITDEYKVPSKKFKVLGNTDRHSIKKNLIGALLFDSGETAEATRLKRTARRRYTRRKNRICYLQEIFSNEMAKVDDSFFHRLEESFLVEEDKKHERHPIFGNIVDEVAYHEKYPTIYHLRKKLVDSTDKADLRLIYLALAHMIKFRGHFLIEGDLNPDNSDVDKLFIQLVQTYNQLFEENPINASGVDAKAILSARLSKSRRLENLIAQLPGEKKNGLFGNLIALSLGLTPNFKSNFDLAEDAKLQLSKDTYDDDLDNLLAQIGDQYADLFLAAKNLSDAILLSDILRVNTEITKAPLSASMIKRYDEHHQDLTLLKALVRQQLPEKYKEIFFDQSKNGYAGYIDGGASQEEFYKFIKPILEKMDGTEELLVKLNREDLLRKQRTFDNGSIPHQIHLGELHAILRRQEDFYPFLKDNREKIEKILTFRIPYYVGPLARGNSRFAWMTRKSEETITPWNFEEVVDKGASAQSFIERMTNFDKNLPNEKVLPKHSLLYEYFTVYNELTKVKYVTEGMRKPAFLSGEQKKAIVDLLFKTNRKVTVKQLKEDYFKKIECFDSVEISGVEDRFNASLGTYHDLLKIIKDKDFLDNEENEDILEDIVLTLTLFEDREMIEERLKTYAHLFDDKVMKQLKRRRYTGWGRLSRKLINGIRDKQSGKTILDFLKSDGFANRNFMQLIHDDSLTFKEDIQKAQVSGQGDSLHEHIANLAGSPAIKKGILQTVKVVDELVKVMGRHKPENIVIEMARENQTTQKGQKNSRERMKRIEEGIKELGSQILKEHPVENTQLQNEKLYLYYLQNGRDMYVDQELDINRLSDYDVDHIVPQSFLKDDSIDNKVLTRSDKARGKSDNVPSEEVVKKMKNYWRQLLNAKLITQRKFDNLTKAERGGLSELDKAGFIKRQLVETRQITKHVAQILDSRMNTKYDENDKLIREVKVITLKSKLVSDFRKDFQFYKVREINNYHHAHDAYLNAVVGTALIKKYPKLESEFVYGDYKVYDVRKMIAKSEQEIGKATAKYFFYSNIMNFFKTEITLANGEIRKRPLIETNGETGEIVWDKGRDFATVRKVLSMPQVNIVKKTEVQTGGFSKESILPKRNSDKLIARKKDWDPKKYGGFDSPTVAYSVLVVAKVEKGKSKKLKSVKELLGITIMERSSFEKNPIDFLEAKGYKEVKKDLIIKLPKYSLFELENGRKRMLASAGELQKGNELALPSKYVNFLYLASHYEKLKGSPEDNEQKQLFVEQHKHYLDEIIEQISEFSKRVILADANLDKVLSAYNKHRDKPIREQAENIIHLFTLTNLGAPAAFKYFDTTIDRKRYTSTKEVLDATLIHQSITGLYETRIDLSQLGGDGGGGGGSGGGGSGGGGSGGGGSGGGGSGGGGSGGLDDEYRLYSPLVKPDQNIQFWLEQFPQAWAETAGMGLAKQVPPQVIQLKASATPVSVRQYPLSKEAQEGIRPHVQRLIQQGILVPVQSPWNTPLLPVRKPGTNDYRPVQDLREVNKRVQDIHPTVPNPYNLLCALPPQRSWYTVLDLKDAFFCLRLHPTSQPLFAFEWRDPGTGRTGQLTWTRLPQGFKNSPTIFNEALHRDLANFRIQHPQVTLLQYVDDLLLAGATKQDCLEGTKALLLELSDLGYRASAKKAQICRREVTYLGYSLRDGQRWLTEARKKTVVQIPAPTTAKQVREFLGKAGFCRLFIPGFATLAAPLYPLTKPKGEFSWAPEHQKAFDAIKKALLSAPALALPDVTKPFTLYVDERKGVARGVLTQTLGPWRRPVAYLSKKLDPVASGWPVCLKAIAAVAILVKDADKLTLGQNITVIAPHALENIVRQPPDRWMTNARMTHYQSLLLTERVTFAPPAALNPATLLPEETDEPVTHDCHQLLIEETGVRKDLTDIPLTGEVLTWFTDGSSYVVEGKRMAGAAVVDGTRTIWASSLPEGTSAQKAELMALTQALRLAEGKSINIYTDSRYAFATAHVHGAIYKQRGWLTSAGREIKNKEEILSLLEALHLPKRLAIIHCPGHQKAKDPISRGNQMADRVAKQAAQGVNLLPAGKRTADGSEFEKRTADGSEFESPKKKAKVE

SEQ ID NO: 257 - protein, 2086 aa, synthetic construct; identical to SEQ ID NO: 64
  source 1..2086: note = Description of Artificial Sequence: Synthetic polypeptide

SEQ ID NO: 258 - protein, 2088 aa, synthetic construct
  source 1..2088: note = Description of Artificial Sequence: Synthetic polypeptide
MPAAKRVKLDGGDKKYSIGLDIGTNSVGWAVITDEYKVPSKKFKVLGNTDRHSIKKNLIGALLFDSGETAEATRLKRTARRRYTRRKNRICYLQEIFSNEMAKVDDSFFHRLEESFLVEEDKKHERHPIFGNIVDEVAYHEKYPTIYHLRKKLVDSTDKADLRLIYLALAHMIKFRGHFLIEGDLNPDNSDVDKLFIQLVQTYNQLFEENPINASGVDAKAILSARLSKSRRLENLIAQLPGEKKNGLFGNLIALSLGLTPNFKSNFDLAEDAKLQLSKDTYDDDLDNLLAQIGDQYADLFLAAKNLSDAILLSDILRVNTEITKAPLSASMIKRYDEHHQDLTLLKALVRQQLPEKYKEIFFDQSKNGYAGYIDGGASQEEFYKFIKPILEKMDGTEELLVKLNREDLLRKQRTFDNGSIPHQIHLGELHAILRRQEDFYPFLKDNREKIEKILTFRIPYYVGPLARGNSRFAWMTRKSEETITPWNFEEVVDKGASAQSFIERMTNFDKNLPNEKVLPKHSLLYEYFTVYNELTKVKYVTEGMRKPAFLSGEQKKAIVDLLFKTNRKVTVKQLKEDYFKKIECFDSVEISGVEDRFNASLGTYHDLLKIIKDKDFLDNEENEDILEDIVLTLTLFEDREMIEERLKTYAHLFDDKVMKQLKRRRYTGWGRLSRKLINGIRDKQSGKTILDFLKSDGFANRNFMQLIHDDSLTFKEDIQKAQVSGQGDSLHEHIANLAGSPAIKKGILQTVKVVDELVKVMGRHKPENIVIEMARENQTTQKGQKNSRERMKRIEEGIKELGSQILKEHPVENTQLQNEKLYLYYLQNGRDMYVDQELDINRLSDYDVDHIVPQSFLKDDSIDNKVLTRSDKARGKSDNVPSEEVVKKMKNYWRQLLNAKLITQRKFDNLTKAERGGLSELDKAGFIKRQLVETRQITKHVAQILDSRMNTKYDENDKLIREVKVITLKSKLVSDFRKDFQFYKVREINNYHHAHDAYLNAVVGTALIKKYPKLESEFVYGDYKVYDVRKMIAKSEQEIGKATAKYFFYSNIMNFFKTEITLANGEIRKRPLIETNGETGEIVWDKGRDFATVRKVLSMPQVNIVKKTEVQTGGFSKESILPKRNSDKLIARKKDWDPKKYGGFDSPTVAYSVLVVAKVEKGKSKKLKSVKELLGITIMERSSFEKNPIDFLEAKGYKEVKKDLIIKLPKYSLFELENGRKRMLASAGELQKGNELALPSKYVNFLYLASHYEKLKGSPEDNEQKQLFVEQHKHYLDEIIEQISEFSKRVILADANLDKVLSAYNKHRDKPIREQAENIIHLFTLTNLGAPAAFKYFDTTIDRKRYTSTKEVLDATLIHQSITGLYETRIDLSQLGGDGGGSSEAAAKGGSGGLDDEYRLYSPLVKPDQNIQFWLEQFPQAWAETAGMGLAKQVPPQVIQLKASATPVSVRQYPLSKEAQEGIRPHVQRLIQQGILVPVQSPWNTPLLPVRKPGTNDYRPVQDLREVNKRVQDIHPTVPNPYNLLCALPPQRSWYTVLDLKDAFFCLRLHPTSQPLFAFEWRDPGTGRTGQLTWTRLPQGFKNSPTIFNEALHRDLANFRIQHPQVTLLQYVDDLLLAGATKQDCLEGTKALLLELSDLGYRASAKKAQICRREVTYLGYSLRDGQRWLTEARKKTVVQIPAPTTAKQVREFLGKAGFCRLFIPGFATLAAPLYPLTKPKGEFSWAPEHQKAFDAIKKALLSAPALALPDVTKPFTLYVDERKGVARGVLTQTLGPWRRPVAYLSKKLDPVASGWPVCLKAIAAVAILVKDADKLTLGQNITVIAPHALENIVRQPPDRWMTNARMTHYQSLLLTERVTFAPPAALNPATLLPEETDEPVTHDCHQLLIEETGVRKDLTDIPLTGEVLTWFTDGSSYVVEGKRMAGAAVVDGTRTIWASSLPEGTSAQKAELMALTQALRLAEGKSINIYTDSRYAFATAHVHGAIYKQRGWLTSAGREIKNKEEILSLLEALHLPKRLAIIHCPGHQKAKDPISRGNQMADRVAKQAAQGVNLLPAGKRTADGSEFEKRTADGSEFESPKKKAKVE

SEQ ID NO: 259 - protein, 2083 aa, synthetic construct
  source 1..2083: note = Description of Artificial Sequence: Synthetic polypeptide
MPAAKRVKLDGGDKKYSIGLDIGTNSVGWAVITDEYKVPSKKFKVLGNTDRHSIKKNLIGALLFDSGETAEATRLKRTARRRYTRRKNRICYLQEIFSNEMAKVDDSFFHRLEESFLVEEDKKHERHPIFGNIVDEVAYHEKYPTIYHLRKKLVDSTDKADLRLIYLALAHMIKFRGHFLIEGDLNPDNSDVDKLFIQLVQTYNQLFEENPINASGVDAKAILSARLSKSRRLENLIAQLPGEKKNGLFGNLIALSLGLTPNFKSNFDLAEDAKLQLSKDTYDDDLDNLLAQIGDQYADLFLAAKNLSDAILLSDILRVNTEITKAPLSASMIKRYDEHHQDLTLLKALVRQQLPEKYKEIFFDQSKNGYAGYIDGGASQEEFYKFIKPILEKMDGTEELLVKLNREDLLRKQRTFDNGSIPHQIHLGELHAILRRQEDFYPFLKDNREKIEKILTFRIPYYVGPLARGNSRFAWMTRKSEETITPWNFEEVVDKGASAQSFIERMTNFDKNLPNEKVLPKHSLLYEYFTVYNELTKVKYVTEGMRKPAFLSGEQKKAIVDLLFKTNRKVTVKQLKEDYFKKIECFDSVEISGVEDRFNASLGTYHDLLKIIKDKDFLDNEENEDILEDIVLTLTLFEDREMIEERLKTYAHLFDDKVMKQLKRRRYTGWGRLSRKLINGIRDKQSGKTILDFLKSDGFANRNFMQLIHDDSLTFKEDIQKAQVSGQGDSLHEHIANLAGSPAIKKGILQTVKVVDELVKVMGRHKPENIVIEMARENQTTQKGQKNSRERMKRIEEGIKELGSQILKEHPVENTQLQNEKLYLYYLQNGRDMYVDQELDINRLSDYDVDHIVPQSFLKDDSIDNKVLTRSDKARGKSDNVPSEEVVKKMKNYWRQLLNAKLITQRKFDNLTKAERGGLSELDKAGFIKRQLVETRQITKHVAQILDSRMNTKYDENDKLIREVKVITLKSKLVSDFRKDFQFYKVREINNYHHAHDAYLNAVVGTALIKKYPKLESEFVYGDYKVYDVRKMIAKSEQEIGKATAKYFFYSNIMNFFKTEITLANGEIRKRPLIETNGETGEIVWDKGRDFATVRKVLSMPQVNIVKKTEVQTGGFSKESILPKRNSDKLIARKKDWDPKKYGGFDSPTVAYSVLVVAKVEKGKSKKLKSVKELLGITIMERSSFEKNPIDFLEAKGYKEVKKDLIIKLPKYSLFELENGRKRMLASAGELQKGNELALPSKYVNFLYLASHYEKLKGSPEDNEQKQLFVEQHKHYLDEIIEQISEFSKRVILADANLDKVLSAYNKHRDKPIREQAENIIHLFTLTNLGAPAAFKYFDTTIDRKRYTSTKEVLDATLIHQSITGLYETRIDLSQLGGDGGGGSGGSGGLDDEYRLYSPLVKPDQNIQFWLEQFPQAWAETAGMGLAKQVPPQVIQLKASATPVSVRQYPLSKEAQEGIRPHVQRLIQQGILVPVQSPWNTPLLPVRKPGTNDYRPVQDLREVNKRVQDIHPTVPNPYNLLCALPPQRSWYTVLDLKDAFFCLRLHPTSQPLFAFEWRDPGTGRTGQLTWTRLPQGFKNSPTIFNEALHRDLANFRIQHPQVTLLQYVDDLLLAGATKQDCLEGTKALLLELSDLGYRASAKKAQICRREVTYLGYSLRDGQRWLTEARKKTVVQIPAPTTAKQVREFLGKAGFCRLFIPGFATLAAPLYPLTKPKGEFSWAPEHQKAFDAIKKALLSAPALALPDVTKPFTLYVDERKGVARGVLTQTLGPWRRPVAYLSKKLDPVASGWPVCLKAIAAVAILVKDADKLTLGQNITVIAPHALENIVRQPPDRWMTNARMTHYQSLLLTERVTFAPPAALNPATLLPEETDEPVTHDCHQLLIEETGVRKDLTDIPLTGEVLTWFTDGSSYVVEGKRMAGAAVVDGTRTIWASSLPEGTSAQKAELMALTQALRLAEGKSINIYTDSRYAFATAHVHGAIYKQRGWLTSAGREIKNKEEILSLLEALHLPKRLAIIHCPGHQKAKDPISRGNQMADRVAKQAAQGVNLLPAGKRTADGSEFEKRTADGSEFESPKKKAKVE

SEQ ID NO: 260 - protein, 2088 aa, synthetic construct; identical to SEQ ID NO: 93
  source 1..2088: note = Description of Artificial Sequence: Synthetic polypeptide

SEQ ID NO: 261 - protein, 2083 aa, synthetic construct; identical to SEQ ID NO: 81
  source 1..2083: note = Description of Artificial Sequence: Synthetic polypeptide

SEQ ID NO: 262 - protein, 2080 aa, synthetic construct
  source 1..2080: note = Description of Artificial Sequence: Synthetic polypeptide
MPAAKRVKLDGGDKKYSIGLDIGTNSVGWAVITDEYKVPSKKFKVLGNTDRHSIKKNLIGALLFDSGETAEATRLKRTARRRYTRRKNRICYLQEIFSNEMAKVDDSFFHRLEESFLVEEDKKHERHPIFGNIVDEVAYHEKYPTIYHLRKKLVDSTDKADLRLIYLALAHMIKFRGHFLIEGDLNPDNSDVDKLFIQLVQTYNQLFEENPINASGVDAKAILSARLSKSRRLENLIAQLPGEKKNGLFGNLIALSLGLTPNFKSNFDLAEDAKLQLSKDTYDDDLDNLLAQIGDQYADLFLAAKNLSDAILLSDILRVNTEITKAPLSASMIKRYDEHHQDLTLLKALVRQQLPEKYKEIFFDQSKNGYAGYIDGGASQEEFYKFIKPILEKMDGTEELLVKLNREDLLRKQRTFDNGSIPHQIHLGELHAILRRQEDFYPFLKDNREKIEKILTFRIPYYVGPLARGNSRFAWMTRKSEETITPWNFEEVVDKGASAQSFIERMTNFDKNLPNEKVLPKHSLLYEYFTVYNELTKVKYVTEGMRKPAFLSGEQKKAIVDLLFKTNRKVTVKQLKEDYFKKIECFDSVEISGVEDRFNASLGTYHDLLKIIKDKDFLDNEENEDILEDIVLTLTLFEDREMIEERLKTYAHLFDDKVMKQLKRRRYTGWGRLSRKLINGIRDKQSGKTILDFLKSDGFANRNFMQLIHDDSLTFKEDIQKAQVSGQGDSLHEHIANLAGSPAIKKGILQTVKVVDELVKVMGRHKPENIVIEMARENQTTQKGQKNSRERMKRIEEGIKELGSQILKEHPVENTQLQNEKLYLYYLQNGRDMYVDQELDINRLSDYDVDHIVPQSFLKDDSIDNKVLTRSDKARGKSDNVPSEEVVKKMKNYWRQLLNAKLITQRKFDNLTKAERGGLSELDKAGFIKRQLVETRQITKHVAQILDSRMNTKYDENDKLIREVKVITLKSKLVSDFRKDFQFYKVREINNYHHAHDAYLNAVVGTALIKKYPKLESEFVYGDYKVYDVRKMIAKSEQEIGKATAKYFFYSNIMNFFKTEITLANGEIRKRPLIETNGETGEIVWDKGRDFATVRKVLSMPQVNIVKKTEVQTGGFSKESILPKRNSDKLIARKKDWDPKKYGGFDSPTVAYSVLVVAKVEKGKSKKLKSVKELLGITIMERSSFEKNPIDFLEAKGYKEVKKDLIIKLPKYSLFELENGRKRMLASAGELQKGNELALPSKYVNFLYLASHYEKLKGSPEDNEQKQLFVEQHKHYLDEIIEQISEFSKRVILADANLDKVLSAYNKHRDKPIREQAENIIHLFTLTNLGAPAAFKYFDTTIDRKRYTSTKEVLDATLIHQSITGLYETRIDLSQLGGDGGGGSGGLDDEYRLYSPLVKPDQNIQFWLEQFPQAWAETAGMGLAKQVPPQVIQLKASATPVSVRQYPLSKEAQEGIRPHVQRLIQQGILVPVQSPWNTPLLPVRKPGTNDYRPVQDLREVNKRVQDIHPTVPNPYNLLCALPPQRSWYTVLDLKDAFFCLRLHPTSQPLFAFEWRDPGTGRTGQLTWTRLPQGFKNSPTIFNEALHRDLANFRIQHPQVTLLQYVDDLLLAGATKQDCLEGTKALLLELSDLGYRASAKKAQICRREVTYLGYSLRDGQRWLTEARKKTVVQIPAPTTAKQVREFLGKAGFCRLFIPGFATLAAPLYPLTKPKGEFSWAPEHQKAFDAIKKALLSAPALALPDVTKPFTLYVDERKGVARGVLTQTLGPWRRPVAYLSKKLDPVASGWPVCLKAIAAVAILVKDADKLTLGQNITVIAPHALENIVRQPPDRWMTNARMTHYQSLLLTERVTFAPPAALNPATLLPEETDEPVTHDCHQLLIEETGVRKDLTDIPLTGEVLTWFTDGSSYVVEGKRMAGAAVVDGTRTIWASSLPEGTSAQKAELMALTQALRLAEGKSINIYTDSRYAFATAHVHGAIYKQRGWLTSAGREIKNKEEILSLLEALHLPKRLAIIHCPGHQKAKDPISRGNQMADRVAKQAAQGVNLLPAGKRTADGSEFEKRTADGSEFESPKKKAKVE

SEQ ID NO: 263 - protein, 2088 aa, synthetic construct; identical to SEQ ID NO: 92
  source 1..2088: note = Description of Artificial Sequence: Synthetic polypeptide

SEQ ID NO: 264 - protein, 2088 aa, synthetic construct; identical to SEQ ID NO: 53
  source 1..2088: note = Description of Artificial Sequence: Synthetic polypeptide

SEQ ID NO: 265 - protein, 2083 aa, synthetic construct; identical to SEQ ID NO: 79
  source 1..2083: note = Description of Artificial Sequence: Synthetic polypeptide

SEQ ID NO: 266 - protein, 2082 aa, synthetic construct
  source 1..2082: note = Description of Artificial Sequence: Synthetic polypeptide
MPAAKRVKLDGGDKKYSIGLDIGTNSVGWAVITDEYKVPSKKFKVLGNTDRHSIKKNLIGALLFDSGETAEATRLKRTARRRYTRRKNRICYLQEIFSNEMAKVDDSFFHRLEESFLVEEDKKHERHPIFGNIVDEVAYHEKYPTIYHLRKKLVDSTDKADLRLIYLALAHMIKFRGHFLIEGDLNPDNSDVDKLFIQLVQTYNQLFEENPINASGVDAKAILSARLSKSRRLENLIAQLPGEKKNGLFGNLIALSLGLTPNFKSNFDLAEDAKLQLSKDTYDDDLDNLLAQIGDQYADLFLAAKNLSDAILLSDILRVNTEITKAPLSASMIKRYDEHHQDLTLLKALVRQQLPEKYKEIFFDQSKNGYAGYIDGGASQEEFYKFIKPILEKMDGTEELLVKLNREDLLRKQRTFDNGSIPHQIHLGELHAILRRQEDFYPFLKDNREKIEKILTFRIPYYVGPLARGNSRFAWMTRKSEETITPWNFEEVVDKGASAQSFIERMTNFDKNLPNEKVLPKHSLLYEYFTVYNELTKVKYVTEGMRKPAFLSGEQKKAIVDLLFKTNRKVTVKQLKEDYFKKIECFDSVEISGVEDRFNASLGTYHDLLKIIKDKDFLDNEENEDILEDIVLTLTLFEDREMIEERLKTYAHLFDDKVMKQLKRRRYTGWGRLSRKLINGIRDKQSGKTILDFLKSDGFANRNFMQLIHDDSLTFKEDIQKAQVSGQGDSLHEHIANLAGSPAIKKGILQTVKVVDELVKVMGRHKPENIVIEMARENQTTQKGQKNSRERMKRIEEGIKELGSQILKEHPVENTQLQNEKLYLYYLQNGRDMYVDQELDINRLSDYDVDHIVPQSFLKDDSIDNKVLTRSDKARGKSDNVPSEEVVKKMKNYWRQLLNAKLITQRKFDNLTKAERGGLSELDKAGFIKRQLVETRQITKHVAQILDSRMNTKYDENDKLIREVKVITLKSKLVSDFRKDFQFYKVREINNYHHAHDAYLNAVVGTALIKKYPKLESEFVYGDYKVYDVRKMIAKSEQEIGKATAKYFFYSNIMNFFKTEITLANGEIRKRPLIETNGETGEIVWDKGRDFATVRKVLSMPQVNIVKKTEVQTGGFSKESILPKRNSDKLIARKKDWDPKKYGGFDSPTVAYSVLVVAKVEKGKSKKLKSVKELLGITIMERSSFEKNPIDFLEAKGYKEVKKDLIIKLPKYSLFELENGRKRMLASAGELQKGNELALPSKYVNFLYLASHYEKLKGSPEDNEQKQLFVEQHKHYLDEIIEQISEFSKRVILADANLDKVLSAYNKHRDKPIREQAENIIHLFTLTNLGAPAAFKYFDTTIDRKRYTSTKEVLDATLIHQSITGLYETRIDLSQLGGDGGPAPAPGGLDDEYRLYSPLVKPDQNIQFWLEQFPQAWAETAGMGLAKQVPPQVIQLKASATPVSVRQYPLSKEAQEGIRPHVQRLIQQGILVPVQSPWNTPLLPVRKPGTNDYRPVQDLREVNKRVQDIHPTVPNPYNLLCALPPQRSWYTVLDLKDAFFCLRLHPTSQPLFAFEWRDPGTGRTGQLTWTRLPQGFKNSPTIFNEALHRDLANFRIQHPQVTLLQYVDDLLLAGATKQDCLEGTKALLLELSDLGYRASAKKAQICRREVTYLGYSLRDGQRWLTEARKKTVVQIPAPTTAKQVREFLGKAGFCRLFIPGFATLAAPLYPLTKPKGEFSWAPEHQKAFDAIKKALLSAPALALPDVTKPFTLYVDERKGVARGVLTQTLGPWRRPVAYLSKKLDPVASGWPVCLKAIAAVAILVKDADKLTLGQNITVIAPHALENIVRQPPDRWMTNARMTHYQSLLLTERVTFAPPAALNPATLLPEETDEPVTHDCHQLLIEETGVRKDLTDIPLTGEVLTWFTDGSSYVVEGKRMAGAAVVDGTRTIWASSLPEGTSAQKAELMALTQALRLAEGKSINIYTDSRYAFATAHVHGAIYKQRGWLTSAGREIKNKEEILSLLEALHLPKRLAIIHCPGHQKAKDPISRGNQMADRVAKQAAQGVNLLPAGKRTADGSEFEKRTADGSEFESPKKKAKVE

SEQ ID NO: 267 - protein, 2086 aa, synthetic construct
  source 1..2086: note = Description of Artificial Sequence: Synthetic polypeptide
MPAAKRVKLDGGDKKYSIGLDIGTNSVGWAVITDEYKVPSKKFKVLGNTDRHSIKKNLIGALLFDSGETAEATRLKRTARRRYTRRKNRICYLQEIFSNEMAKVDDSFFHRLEESFLVEEDKKHERHPIFGNIVDEVAYHEKYPTIYHLRKKLVDSTDKADLRLIYLALAHMIKFRGHFLIEGDLNPDNSDVDKLFIQLVQTYNQLFEENPINASGVDAKAILSARLSKSRRLENLIAQLPGEKKNGLFGNLIALSLGLTPNFKSNFDLAEDAKLQLSKDTYDDDLDNLLAQIGDQYADLFLAAKNLSDAILLSDILRVNTEITKAPLSASMIKRYDEHHQDLTLLKALVRQQLPEKYKEIFFDQSKNGYAGYIDGGASQEEFYKFIKPILEKMDGTEELLVKLNREDLLRKQRTFDNGSIPHQIHLGELHAILRRQEDFYPFLKDNREKIEKILTFRIPYYVGPLARGNSRFAWMTRKSEETITPWNFEEVVDKGASAQSFIERMTNFDKNLPNEKVLPKHSLLYEYFTVYNELTKVKYVTEGMRKPAFLSGEQKKAIVDLLFKTNRKVTVKQLKEDYFKKIECFDSVEISGVEDRFNASLGTYHDLLKIIKDKDFLDNEENEDILEDIVLTLTLFEDREMIEERLKTYAHLFDDKVMKQLKRRRYTGWGRLSRKLINGIRDKQSGKTILDFLKSDGFANRNFMQLIHDDSLTFKEDIQKAQVSGQGDSLHEHIANLAGSPAIKKGILQTVKVVDELVKVMGRHKPENIVIEMARENQTTQKGQKNSRERMKRIEEGIKELGSQILKEHPVENTQLQNEKLYLYYLQNGRDMYVDQELDINRLSDYDVDHIVPQSFLKDDSIDNKVLTRSDKARGKSDNVPSEEVVKKMKNYWRQLLNAKLITQRKFDNLTKAERGGLSELDKAGFIKRQLVETRQITKHVAQILDSRMNTKYDENDKLIREVKVITLKSKLVSDFRKDFQFYKVREINNYHHAHDAYLNAVVGTALIKKYPKLESEFVYGDYKVYDVRKMIAKSEQEIGKATAKYFFYSNIMNFFKTEITLANGEIRKRPLIETNGETGEIVWDKGRDFATVRKVLSMPQVNIVKKTEVQTGGFSKESILPKRNSDKLIARKKDWDPKKYGGFDSPTVAYSVLVVAKVEKGKSKKLKSVKELLGITIMERSSFEKNPIDFLEAKGYKEVKKDLIIKLPKYSLFELENGRKRMLASAGELQKGNELALPSKYVNFLYLASHYEKLKGSPEDNEQKQLFVEQHKHYLDEIIEQISEFSKRVILADANLDKVLSAYNKHRDKPIREQAENIIHLFTLTNLGAPAAFKYFDTTIDRKRYTSTKEVLDATLIHQSITGLYETRIDLSQLGGDGGGGSPAPGSSGGLDDEYRLYSPLVKPDQNIQFWLEQFPQAWAETAGMGLAKQVPPQVIQLKASATPVSVRQYPLSKEAQEGIRPHVQRLIQQGILVPVQSPWNTPLLPVRKPGTNDYRPVQDLREVNKRVQDIHPTVPNPYNLLCALPPQRSWYTVLDLKDAFFCLRLHPTSQPLFAFEWRDPGTGRTGQLTWTRLPQGFKNSPTIFNEALHRDLANFRIQHPQVTLLQYVDDLLLAGATKQDCLEGTKALLLELSDLGYRASAKKAQICRREVTYLGYSLRDGQRWLTEARKKTVVQIPAPTTAKQVREFLGKAGFCRLFIPGFATLAAPLYPLTKPKGEFSWAPEHQKAFDAIKKALLSAPALALPDVTKPFTLYVDERKGVARGVLTQTLGPWRRPVAYLSKKLDPVASGWPVCLKAIAAVAILVKDADKLTLGQNITVIAPHALENIVRQPPDRWMTNARMTHYQSLLLTERVTFAPPAALNPATLLPEETDEPVTHDCHQLLIEETGVRKDLTDIPLTGEVLTWFTDGSSYVVEGKRMAGAAVVDGTRTIWASSLPEGTSAQKAELMALTQALRLAEGKSINIYTDSRYAFATAHVHGAIYKQRGWLTSAGREIKNKEEILSLLEALHLPKRLAIIHCPGHQKAKDPISRGNQMADRVAKQAAQGVNLLPAGKRTADGSEFEKRTADGSEFESPKKKAKVE

SEQ ID NO: 268 - protein, 2086 aa, synthetic construct; identical to SEQ ID NO: 38
  source 1..2086: note = Description of Artificial Sequence: Synthetic polypeptide

SEQ ID NO: 269 - protein, 2080 aa, synthetic construct
  source 1..2080: note = Description of Artificial Sequence: Synthetic polypeptide
MPAAKRVKLDGGDKKYSIGLDIGTNSVGWAVITDEYKVPSKKFKVLGNTDRHSIKKNLIGALLFDSGETAEATRLKRTARRRYTRRKNRICYLQEIFSNEMAKVDDSFFHRLEESFLVEEDKKHERHPIFGNIVDEVAYHEKYPTIYHLRKKLVDSTDKADLRLIYLALAHMIKFRGHFLIEGDLNPDNSDVDKLFIQLVQTYNQLFEENPINASGVDAKAILSARLSKSRRLENLIAQLPGEKKNGLFGNLIALSLGLTPNFKSNFDLAEDAKLQLSKDTYDDDLDNLLAQIGDQYADLFLAAKNLSDAILLSDILRVNTEITKAPLSASMIKRYDEHHQDLTLLKALVRQQLPEKYKEIFFDQSKNGYAGYIDGGASQEEFYKFIKPILEKMDGTEELLVKLNREDLLRKQRTFDNGSIPHQIHLGELHAILRRQEDFYPFLKDNREKIEKILTFRIPYYVGPLARGNSRFAWMTRKSEETITPWNFEEVVDKGASAQSFIERMTNFDKNLPNEKVLPKHSLLYEYFTVYNELTKVKYVTEGMRKPAFLSGEQKKAIVDLLFKTNRKVTVKQLKEDYFKKIECFDSVEISGVEDRFNASLGTYHDLLKIIKDKDFLDNEENEDILEDIVLTLTLFEDREMIEERLKTYAHLFDDKVMKQLKRRRYTGWGRLSRKLINGIRDKQSGKTILDFLKSDGFANRNFMQLIHDDSLTFKEDIQKAQVSGQGDSLHEHIANLAGSPAIKKGILQTVKVVDELVKVMGRHKPENIVIEMARENQTTQKGQKNSRERMKRIEEGIKELGSQILKEHPVENTQLQNEKLYLYYLQNGRDMYVDQELDINRLSDYDVDHIVPQSFLKDDSIDNKVLTRSDKARGKSDNVPSEEVVKKMKNYWRQLLNAKLITQRKFDNLTKAERGGLSELDKAGFIKRQLVETRQITKHVAQILDSRMNTKYDENDKLIREVKVITLKSKLVSDFRKDFQFYKVREINNYHHAHDAYLNAVVGTALIKKYPKLESEFVYGDYKVYDVRKMIAKSEQEIGKATAKYFFYSNIMNFFKTEITLANGEIRKRPLIETNGETGEIVWDKGRDFATVRKVLSMPQVNIVKKTEVQTGGFSKESILPKRNSDKLIARKKDWDPKKYGGFDSPTVAYSVLVVAKVEKGKSKKLKSVKELLGITIMERSSFEKNPIDFLEAKGYKEVKKDLIIKLPKYSLFELENGRKRMLASAGELQKGNELALPSKYVNFLYLASHYEKLKGSPEDNEQKQLFVEQHKHYLDEIIEQISEFSKRVILADANLDKVLSAYNKHRDKPIREQAENIIHLFTLTNLGAPAAFKYFDTTIDRKRYTSTKEVLDATLIHQSITGLYETRIDLSQLGGDGGPAPGGLDDEYRLYSPLVKPDQNIQFWLEQFPQAWAETAGMGLAKQVPPQVIQLKASATPVSVRQYPLSKEAQEGIRPHVQRLIQQGILVPVQSPWNTPLLPVRKPGTNDYRPVQDLREVNKRVQDIHPTVPNPYNLLCALPPQRSWYTVLDLKDAFFCLRLHPTSQPLFAFEWRDPGTGRTGQLTWTRLPQGFKNSPTIFNEALHRDLANFRIQHPQVTLLQYVDDLLLAGATKQDCLEGTKALLLELSDLGYRASAKKAQICRREVTYLGYSLRDGQRWLTEARKKTVVQIPAPTTAKQVREFLGKAGFCRLFIPGFATLAAPLYPLTKPKGEFSWAPEHQKAFDAIKKALLSAPALALPDVTKPFTLYVDERKGVARGVLTQTLGPWRRPVAYLSKKLDPVASGWPVCLKAIAAVAILVKDADKLTLGQNITVIAPHALENIVRQPPDRWMTNARMTHYQSLLLTERVTFAPPAALNPATLLPEETDEPVTHDCHQLLIEETGVRKDLTDIPLTGEVLTWFTDGSSYVVEGKRMAGAAVVDGTRTIWASSLPEGTSAQKAELMALTQALRLAEGKSINIYTDSRYAFATAHVHGAIYKQRGWLTSAGREIKNKEEILSLLEALHLPKRLAIIHCPGHQKAKDPISRGNQMADRVAKQAAQGVNLLPAGKRTADGSEFEKRTADGSEFESPKKKAKVE

SEQ ID NO: 270 - protein, 2086 aa, synthetic construct; identical to SEQ ID NO: 69
  source 1..2086: note = Description of Artificial Sequence: Synthetic polypeptide

SEQ ID NO: 271 - protein, 2083 aa, synthetic construct; identical to SEQ ID NO: 88
  source 1..2083: note = Description of Artificial Sequence: Synthetic polypeptide

SEQ ID NO: 272 - protein, 2086 aa, synthetic construct; identical to SEQ ID NO: 85
  source 1..2086: note = Description of Artificial Sequence: Synthetic polypeptide

SEQ ID NO: 273 - protein, 2085 aa, synthetic construct
  source 1..2085: note = Description of Artificial Sequence: Synthetic polypeptide
MPAAKRVKLDGGDKKYSIGLDIGTNSVGWAVITDEYKVPSKKFKVLGNTDRHSIKKNLIGALLFDSGETAEATRLKRTARRRYTRRKNRICYLQEIFSNEMAKVDDSFFHRLEESFLVEEDKKHERHPIFGNIVDEVAYHEKYPTIYHLRKKLVDSTDKADLRLIYLALAHMIKFRGHFLIEGDLNPDNSDVDKLFIQLVQTYNQLFEENPINASGVDAKAILSARLSKSRRLENLIAQLPGEKKNGLFGNLIALSLGLTPNFKSNFDLAEDAKLQLSKDTYDDDLDNLLAQIGDQYADLFLAAKNLSDAILLSDILRVNTEITKAPLSASMIKRYDEHHQDLTLLKALVRQQLPEKYKEIFFDQSKNGYAGYIDGGASQEEFYKFIKPILEKMDGTEELLVKLNREDLLRKQRTFDNGSIPHQIHLGELHAILRRQEDFYPFLKDNREKIEKILTFRIPYYVGPLARGNSRFAWMTRKSEETITPWNFEEVVDKGASAQSFIERMTNFDKNLPNEKVLPKHSLLYEYFTVYNELTKVKYVTEGMRKPAFLSGEQKKAIVDLLFKTNRKVTVKQLKEDYFKKIECFDSVEISGVEDRFNASLGTYHDLLKIIKDKDFLDNEENEDILEDIVLTLTLFEDREMIEERLKTYAHLFDDKVMKQLKRRRYTGWGRLSRKLINGIRDKQSGKTILDFLKSDGFANRNFMQLIHDDSLTFKEDIQKAQVSGQGDSLHEHIANLAGSPAIKKGILQTVKVVDELVKVMGRHKPENIVIEMARENQTTQKGQKNSRERMKRIEEGIKELGSQILKEHPVENTQLQNEKLYLYYLQNGRDMYVDQELDINRLSDYDVDHIVPQSFLKDDSIDNKVLTRSDKARGKSDNVPSEEVVKKMKNYWRQLLNAKLITQRKFDNLTKAERGGLSELDKAGFIKRQLVETRQITKHVAQILDSRMNTKYDENDKLIREVKVITLKSKLVSDFRKDFQFYKVREINNYHHAHDAYLNAVVGTALIKKYPKLESEFVYGDYKVYDVRKMIAKSEQEIGKATAKYFFYSNIMNFFKTEITLANGEIRKRPLIETNGETGEIVWDKGRDFATVRKVLSMPQVNIVKKTEVQTGGFSKESILPKRNSDKLIARKKDWDPKKYGGFDSPTVAYSVLVVAKVEKGKSKKLKSVKELLGITIMERSSFEKNPIDFLEAKGYKEVKKDLIIKLPKYSLFELENGRKRMLASAGELQKGNELALPSKYVNFLYLASHYEKLKGSPEDNEQKQLFVEQHKHYLDEIIEQISEFSKRVILADANLDKVLSAYNKHRDKPIREQAENIIHLFTLTNLGAPAAFKYFDTTIDRKRYTSTKEVLDATLIHQSITGLYETRIDLSQLGGDGGGGGEAAAKGGLDDEYRLYSPLVKPDQNIQFWLEQFPQAWAETAGMGLAKQVPPQVIQLKASATPVSVRQYPLSKEAQEGIRPHVQRLIQQGILVPVQSPWNTPLLPVRKPGTNDYRPVQDLREVNKRVQDIHPTVPNPYNLLCALPPQRSWYTVLDLKDAFFCLRLHPTSQPLFAFEWRDPGTGRTGQLTWTRLPQGFKNSPTIFNEALHRDLANFRIQHPQVTLLQYVDDLLLAGATKQDCLEGTKALLLELSDLGYRASAKKAQICRREVTYLGYSLRDGQRWLTEARKKTVVQIPAPTTAKQVREFLGKAGFCRLFIPGFATLAAPLYPLTKPKGEFSWAPEHQKAFDAIKKALLSAPALALPDVTKPFTLYVDERKGVARGVLTQTLGPWRRPVAYLSKKLDPVASGWPVCLKAIAAVAILVKDADKLTLGQNITVIAPHALENIVRQPPDRWMTNARMTHYQSLLLTERVTFAPPAALNPATLLPEETDEPVTHDCHQLLIEETGVRKDLTDIPLTGEVLTWFTDGSSYVVEGKRMAGAAVVDGTRTIWASSLPEGTSAQKAELMALTQALRLAEGKSINIYTDSRYAFATAHVHGAIYKQRGWLTSAGREIKNKEEILSLLEALHLPKRLAIIHCPGHQKAKDPISRGNQMADRVAKQAAQGVNLLPAGKRTADGSEFEKRTADGSEFESPKKKAKVE

SEQ ID NO: 274 - protein, 2086 aa, synthetic construct
  source 1..2086: note = Description of Artificial Sequence: Synthetic polypeptide
MPAAKRVKLDGGDKKYSIGLDIGTNSVGWAVITDEYKVPSKKFKVLGNTDRHSIKKNLIGALLFDSGETAEATRLKRTARRRYTRRKNRICYLQEIFSNEMAKVDDSFFHRLEESFLVEEDKKHERHPIFGNIVDEVAYHEKYPTIYHLRKKLVDSTDKADLRLIYLALAHMIKFRGHFLIEGDLNPDNSDVDKLFIQLVQTYNQLFEENPINASGVDAKAILSARLSKSRRLENLIAQLPGEKKNGLFGNLIALSLGLTPNFKSNFDLAEDAKLQLSKDTYDDDLDNLLAQIGDQYADLFLAAKNLSDAILLSDILRVNTEITKAPLSASMIKRYDEHHQDLTLLKALVRQQLPEKYKEIFFDQSKNGYAGYIDGGASQEEFYKFIKPILEKMDGTEELLVKLNREDLLRKQRTFDNGSIPHQIHLGELHAILRRQEDFYPFLKDNREKIEKILTFRIPYYVGPLARGNSRFAWMTRKSEETITPWNFEEVVDKGASAQSFIERMTNFDKNLPNEKVLPKHSLLYEYFTVYNELTKVKYVTEGMRKPAFLSGEQKKAIVDLLFKTNRKVTVKQLKEDYFKKIECFDSVEISGVEDRFNASLGTYHDLLKIIKDKDFLDNEENEDILEDIVLTLTLFEDREMIEERLKTYAHLFDDKVMKQLKRRRYTGWGRLSRKLINGIRDKQSGKTILDFLKSDGFANRNFMQLIHDDSLTFKEDIQKAQVSGQGDSLHEHIANLAGSPAIKKGILQTVKVVDELVKVMGRHKPENIVIEMARENQTTQKGQKNSRERMKRIEEGIKELGSQILKEHPVENTQLQNEKLYLYYLQNGRDMYVDQELDINRLSDYDVDHIVPQSFLKDDSIDNKVLTRSDKARGKSDNVPSEEVVKKMKNYWRQLLNAKLITQRKFDNLTKAERGGLSELDKAGFIKRQLVETRQITKHVAQILDSRMNTKYDENDKLIREVKVITLKSKLVSDFRKDFQFYKVREINNYHHAHDAYLNAVVGTALIKKYPKLESEFVYGDYKVYDVRKMIAKSEQEIGKATAKYFFYSNIMNFFKTEITLANGEIRKRPLIETNGETGEIVWDKGRDFATVRKVLSMPQVNIVKKTEVQTGGFSKESILPKRNSDKLIARKKDWDPKKYGGFDSPTVAYSVLVVAKVEKGKSKKLKSVKELLGITIMERSSFEKNPIDFLEAKGYKEVKKDLIIKLPKYSLFELENGRKRMLASAGELQKGNELALPSKYVNFLYLASHYEKLKGSPEDNEQKQLFVEQHKHYLDEIIEQISEFSKRVILADANLDKVLSAYNKHRDKPIREQAENIIHLFTLTNLGAPAAFKYFDTTIDRKRYTSTKEVLDATLIHQSITGLYETRIDLSQLGGDGGGGSGGGGSSGGLDDEYRLYSPLVKPDQNIQFWLEQFPQAWAETAGMGLAKQVPPQVIQLKASATPVSVRQYPLSKEAQEGIRPHVQRLIQQGILVPVQSPWNTPLLPVRKPGTNDYRPVQDLREVNKRVQDIHPTVPNPYNLLCALPPQRSWYTVLDLKDAFFCLRLHPTSQPLFAFEWRDPGTGRTGQLTWTRLPQGFKNSPTIFNEALHRDLANFRIQHPQVTLLQYVDDLLLAGATKQDCLEGTKALLLELSDLGYRASAKKAQICRREVTYLGYSLRDGQRWLTEARKKTVVQIPAPTTAKQVREFLGKAGFCRLFIPGFATLAAPLYPLTKPKGEFSWAPEHQKAFDAIKKALLSAPALALPDVTKPFTLYVDERKGVARGVLTQTLGPWRRPVAYLSKKLDPVASGWPVCLKAIAAVAILVKDADKLTLGQNITVIAPHALENIVRQPPDRWMTNARMTHYQSLLLTERVTFAPPAALNPATLLPEETDEPVTHDCHQLLIEETGVRKDLTDIPLTGEVLTWFTDGSSYVVEGKRMAGAAVVDGTRTIWASSLPEGTSAQKAELMALTQALRLAEGKSINIYTDSRYAFATAHVHGAIYKQRGWLTSAGREIKNKEEILSLLEALHLPKRLAIIHCPGHQKAKDPISRGNQMADRVAKQAAQGVNLLPAGKRTADGSEFEKRTADGSEFESPKKKAKVE

SEQ ID NO: 275 - protein, 2086 aa, synthetic construct; identical to SEQ ID NO: 91
  source 1..2086: note = Description of Artificial Sequence: Synthetic polypeptide

SEQ ID NO: 276 - protein, 2086 aa, synthetic construct; identical to SEQ ID NO: 95
  source 1..2086: note = Description of Artificial Sequence: Synthetic polypeptide

SEQ ID NO: 277 - protein, 2085 aa, synthetic construct
  source 1..2085: note = Description of Artificial Sequence: Synthetic polypeptide
MPAAKRVKLDGGDKKYSIGLDIGTNSVGWAVITDEYKVPSKKFKVLGNTDRHSIKKNLIGALLFDSGETAEATRLKRTARRRYTRRKNRICYLQEIFSNEMAKVDDSFFHRLEESFLVEEDKKHERHPIFGNIVDEVAYHEKYPTIYHLRKKLVDSTDKADLRLIYLALAHMIKFRGHFLIEGDLNPDNSDVDKLFIQLVQTYNQLFEENPINASGVDAKAILSARLSKSRRLENLIAQLPGEKKNGLFGNLIALSLGLTPNFKSNFDLAEDAKLQLSKDTYDDDLDNLLAQIGDQYADLFLAAKNLSDAILLSDILRVNTEITKAPLSASMIKRYDEHHQDLTLLKALVRQQLPEKYKEIFFDQSKNGYAGYIDGGASQEEFYKFIKPILEKMDGTEELLVKLNREDLLRKQRTFDNGSIPHQIHLGELHAILRRQEDFYPFLKDNREKIEKILTFRIPYYVGPLARGNSRFAWMTRKSEETITPWNFEEVVDKGASAQSFIERMTNFDKNLPNEKVLPKHSLLYEYFTVYNELTKVKYVTEGMRKPAFLSGEQKKAIVDLLFKTNRKVTVKQLKEDYFKKIECFDSVEISGVEDRFNASLGTYHDLLKIIKDKDFLDNEENEDILEDIVLTLTLFEDREMIEERLKTYAHLFDDKVMKQLKRRRYTGWGRLSRKLINGIRDKQSGKTILDFLKSDGFANRNFMQLIHDDSLTFKEDIQKAQVSGQGDSLHEHIANLAGSPAIKKGILQTVKVVDELVKVMGRHKPENIVIEMARENQTTQKGQKNSRERMKRIEEGIKELGSQILKEHPVENTQLQNEKLYLYYLQNGRDMYVDQELDINRLSDYDVDHIVPQSFLKDDSIDNKVLTRSDKARGKSDNVPSEEVVKKMKNYWRQLLNAKLITQRKFDNLTKAERGGLSELDKAGFIKRQLVETRQITKHVAQILDSRMNTKYDENDKLIREVKVITLKSKLVSDFRKDFQFYKVREINNYHHAHDAYLNAVVGTALIKKYPKLESEFVYGDYKVYDVRKMIAKSEQEIGKATAKYFFYSNIMNFFKTEITLANGEIRKRPLIETNGETGEIVWDKGRDFATVRKVLSMPQVNIVKKTEVQTGGFSKESILPKRNSDKLIARKKDWDPKKYGGFDSPTVAYSVLVVAKVEKGKSKKLKSVKELLGITIMERSSFEKNPIDFLEAKGYKEVKKDLIIKLPKYSLFELENGRKRMLASAGELQKGNELALPSKYVNFLYLASHYEKLKGSPEDNEQKQLFVEQHKHYLDEIIEQISEFSKRVILADANLDKVLSAYNKHRDKPIREQAENIIHLFTLTNLGAPAAFKYFDTTIDRKRYTSTKEVLDATLIHQSITGLYETRIDLSQLGGDGGGGSEAAAKGGLDDEYRLYSPLVKPDQNIQFWLEQFPQAWAETAGMGLAKQVPPQVIQLKASATPVSVRQYPLSKEAQEGIRPHVQRLIQQGILVPVQSPWNTPLLPVRKPGTNDYRPVQDLREVNKRVQDIHPTVPNPYNLLCALPPQRSWYTVLDLKDAFFCLRLHPTSQPLFAFEWRDPGTGRTGQLTWTRLPQGFKNSPTIFNEALHRDLANFRIQHPQVTLLQYVDDLLLAGATKQDCLEGTKALLLELSDLGYRASAKKAQICRREVTYLGYSLRDGQRWLTEARKKTVVQIPAPTTAKQVREFLGKAGFCRLFIPGFATLAAPLYPLTKPKGEFSWAPEHQKAFDAIKKALLSAPALALPDVTKPFTLYVDERKGVARGVLTQTLGPWRRPVAYLSKKLDPVASGWPVCLKAIAAVAILVKDADKLTLGQNITVIAPHALENIVRQPPDRWMTNARMTHYQSLLLTERVTFAPPAALNPATLLPEETDEPVTHDCHQLLIEETGVRKDLTDIPLTGEVLTWFTDGSSYVVEGKRMAGAAVVDGTRTIWASSLPEGTSAQKAELMALTQALRLAEGKSINIYTDSRYAFATAHVHGAIYKQRGWLTSAGREIKNKEEILSLLEALHLPKRLAIIHCPGHQKAKDPISRGNQMADRVAKQAAQGVNLLPAGKRTADGSEFEKRTADGSEFESPKKKAKVE

SEQ ID NO: 278 - protein, 2090 aa, synthetic construct; identical to SEQ ID NO: 112
  source 1..2090: note = Description of Artificial Sequence: Synthetic polypeptide

SEQ ID NO: 279 - protein, 2094 aa, synthetic construct
  source 1..2094: note = Description of Artificial Sequence: Synthetic polypeptide
MPAAKRVKLDGGDKKYSIGLDIGTNSVGWAVITDEYKVPSKKFKVLGNTDRHSIKKNLIGALLFDSGETAEATRLKRTARRRYTRRKNRICYLQEIFSNEMAKVDDSFFHRLEESFLVEEDKKHERHPIFGNIVDEVAYHEKYPTIYHLRKKLVDSTDKADLRLIYLALAHMIKFRGHFLIEGDLNPDNSDVDKLFIQLVQTYNQLFEENPINASGVDAKAILSARLSKSRRLENLIAQLPGEKKNGLFGNLIALSLGLTPNFKSNFDLAEDAKLQLSKDTYDDDLDNLLAQIGDQYADLFLAAKNLSDAILLSDILRVNTEITKAPLSASMIKRYDEHHQDLTLLKALVRQQLPEKYKEIFFDQSKNGYAGYIDGGASQEEFYKFIKPILEKMDGTEELLVKLNREDLLRKQRTFDNGSIPHQIHLGELHAILRRQEDFYPFLKDNREKIEKILTFRIPYYVGPLARGNSRFAWMTRKSEETITPWNFEEVVDKGASAQSFIERMTNFDKNLPNEKVLPKHSLLYEYFTVYNELTKVKYVTEGMRKPAFLSGEQKKAIVDLLFKTNRKVTVKQLKEDYFKKIECFDSVEISGVEDRFNASLGTYHDLLKIIKDKDFLDNEENEDILEDIVLTLTLFEDREMIEERLKTYAHLFDDKVMKQLKRRRYTGWGRLSRKLINGIRDKQSGKTILDFLKSDGFANRNFMQLIHDDSLTFKEDIQKAQVSGQGDSLHEHIANLAGSPAIKKGILQTVKVVDELVKVMGRHKPENIVIEMARENQTTQKGQKNSRERMKRIEEGIKELGSQILKEHPVENTQLQNEKLYLYYLQNGRDMYVDQELDINRLSDYDVDHIVPQSFLKDDSIDNKVLTRSDKARGKSDNVPSEEVVKKMKNYWRQLLNAKLITQRKFDNLTKAERGGLSELDKAGFIKRQLVETRQITKHVAQILDSRMNTKYDENDKLIREVKVITLKSKLVSDFRKDFQFYKVREINNYHHAHDAYLNAVVGTALIKKYPKLESEFVYGDYKVYDVRKMIAKSEQEIGKATAKYFFYSNIMNFFKTEITLANGEIRKRPLIETNGETGEIVWDKGRDFATVRKVLSMPQVNIVKKTEVQTGGFSKESILPKRNSDKLIARKKDWDPKKYGGFDSPTVAYSVLVVAKVEKGKSKKLKSVKELLGITIMERSSFEKNPIDFLEAKGYKEVKKDLIIKLPKYSLFELENGRKRMLASAGELQKGNELALPSKYVNFLYLASHYEKLKGSPEDNEQKQLFVEQHKHYLDEIIEQISEFSKRVILADANLDKVLSAYNKHRDKPIREQAENIIHLFTLTNLGAPAAFKYFDTTIDRKRYTSTKEVLDATLIHQSITGLYETRIDLSQLGGDGGEAAAKEAAAKEAAAKGGTLQLDDEYRLYSPLVKPDQNIQFWLEQFPQAWAETAGMGLAKQVPPQVIQLKASATPVSVRQYPLSKEAQEGIRPHVQRLIQQGILVPVQSPWNTPLLPVRKPGTNDYRPVQDLREVNKRVQDIHPTVPNPYNLLCALPPQRSWYTVLDLKDAFFCLRLHPTSQPLFAFEWRDPGTGRTGQLTWTRLPQGFKNSPTIFDEALHRDLANFRIQHPQVTLLQYVDDLLLAGATKQDCLEGTKALLLELSDLGYRASAKKAQICRREVTYLGYSLRDGQRWLTEARKKTVVQIPAPTTAKQVREFLGTAGFCRLWIPGFATLAAPLYPLTKEKGEFSWAPEHQKAFDAIKKALLSAPALALPDVTKPFTLYVDERKGVARGVLTQTLGPWRRPVAYLSKKLDPVASGWPVCLKAIAAVAILVKDADKLTLGQNITVIAPHALENIVRQPPDRWMTNARMTHYQSLLLTERVTFAPPAALNPATLLPEETDEPVTHDCHQLLIEETGVRKDLTDIPLTGEVLTWFTDGSSYVVEGKRMAGAAVVDGTRTIWASSLPEGTSAQKAELMALTQALRLAEGKSINIYTDSRYAFATAHVHGAIYKQRGLLTSAGREIKNKEEILSLLEALHLPKRLAIIHCPGHQKAKDPISRGNQMADRVAKQAAQGVNLLAGKRTADGSEFEKRTADGSEFESPKKKAKVE

SEQ ID NO: 280 - protein, 2109 aa, synthetic construct
  source 1..2109: note = Description of Artificial Sequence: Synthetic polypeptide
MPAAKRVKLDGGDKKYSIGLDIGTNSVGWAVITDEYKVPSKKFKVLGNTDRHSIKKNLIGALLFDSGETAEATRLKRTARRRYTRRKNRICYLQEIFSNEMAKVDDSFFHRLEESFLVEEDKKHERHPIFGNIVDEVAYHEKYPTIYHLRKKLVDSTDKADLRLIYLALAHMIKFRGHFLIEGDLNPDNSDVDKLFIQLVQTYNQLFEENPINASGVDAKAILSARLSKSRRLENLIAQLPGEKKNGLFGNLIALSLGLTPNFKSNFDLAEDAKLQLSKDTYDDDLDNLLAQIGDQYADLFLAAKNLSDAILLSDILRVNTEITKAPLSASMIKRYDEHHQDLTLLKALVRQQLPEKYKEIFFDQSKNGYAGYIDGGASQEEFYKFIKPILEKMDGTEELLVKLNREDLLRKQRTFDNGSIPHQIHLGELHAILRRQEDFYPFLKDNREKIEKILTFRIPYYVGPLARGNSRFAWMTRKSEETITPWNFEEVVDKGASAQSFIERMTNFDKNLPNEKVLPKHSLLYEYFTVYNELTKVKYVTEGMRKPAFLSGEQKKAIVDLLFKTNRKVTVKQLKEDYFKKIECFDSVEISGVEDRFNASLGTYHDLLKIIKDKDFLDNEENEDILEDIVLTLTLFEDREMIEERLKTYAHLFDDKVMKQLKRRRYTGWGRLSRKLINGIRDKQSGKTILDFLKSDGFANRNFMQLIHDDSLTFKEDIQKAQVSGQGDSLHEHIANLAGSPAIKKGILQTVKVVDELVKVMGRHKPENIVIEMARENQTTQKGQKNSRERMKRIEEGIKELGSQILKEHPVENTQLQNEKLYLYYLQNGRDMYVDQELDINRLSDYDVDHIVPQSFLKDDSIDNKVLTRSDKARGKSDNVPSEEVVKKMKNYWRQLLNAKLITQRKFDNLTKAERGGLSELDKAGFIKRQLVETRQITKHVAQILDSRMNTKYDENDKLIREVKVITLKSKLVSDFRKDFQFYKVREINNYHHAHDAYLNAVVGTALIKKYPKLESEFVYGDYKVYDVRKMIAKSEQEIGKATAKYFFYSNIMNFFKTEITLANGEIRKRPLIETNGETGEIVWDKGRDFATVRKVLSMPQVNIVKKTEVQTGGFSKESILPKRNSDKLIARKKDWDPKKYGGFDSPTVAYSVLVVAKVEKGKSKKLKSVKELLGITIMERSSFEKNPIDFLEAKGYKEVKKDLIIKLPKYSLFELENGRKRMLASAGELQKGNELALPSKYVNFLYLASHYEKLKGSPEDNEQKQLFVEQHKHYLDEIIEQISEFSKRVILADANLDKVLSAYNKHRDKPIREQAENIIHLFTLTNLGAPAAFKYFDTTIDRKRYTSTKEVLDATLIHQSITGLYETRIDLSQLGGDGGEAAAKEAAAKEAAAKEAAAKEAAAKEAAAKGGTLQLDDEYRLYSPLVKPDQNIQFWLEQFPQAWAETAGMGLAKQVPPQVIQLKASATPVSVRQYPLSKEAQEGIRPHVQRLIQQGILVPVQSPWNTPLLPVRKPGTNDYRPVQDLREVNKRVQDIHPTVPNPYNLLCALPPQRSWYTVLDLKDAFFCLRLHPTSQPLFAFEWRDPGTGRTGQLTWTRLPQGFKNSPTIFDEALHRDLANFRIQHPQVTLLQYVDDLLLAGATKQDCLEGTKALLLELSDLGYRASAKKAQICRREVTYLGYSLRDGQRWLTEARKKTVVQIPAPTTAKQVREFLGTAGFCRLWIPGFATLAAPLYPLTKEKGEFSWAPEHQKAFDAIKKALLSAPALALPDVTKPFTLYVDERKGVARGVLTQTLGPWRRPVAYLSKKLDPVASGWPVCLKAIAAVAILVKDADKLTLGQNITVIAPHALENIVRQPPDRWMTNARMTHYQSLLLTERVTFAPPAALNPATLLPEETDEPVTHDCHQLLIEETGVRKDLTDIPLTGEVLTWFTDGSSYVVEGKRMAGAAVVDGTRTIWASSLPEGTSAQKAELMALTQALRLAEGKSINIYTDSRYAFATAHVHGAIYKQRGLLTSAGREIKNKEEILSLLEALHLPKRLAIIHCPGHQKAKDPISRGNQMADRVAKQAAQGVNLLAGKRTADGSEFEKRTADGSEFESPKKKAKVE

SEQ ID NO: 281 - protein, 2088 aa, synthetic construct
  source 1..2088: note = Description of Artificial Sequence: Synthetic polypeptide
MPAAKRVKLDGGDKKYSIGLDIGTNSVGWAVITDEYKVPSKKFKVLGNTDRHSIKKNLIGALLFDSGETAEATRLKRTARRRYTRRKNRICYLQEIFSNEMAKVDDSFFHRLEESFLVEEDKKHERHPIFGNIVDEVAYHEKYPTIYHLRKKLVDSTDKADLRLIYLALAHMIKFRGHFLIEGDLNPDNSDVDKLFIQLVQTYNQLFEENPINASGVDAKAILSARLSKSRRLENLIAQLPGEKKNGLFGNLIALSLGLTPNFKSNFDLAEDAKLQLSKDTYDDDLDNLLAQIGDQYADLFLAAKNLSDAILLSDILRVNTEITKAPLSASMIKRYDEHHQDLTLLKALVRQQLPEKYKEIFFDQSKNGYAGYIDGGASQEEFYKFIKPILEKMDGTEELLVKLNREDLLRKQRTFDNGSIPHQIHLGELHAILRRQEDFYPFLKDNREKIEKILTFRIPYYVGPLARGNSRFAWMTRKSEETITPWNFEEVVDKGASAQSFIERMTNFDKNLPNEKVLPKHSLLYEYFTVYNELTKVKYVTEGMRKPAFLSGEQKKAIVDLLFKTNRKVTVKQLKEDYFKKIECFDSVEISGVEDRFNASLGTYHDLLKIIKDKDFLDNEENEDILEDIVLTLTLFEDREMIEERLKTYAHLFDDKVMKQLKRRRYTGWGRLSRKLINGIRDKQSGKTILDFLKSDGFANRNFMQLIHDDSLTFKEDIQKAQVSGQGDSLHEHIANLAGSPAIKKGILQTVKVVDELVKVMGRHKPENIVIEMARENQTTQKGQKNSRERMKRIEEGIKELGSQILKEHPVENTQLQNEKLYLYYLQNGRDMYVDQELDINRLSDYDVDHIVPQSFLKDDSIDNKVLTRSDKARGKSDNVPSEEVVKKMKNYWRQLLNAKLITQRKFDNLTKAERGGLSELDKAGFIKRQLVETRQITKHVAQILDSRMNTKYDENDKLIREVKVITLKSKLVSDFRKDFQFYKVREINNYHHAHDAYLNAVVGTALIKKYPKLESEFVYGDYKVYDVRKMIAKSEQEIGKATAKYFFYSNIMNFFKTEITLANGEIRKRPLIETNGETGEIVWDKGRDFATVRKVLSMPQVNIVKKTEVQTGGFSKESILPKRNSDKLIARKKDWDPKKYGGFDSPTVAYSVLVVAKVEKGKSKKLKSVKELLGITIMERSSFEKNPIDFLEAKGYKEVKKDLIIKLPKYSLFELENGRKRMLASAGELQKGNELALPSKYVNFLYLASHYEKLKGSPEDNEQKQLFVEQHKHYLDEIIEQISEFSKRVILADANLDKVLSAYNKHRDKPIREQAENIIHLFTLTNLGAPAAFKYFDTTIDRKRYTSTKEVLDATLIHQSITGLYETRIDLSQLGGDGGPAPGGSGSSGGTLQLDDEYRLYSPLVKPDQNIQFWLEQFPQAWAETAGMGLAKQVPPQVIQLKASATPVSVRQYPLSKEAQEGIRPHVQRLIQQGILVPVQSPWNTPLLPVRKPGTNDYRPVQDLREVNKRVQDIHPTVPNPYNLLCALPPQRSWYTVLDLKDAFFCLRLHPTSQPLFAFEWRDPGTGRTGQLTWTRLPQGFKNSPTIFDEALHRDLANFRIQHPQVTLLQYVDDLLLAGATKQDCLEGTKALLLELSDLGYRASAKKAQICRREVTYLGYSLRDGQRWLTEARKKTVVQIPAPTTAKQVREFLGTAGFCRLWIPGFATLAAPLYPLTKEKGEFSWAPEHQKAFDAIKKALLSAPALALPDVTKPFTLYVDERKGVARGVLTQTLGPWRRPVAYLSKKLDPVASGWPVCLKAIAAVAILVKDADKLTLGQNITVIAPHALENIVRQPPDRWMTNARMTHYQSLLLTERVTFAPPAALNPATLLPEETDEPVTHDCHQLLIEETGVRKDLTDIPLTGEVLTWFTDGSSYVVEGKRMAGAAVVDGTRTIWASSLPEGTSAQKAELMALTQALRLAEGKSINIYTDSRYAFATAHVHGAIYKQRGLLTSAGREIKNKEEILSLLEALHLPKRLAIIHCPGHQKAKDPISRGNQMADRVAKQAAQGVNLLAGKRTADGSEFEKRTADGSEFESPKKKAKVE

SEQ ID NO: 282 - protein, 2087 aa, synthetic construct
  source 1..2087: note = Description of Artificial Sequence: Synthetic polypeptide
MPAAKRVKLDGGDKKYSIGLDIGTNSVGWAVITDEYKVPSKKFKVLGNTDRHSIKKNLIGALLFDSGETAEATRLKRTARRRYTRRKNRICYLQEIFSNEMAKVDDSFFHRLEESFLVEEDKKHERHPIFGNIVDEVAYHEKYPTIYHLRKKLVDSTDKADLRLIYLALAHMIKFRGHFLIEGDLNPDNSDVDKLFIQLVQTYNQLFEENPINASGVDAKAILSARLSKSRRLENLIAQLPGEKKNGLFGNLIALSLGLTPNFKSNFDLAEDAKLQLSKDTYDDDLDNLLAQIGDQYADLFLAAKNLSDAILLSDILRVNTEITKAPLSASMIKRYDEHHQDLTLLKALVRQQLPEKYKEIFFDQSKNGYAGYIDGGASQEEFYKFIKPILEKMDGTEELLVKLNREDLLRKQRTFDNGSIPHQIHLGELHAILRRQEDFYPFLKDNREKIEKILTFRIPYYVGPLARGNSRFAWMTRKSEETITPWNFEEVVDKGASAQSFIERMTNFDKNLPNEKVLPKHSLLYEYFTVYNELTKVKYVTEGMRKPAFLSGEQKKAIVDLLFKTNRKVTVKQLKEDYFKKIECFDSVEISGVEDRFNASLGTYHDLLKIIKDKDFLDNEENEDILEDIVLTLTLFEDREMIEERLKTYAHLFDDKVMKQLKRRRYTGWGRLSRKLINGIRDKQSGKTILDFLKSDGFANRNFMQLIHDDSLTFKEDIQKAQVSGQGDSLHEHIANLAGSPAIKKGILQTVKVVDELVKVMGRHKPENIVIEMARENQTTQKGQKNSRERMKRIEEGIKELGSQILKEHPVENTQLQNEKLYLYYLQNGRDMYVDQELDINRLSDYDVDHIVPQSFLKDDSIDNKVLTRSDKARGKSDNVPSEEVVKKMKNYWRQLLNAKLITQRKFDNLTKAERGGLSELDKAGFIKRQLVETRQITKHVAQILDSRMNTKYDENDKLIREVKVITLKSKLVSDFRKDFQFYKVREINNYHHAHDAYLNAVVGTALIKKYPKLESEFVYGDYKVYDVRKMIAKSEQEIGKATAKYFFYSNIMNFFKTEITLANGEIRKRPLIETNGETGEIVWDKGRDFATVRKVLSMPQVNIVKKTEVQTGGFSKESILPKRNSDKLIARKKDWDPKKYGGFDSPTVAYSVLVVAKVEKGKSKKLKSVKELLGITIMERSSFEKNPIDFLEAKGYKEVKKDLIIKLPKYSLFELENGRKRMLASAGELQKGNELALPSKYVNFLYLASHYEKLKGSPEDNEQKQLFVEQHKHYLDEIIEQISEFSKRVILADANLDKVLSAYNKHRDKPIREQAENIIHLFTLTNLGAPAAFKYFDTTIDRKRYTSTKEVLDATLIHQSITGLYETRIDLSQLGGDGGEAAAKGGGGGTLQLDDEYRLYSPLVKPDQNIQFWLEQFPQAWAETAGMGLAKQVPPQVIQLKASATPVSVRQYPLSKEAQEGIRPHVQRLIQQGILVPVQSPWNTPLLPVRKPGTNDYRPVQDLREVNKRVQDIHPTVPNPYNLLCALPPQRSWYTVLDLKDAFFCLRLHPTSQPLFAFEWRDPGTGRTGQLTWTRLPQGFKNSPTIFDEALHRDLANFRIQHPQVTLLQYVDDLLLAGATKQDCLEGTKALLLELSDLGYRASAKKAQICRREVTYLGYSLRDGQRWLTEARKKTVVQIPAPTTAKQVREFLGTAGFCRLWIPGFATLAAPLYPLTKEKGEFSWAPEHQKAFDAIKKALLSAPALALPDVTKPFTLYVDERKGVARGVLTQTLGPWRRPVAYLSKKLDPVASGWPVCLKAIAAVAILVKDADKLTLGQNITVIAPHALENIVRQPPDRWMTNARMTHYQSLLLTERVTFAPPAALNPATLLPEETDEPVTHDCHQLLIEETGVRKDLTDIPLTGEVLTWFTDGSSYVVEGKRMAGAAVVDGTRTIWASSLPEGTSAQKAELMALTQALRLAEGKSINIYTDSRYAFATAHVHGAIYKQRGLLTSAGREIKNKEEILSLLEALHLPKRLAIIHCPGHQKAKDPISRGNQMADRVAKQAAQGVNLLAGKRTADGSEFEKRTADGSEFESPKKKAKVE

SEQ ID NO: 283 - protein, 2091 aa, synthetic construct
  source 1..2091: note = Description of Artificial Sequence: Synthetic polypeptide
MPAAKRVKLDGGDKKYSIGLDIGTNSVGWAVITDEYKVPSKKFKVLGNTDRHSIKKNLIGALLFDSGETAEATRLKRTARRRYTRRKNRICYLQEIFSNEMAKVDDSFFHRLEESFLVEEDKKHERHPIFGNIVDEVAYHEKYPTIYHLRKKLVDSTDKADLRLIYLALAHMIKFRGHFLIEGDLNPDNSDVDKLFIQLVQTYNQLFEENPINASGVDAKAILSARLSKSRRLENLIAQLPGEKKNGLFGNLIALSLGLTPNFKSNFDLAEDAKLQLSKDTYDDDLDNLLAQIGDQYADLFLAAKNLSDAILLSDILRVNTEITKAPLSASMIKRYDEHHQDLTLLKALVRQQLPEKYKEIFFDQSKNGYAGYIDGGASQEEFYKFIKPILEKMDGTEELLVKLNREDLLRKQRTFDNGSIPHQIHLGELHAILRRQEDFYPFLKDNREKIEKILTFRIPYYVGPLARGNSRFAWMTRKSEETITPWNFEEVVDKGASAQSFIERMTNFDKNLPNEKVLPKHSLLYEYFTVYNELTKVKYVTEGMRKPAFLSGEQKKAIVDLLFKTNRKVTVKQLKEDYFKKIECFDSVEISGVEDRFNASLGTYHDLLKIIKDKDFLDNEENEDILEDIVLTLTLFEDREMIEERLKTYAHLFDDKVMKQLKRRRYTGWGRLSRKLINGIRDKQSGKTILDFLKSDGFANRNFMQLIHDDSLTFKEDIQKAQVSGQGDSLHEHIANLAGSPAIKKGILQTVKVVDELVKVMGRHKPENIVIEMARENQTTQKGQKNSRERMKRIEEGIKELGSQILKEHPVENTQLQNEKLYLYYLQNGRDMYVDQELDINRLSDYDVDHIVPQSFLKDDSIDNKVLTRSDKARGKSDNVPSEEVVKKMKNYWRQLLNAKLITQRKFDNLTKAERGGLSELDKAGFIKRQLVETRQITKHVAQILDSRMNTKYDENDKLIREVKVITLKSKLVSDFRKDFQFYKVREINNYHHAHDAYLNAVVGTALIKKYPKLESEFVYGDYKVYDVRKMIAKSEQEIGKATAKYFFYSNIMNFFKTEITLANGEIRKRPLIETNGETGEIVWDKGRDFATVRKVLSMPQVNIVKKTEVQTGGFSKESILPKRNSDKLIARKKDWDPKKYGGFDSPTVAYSVLVVAKVEKGKSKKLKSVKELLGITIMERSSFEKNPIDFLEAKGYKEVKKDLIIKLPKYSLFELENGRKRMLASAGELQKGNELALPSKYVNFLYLASHYEKLKGSPEDNEQKQLFVEQHKHYLDEIIEQISEFSKRVILADANLDKVLSAYNKHRDKPIREQAENIIHLFTLTNLGAPAAFKYFDTTIDRKRYTSTKEVLDATLIHQSITGLYETRIDLSQLGGDGGGSAGSAAGSGEFGGTLQLDDEYRLYSPLVKPDQNIQFWLEQFPQAWAETAGMGLAKQVPPQVIQLKASATPVSVRQYPLSKEAQEGIRPHVQRLIQQGILVPVQSPWNTPLLPVRKPGTNDYRPVQDLREVNKRVQDIHPTVPNPYNLLCALPPQRSWYTVLDLKDAFFCLRLHPTSQPLFAFEWRDPGTGRTGQLTWTRLPQGFKNSPTIFDEALHRDLANFRIQHPQVTLLQYVDDLLLAGATKQDCLEGTKALLLELSDLGYRASAKKAQICRREVTYLGYSLRDGQRWLTEARKKTVVQIPAPTTAKQVREFLGTAGFCRLWIPGFATLAAPLYPLTKEKGEFSWAPEHQKAFDAIKKALLSAPALALPDVTKPFTLYVDERKGVARGVLTQTLGPWRRPVAYLSKKLDPVASGWPVCLKAIAAVAILVKDADKLTLGQNITVIAPHALENIVRQPPDRWMTNARMTHYQSLLLTERVTFAPPAALNPATLLPEETDEPVTHDCHQLLIEETGVRKDLTDIPLTGEVLTWFTDGSSYVVEGKRMAGAAVVDGTRTIWASSLPEGTSAQKAELMALTQALRLAEGKSINIYTDSRYAFATAHVHGAIYKQRGLLTSAGREIKNKEEILSLLEALHLPKRLAIIHCPGHQKAKDPISRGNQMADRVAKQAAQGVNLLAGKRTADGSEFEKRTADGSEFESPKKKAKVE

SEQ ID NO: 284 - protein, 2088 aa, synthetic construct
  source 1..2088: note = Description of Artificial Sequence: Synthetic polypeptide
MPAAKRVKLDGGDKKYSIGLDIGTNSVGWAVITDEYKVPSKKFKVLGNTDRHSIKKNLIGALLFDSGETAEATRLKRTARRRYTRRKNRICYLQEIFSNEMAKVDDSFFHRLEESFLVEEDKKHERHPIFGNIVDEVAYHEKYPTIYHLRKKLVDSTDKADLRLIYLALAHMIKFRGHFLIEGDLNPDNSDVDKLFIQLVQTYNQLFEENPINASGVDAKAILSARLSKSRRLENLIAQLPGEKKNGLFGNLIALSLGLTPNFKSNFDLAEDAKLQLSKDTYDDDLDNLLAQIGDQYADLFLAAKNLSDAILLSDILRVNTEITKAPLSASMIKRYDEHHQDLTLLKALVRQQLPEKYKEIFFDQSKNGYAGYIDGGASQEEFYKFIKPILEKMDGTEELLVKLNREDLLRKQRTFDNGSIPHQIHLGELHAILRRQEDFYPFLKDNREKIEKILTFRIPYYVGPLARGNSRFAWMTRKSEETITPWNFEEVVDKGASAQSFIERMTNFDKNLPNEKVLPKHSLLYEYFTVYNELTKVKYVTEGMRKPAFLSGEQKKAIVDLLFKTNRKVTVKQLKEDYFKKIECFDSVEISGVEDRFNASLGTYHDLLKIIKDKDFLDNEENEDILEDIVLTLTLFEDREMIEERLKTYAHLFDDKVMKQLKRRRYTGWGRLSRKLINGIRDKQSGKTILDFLKSDGFANRNFMQLIHDDSLTFKEDIQKAQVSGQGDSLHEHIANLAGSPAIKKGILQTVKVVDELVKVMGRHKPENIVIEMARENQTTQKGQKNSRERMKRIEEGIKELGSQILKEHPVENTQLQNEKLYLYYLQNGRDMYVDQELDINRLSDYDVDHIVPQSFLKDDSIDNKVLTRSDKARGKSDNVPSEEVVKKMKNYWRQLLNAKLITQRKFDNLTKAERGGLSELDKAGFIKRQLVETRQITKHVAQILDSRMNTKYDENDKLIREVKVITLKSKLVSDFRKDFQFYKVREINNYHHAHDAYLNAVVGTALIKKYPKLESEFVYGDYKVYDVRKMIAKSEQEIGKATAKYFFYSNIMNFFKTEITLANGEIRKRPLIETNGETGEIVWDKGRDFATVRKVLSMPQVNIVKKTEVQTGGFSKESILPKRNSDKLIARKKDWDPKKYGGFDSPTVAYSVLVVAKVEKGKSKKLKSVKELLGITIMERSSFEKNPIDFLEAKGYKEVKKDLIIKLPKYSLFELENGRKRMLASAGELQKGNELALPSKYVNFLYLASHYEKLKGSPEDNEQKQLFVEQHKHYLDEIIEQISEFSKRVILADANLDKVLSAYNKHRDKPIREQAENIIHLFTLTNLGAPAAFKYFDTTIDRKRYTSTKEVLDATLIHQSITGLYETRIDLSQLGGDGGGSSGGGGGSGGTLQLDDEYRLYSPLVKPDQNIQFWLEQFPQAWAETAGMGLAKQVPPQVIQLKASATPVSVRQYPLSKEAQEGIRPHVQRLIQQGILVPVQSPWNTPLLPVRKPGTNDYRPVQDLREVNKRVQDIHPTVPNPYNLLCALPPQRSWYTVLDLKDAFFCLRLHPTSQPLFAFEWRDPGTGRTGQLTWTRLPQGFKNSPTIFDEALHRDLANFRIQHPQVTLLQYVDDLLLAGATKQDCLEGTKALLLELSDLGYRASAKKAQICRREVTYLGYSLRDGQRWLTEARKKTVVQIPAPTTAKQVREFLGTAGFCRLWIPGFATLAAPLYPLTKEKGEFSWAPEHQKAFDAIKKALLSAPALALPDVTKPFTLYVDERKGVARGVLTQTLGPWRRPVAYLSKKLDPVASGWPVCLKAIAAVAILVKDADKLTLGQNITVIAPHALENIVRQPPDRWMTNARMTHYQSLLLTERVTFAPPAALNPATLLPEETDEPVTHDCHQLLIEETGVRKDLTDIPLTGEVLTWFTDGSSYVVEGKRMAGAAVVDGTRTIWASSLPEGTSAQKAELMALTQALRLAEGKSINIYTDSRYAFATAHVHGAIYKQRGLLTSAGREIKNKEEILSLLEALHLPKRLAIIHCPGHQKAKDPISRGNQMADRVAKQAAQGVNLLAGKRTADGSEFEKRTADGSEFESPKKKAKVE

SEQ ID NO: 285 - protein, 2090 aa, synthetic construct
  source 1..2090: note = Description of Artificial Sequence: Synthetic polypeptide
MPAAKRVKLDGGDKKYSIGLDIGTNSVGWAVITDEYKVPSKKFKVLGNTDRHSIKKNLIGALLFDSGETAEATRLKRTARRRYTRRKNRICYLQEIFSNEMAKVDDSFFHRLEESFLVEEDKKHERHPIFGNIVDEVAYHEKYPTIYHLRKKLVDSTDKADLRLIYLALAHMIKFRGHFLIEGDLNPDNSDVDKLFIQLVQTYNQLFEENPINASGVDAKAILSARLSKSRRLENLIAQLPGEKKNGLFGNLIALSLGLTPNFKSNFDLAEDAKLQLSKDTYDDDLDNLLAQIGDQYADLFLAAKNLSDAILLSDILRVNTEITKAPLSASMIKRYDEHHQDLTLLKALVRQQLPEKYKEIFFDQSKNGYAGYIDGGASQEEFYKFIKPILEKMDGTEELLVKLNREDLLRKQRTFDNGSIPHQIHLGELHAILRRQEDFYPFLKDNREKIEKILTFRIPYYVGPLARGNSRFAWMTRKSEETITPWNFEEVVDKGASAQSFIERMTNFDKNLPNEKVLPKHSLLYEYFTVYNELTKVKYVTEGMRKPAFLSGEQKKAIVDLLFKTNRKVTVKQLKEDYFKKIECFDSVEISGVEDRFNASLGTYHDLLKIIKDKDFLDNEENEDILEDIVLTLTLFEDREMIEERLKTYAHLFDDKVMKQLKRRRYTGWGRLSRKLINGIRDKQSGKTILDFLKSDGFANRNFMQLIHDDSLTFKEDIQKAQVSGQGDSLHEHIANLAGSPAIKKGILQTVKVVDELVKVMGRHKPENIVIEMARENQTTQKGQKNSRERMKRIEEGIKELGSQILKEHPVENTQLQNEKLYLYYLQNGRDMYVDQELDINRLSDYDVDHIVPQSFLKDDSIDNKVLTRSDKARGKSDNVPSEEVVKKMKNYWRQLLNAKLITQRKFDNLTKAERGGLSELDKAGFIKRQLVETRQITKHVAQILDSRMNTKYDENDKLIREVKVITLKSKLVSDFRKDFQFYKVREINNYHHAHDAYLNAVVGTALIKKYPKLESEFVYGDYKVYDVRKMIAKSEQEIGKATAKYFFYSNIMNFFKTEITLANGEIRKRPLIETNGETGEIVWDKGRDFATVRKVLSMPQVNIVKKTEVQTGGFSKESILPKRNSDKLIARKKDWDPKKYGGFDSPTVAYSVLVVAKVEKGKSKKLKSVKELLGITIMERSSFEKNPIDFLEAKGYKEVKKDLIIKLPKYSLFELENGRKRMLASAGELQKGNELALPSKYVNFLYLASHYEKLKGSPEDNEQKQLFVEQHKHYLDEIIEQISEFSKRVILADANLDKVLSAYNKHRDKPIREQAENIIHLFTLTNLGAPAAFKYFDTTIDRKRYTSTKEVLDATLIHQSITGLYETRIDLSQLGGDGGGSSEAAAKGGGGGTLQLDDEYRLYSPLVKPDQNIQFWLEQFPQAWAETAGMGLAKQVPPQVIQLKASATPVSVRQYPLSKEAQEGIRPHVQRLIQQGILVPVQSPWNTPLLPVRKPGTNDYRPVQDLREVNKRVQDIHPTVPNPYNLLCALPPQRSWYTVLDLKDAFFCLRLHPTSQPLFAFEWRDPGTGRTGQLTWTRLPQGFKNSPTIFDEALHRDLANFRIQHPQVTLLQYVDDLLLAGATKQDCLEGTKALLLELSDLGYRASAKKAQICRREVTYLGYSLRDGQRWLTEARKKTVVQIPAPTTAKQVREFLGTAGFCRLWIPGFATLAAPLYPLTKEKGEFSWAPEHQKAFDAIKKALLSAPALALPDVTKPFTLYVDERKGVARGVLTQTLGPWRRPVAYLSKKLDPVASGWPVCLKAIAAVAILVKDADKLTLGQNITVIAPHALENIVRQPPDRWMTNARMTHYQSLLLTERVTFAPPAALNPATLLPEETDEPVTHDCHQLLIEETGVRKDLTDIPLTGEVLTWFTDGSSYVVEGKRMAGAAVVDGTRTIWASSLPEGTSAQKAELMALTQALRLAEGKSINIYTDSRYAFATAHVHGAIYKQRGLLTSAGREIKNKEEILSLLEALHLPKRLAIIHCPGHQKAKDPISRGNQMADRVAKQAAQGVNLLAGKRTADGSEFEKRTADGSEFESPKKKAKVE

SEQ ID NO: 286 - protein, 2090 aa, synthetic construct
  source 1..2090: note = Description of Artificial Sequence: Synthetic polypeptide
MPAAKRVKLDGGDKKYSIGLDIGTNSVGWAVITDEYKVPSKKFKVLGNTDRHSIKKNLIGALLFDSGETAEATRLKRTARRRYTRRKNRICYLQEIFSNEMAKVDDSFFHRLEESFLVEEDKKHERHPIFGNIVDEVAYHEKYPTIYHLRKKLVDSTDKADLRLIYLALAHMIKFRGHFLIEGDLNPDNSDVDKLFIQLVQTYNQLFEENPINASGVDAKAILSARLSKSRRLENLIAQLPGEKKNGLFGNLIALSLGLTPNFKSNFDLAEDAKLQLSKDTYDDDLDNLLAQIGDQYADLFLAAKNLSDAILLSDILRVNTEITKAPLSASMIKRYDEHHQDLTLLKALVRQQLPEKYKEIFFDQSKNGYAGYIDGGASQEEFYKFIKPILEKMDGTEELLVKLNREDLLRKQRTFDNGSIPHQIHLGELHAILRRQEDFYPFLKDNREKIEKILTFRIPYYVGPLARGNSRFAWMTRKSEETITPWNFEEVVDKGASAQSFIERMTNFDKNLPNEKVLPKHSLLYEYFTVYNELTKVKYVTEGMRKPAFLSGEQKKAIVDLLFKTNRKVTVKQLKEDYFKKIECFDSVEISGVEDRFNASLGTYHDLLKIIKDKDFLDNEENEDILEDIVLTLTLFEDREMIEERLKTYAHLFDDKVMKQLKRRRYTGWGRLSRKLINGIRDKQSGKTILDFLKSDGFANRNFMQLIHDDSLTFKEDIQKAQVSGQGDSLHEHIANLAGSPAIKKGILQTVKVVDELVKVMGRHKPENIVIEMARENQTTQKGQKNSRERMKRIEEGIKELGSQILKEHPVENTQLQNEKLYLYYLQNGRDMYVDQELDINRLSDYDVDHIVPQSFLKDDSIDNKVLTRSDKARGKSDNVPSEEVVKKMKNYWRQLLNAKLITQRKFDNLTKAERGGLSELDKAGFIKRQLVETRQITKHVAQILDSRMNTKYDENDKLIREVKVITLKSKLVSDFRKDFQFYKVREINNYHHAHDAYLNAVVGTALIKKYPKLESEFVYGDYKVYDVRKMIAKSEQEIGKATAKYFFYSNIMNFFKTEITLANGEIRKRPLIETNGETGEIVWDKGRDFATVRKVLSMPQVNIVKKTEVQTGGFSKESILPKRNSDKLIARKKDWDPKKYGGFDSPTVAYSVLVVAKVEKGKSKKLKSVKELLGITIMERSSFEKNPIDFLEAKGYKEVKKDLIIKLPKYSLFELENGRKRMLASAGELQKGNELALPSKYVNFLYLASHYEKLKGSPEDNEQKQLFVEQHKHYLDEIIEQISEFSKRVILADANLDKVLSAYNKHRDKPIREQAENIIHLFTLTNLGAPAAFKYFDTTIDRKRYTSTKEVLDATLIHQSITGLYETRIDLSQLGGDGGGGSGGGEAAAKGGTLQLDDEYRLYSPLVKPDQNIQFWLEQFPQAWAETAGMGLAKQVPPQVIQLKASATPVSVRQYPLSKEAQEGIRPHVQRLIQQGILVPVQSPWNTPLLPVRKPGTNDYRPVQDLREVNKRVQDIHPTVPNPYNLLCALPPQRSWYTVLDLKDAFFCLRLHPTSQPLFAFEWRDPGTGRTGQLTWTRLPQGFKNSPTIFDEALHRDLANFRIQHPQVTLLQYVDDLLLAGATKQDCLEGTKALLLELSDLGYRASAKKAQICRREVTYLGYSLRDGQRWLTEARKKTVVQIPAPTTAKQVREFLGTAGFCRLWIPGFATLAAPLYPLTKEKGEFSWAPEHQKAFDAIKKALLSAPALALPDVTKPFTLYVDERKGVARGVLTQTLGPWRRPVAYLSKKLDPVASGWPVCLKAIAAVAILVKDADKLTLGQNITVIAPHALENIVRQPPDRWMTNARMTHYQSLLLTERVTFAPPAALNPATLLPEETDEPVTHDCHQLLIEETGVRKDLTDIPLTGEVLTWFTDGSSYVVEGKRMAGAAVVDGTRTIWASSLPEGTSAQKAELMALTQALRLAEGKSINIYTDSRYAFATAHVHGAIYKQRGLLTSAGREIKNKEEILSLLEALHLPKRLAIIHCPGHQKAKDPISRGNQMADRVAKQAAQGVNLLAGKRTADGSEFEKRTADGSEFESPKKKAKVE

SEQ ID NO: 287 - protein, 2090 aa, synthetic construct
  source 1..2090: note = Description of Artificial Sequence: Synthetic polypeptide
MPAAKRVKLDGGDKKYSIGLDIGTNSVGWAVITDEYKVPSKKFKVLGNTDRHSIKKNLIGALLFDSGETAEATRLKRTARRRYTRRKNRICYLQEIFSNEMAKVDDSFFHRLEESFLVEEDKKHERHPIFGNIVDEVAYHEKYPTIYHLRKKLVDSTDKADLRLIYLALAHMIKFRGHFLIEGDLNPDNSDVDKLFIQLVQTYNQLFEENPINASGVDAKAILSARLSKSRRLENLIAQLPGEKKNGLFGNLIALSLGLTPNFKSNFDLAEDAKLQLSKDTYDDDLDNLLAQIGDQYADLFLAAKNLSDAILLSDILRVNTEITKAPLSASMIKRYDEHHQDLTLLKALVRQQLPEKYKEIFFDQSKNGYAGYIDGGASQEEFYKFIKPILEKMDGTEELLVKLNREDLLRKQRTFDNGSIPHQIHLGELHAILRRQEDFYPFLKDNREKIEKILTFRIPYYVGPLARGNSRFAWMTRKSEETITPWNFEEVVDKGASAQSFIERMTNFDKNLPNEKVLPKHSLLYEYFTVYNELTKVKYVTEGMRKPAFLSGEQKKAIVDLLFKTNRKVTVKQLKEDYFKKIECFDSVEISGVEDRFNASLGTYHDLLKIIKDKDFLDNEENEDILEDIVLTLTLFEDREMIEERLKTYAHLFDDKVMKQLKRRRYTGWGRLSRKLINGIRDKQSGKTILDFLKSDGFANRNFMQLIHDDSLTFKEDIQKAQVSGQGDSLHEHIANLAGSPAIKKGILQTVKVVDELVKVMGRHKPENIVIEMARENQTTQKGQKNSRERMKRIEEGIKELGSQILKEHPVENTQLQNEKLYLYYLQNGRDMYVDQELDINRLSDYDVDHIVPQSFLKDDSIDNKVLTRSDKARGKSDNVPSEEVVKKMKNYWRQLLNAKLITQRKFDNLTKAERGGLSELDKAGFIKRQLVETRQITKHVAQILDSRMNTKYDENDKLIREVKVITLKSKLVSDFRKDFQFYKVREINNYHHAHDAYLNAVVGTALIKKYPKLESEFVYGDYKVYDVRKMIAKSEQEIGKATAKYFFYSNIMNFFKTEITLANGEIRKRPLIETNGETGEIVWDKGRDFATVRKVLSMPQVNIVKKTEVQTGGFSKESILPKRNSDKLIARKKDWDPKKYGGFDSPTVAYSVLVVAKVEKGKSKKLKSVKELLGITIMERSSFEKNPIDFLEAKGYKEVKKDLIIKLPKYSLFELENGRKRMLASAGELQKGNELALPSKYVNFLYLASHYEKLKGSPEDNEQKQLFVEQHKHYLDEIIEQISEFSKRVILADANLDKVLSAYNKHRDKPIREQAENIIHLFTLTNLGAPAAFKYFDTTIDRKRYTSTKEVLDATLIHQSITGLYETRIDLSQLGGDGGEAAAKPAPGGSGGTLQLDDEYRLYSPLVKPDQNIQFWLEQFPQAWAETAGMGLAKQVPPQVIQLKASATPVSVRQYPLSKEAQEGIRPHVQRLIQQGILVPVQSPWNTPLLPVRKPGTNDYRPVQDLREVNKRVQDIHPTVPNPYNLLCALPPQRSWYTVLDLKDAFFCLRLHPTSQPLFAFEWRDPGTGRTGQLTWTRLPQGFKNSPTIFDEALHRDLANFRIQHPQVTLLQYVDDLLLAGATKQDCLEGTKALLLELSDLGYRASAKKAQICRREVTYLGYSLRDGQRWLTEARKKTVVQIPAPTTAKQVREFLGTAGFCRLWIPGFATLAAPLYPLTKEKGEFSWAPEHQKAFDAIKKALLSAPALALPDVTKPFTLYVDERKGVARGVLTQTLGPWRRPVAYLSKKLDPVASGWPVCLKAIAAVAILVKDADKLTLGQNITVIAPHALENIVRQPPDRWMTNARMTHYQSLLLTERVTFAPPAALNPATLLPEETDEPVTHDCHQLLIEETGVRKDLTDIPLTGEVLTWFTDGSSYVVEGKRMAGAAVVDGTRTIWASSLPEGTSAQKAELMALTQALRLAEGKSINIYTDSRYAFATAHVHGAIYKQRGLLTSAGREIKNKEEILSLLEALHLPKRLAIIHCPGHQKAKDPISRGNQMADRVAKQAAQGVNLLAGKRTADGSEFEKRTADGSEFESPKKKAKVE

SEQ ID NO: 288 - protein, 2090 aa, synthetic construct
  source 1..2090: note = Description of Artificial Sequence: Synthetic polypeptide
MPAAKRVKLDGGDKKYSIGLDIGTNSVGWAVITDEYKVPSKKFKVLGNTDRHSIKKNLIGALLFDSGETAEATRLKRTARRRYTRRKNRICYLQEIFSNEMAKVDDSFFHRLEESFLVEEDKKHERHPIFGNIVDEVAYHEKYPTIYHLRKKLVDSTDKADLRLIYLALAHMIKFRGHFLIEGDLNPDNSDVDKLFIQLVQTYNQLFEENPINASGVDAKAILSARLSKSRRLENLIAQLPGEKKNGLFGNLIALSLGLTPNFKSNFDLAEDAKLQLSKDTYDDDLDNLLAQIGDQYADLFLAAKNLSDAILLSDILRVNTEITKAPLSASMIKRYDEHHQDLTLLKALVRQQLPEKYKEIFFDQSKNGYAGYIDGGASQEEFYKFIKPILEKMDGTEELLVKLNREDLLRKQRTFDNGSIPHQIHLGELHAILRRQEDFYPFLKDNREKIEKILTFRIPYYVGPLARGNSRFAWMTRKSEETITPWNFEEVVDKGASAQSFIERMTNFDKNLPNEKVLPKHSLLYEYFTVYNELTKVKYVTEGMRKPAFLSGEQKKAIVDLLFKTNRKVTVKQLKEDYFKKIECFDSVEISGVEDRFNASLGTYHDLLKIIKDKDFLDNEENEDILEDIVLTLTLFEDREMIEERLKTYAHLFDDKVMKQLKRRRYTGWGRLSRKLINGIRDKQSGKTILDFLKSDGFANRNFMQLIHDDSLTFKEDIQKAQVSGQGDSLHEHIANLAGSPAIKKGILQTVKVVDELVKVMGRHKPENIVIEMARENQTTQKGQKNSRERMKRIEEGIKELGSQILKEHPVENTQLQNEKLYLYYLQNGRDMYVDQELDINRLSDYDVDHIVPQSFLKDDSIDNKVLTRSDKARGKSDNVPSEEVVKKMKNYWRQLLNAKLITQRKFDNLTKAERGGLSELDKAGFIKRQLVETRQITKHVAQILDSRMNTKYDENDKLIREVKVITLKSKLVSDFRKDFQFYKVREINNYHHAHDAYLNAVVGTALIKKYPKLESEFVYGDYKVYDVRKMIAKSEQEIGKATAKYFFYSNIMNFFKTEITLANGEIRKRPLIETNGETGEIVWDKGRDFATVRKVLSMPQVNIVKKTEVQTGGFSKESILPKRNSDKLIARKKDWDPKKYGGFDSPTVAYSVLVVAKVEKGKSKKLKSVKELLGITIMERSSFEKNPIDFLEAKGYKEVKKDLIIKLPKYSLFELENGRKRMLASAGELQKGNELALPSKYVNFLYLASHYEKLKGSPEDNEQKQLFVEQHKHYLDEIIEQISEFSKRVILADANLDKVLSAYNKHRDKPIREQAENIIHLFTLTNLGAPAAFKYFDTTIDRKRYTSTKEVLDATLIHQSITGLYETRIDLSQLGGDGGEAAAKGGGGGSGGTLQLDDEYRLYSPLVKPDQNIQFWLEQFPQAWAETAGMGLAKQVPPQVIQLKASATPVSVRQYPLSKEAQEGIRPHVQRLIQQGILVPVQSPWNTPLLPVRKPGTNDYRPVQDLREVNKRVQDIHPTVPNPYNLLCALPPQRSWYTVLDLKDAFFCLRLHPTSQPLFAFEWRDPGTGRTGQLTWTRLPQGFKNSPTIFDEALHRDLANFRIQHPQVTLLQYVDDLLLAGATKQDCLEGTKALLLELSDLGYRASAKKAQICRREVTYLGYSLRDGQRWLTEARKKTVVQIPAPTTAKQVREFLGTAGFCRLWIPGFATLAAPLYPLTKEKGEFSWAPEHQKAFDAIKKALLSAPALALPDVTKPFTLYVDERKGVARGVLTQTLGPWRRPVAYLSKKLDPVASGWPVCLKAIAAVAILVKDADKLTLGQNITVIAPHALENIVRQPPDRWMTNARMTHYQSLLLTERVTFAPPAALNPATLLPEETDEPVTHDCHQLLIEETGVRKDLTDIPLTGEVLTWFTDGSSYVVEGKRMAGAAVVDGTRTIWASSLPEGTSAQKAELMALTQALRLAEGKSINIYTDSRYAFATAHVHGAIYKQRGLLTSAGREIKNKEEILSLLEALHLPKRLAIIHCPGHQKAKDPISRGNQMADRVAKQAAQGVNLLAGKRTADGSEFEKRTADGSEFESPKKKAKVE

SEQ ID NO: 289 - protein, 2082 aa, synthetic construct
  source 1..2082: note = Description of Artificial Sequence: Synthetic polypeptide
MPAAKRVKLDGGDKKYSIGLDIGTNSVGWAVITDEYKVPSKKFKVLGNTDRHSIKKNLIGALLFDSGETAEATRLKRTARRRYTRRKNRICYLQEIFSNEMAKVDDSFFHRLEESFLVEEDKKHERHPIFGNIVDEVAYHEKYPTIYHLRKKLVDSTDKADLRLIYLALAHMIKFRGHFLIEGDLNPDNSDVDKLFIQLVQTYNQLFEENPINASGVDAKAILSARLSKSRRLENLIAQLPGEKKNGLFGNLIALSLGLTPNFKSNFDLAEDAKLQLSKDTYDDDLDNLLAQIGDQYADLFLAAKNLSDAILLSDILRVNTEITKAPLSASMIKRYDEHHQDLTLLKALVRQQLPEKYKEIFFDQSKNGYAGYIDGGASQEEFYKFIKPILEKMDGTEELLVKLNREDLLRKQRTFDNGSIPHQIHLGELHAILRRQEDFYPFLKDNREKIEKILTFRIPYYVGPLARGNSRFAWMTRKSEETITPWNFEEVVDKGASAQSFIERMTNFDKNLPNEKVLPKHSLLYEYFTVYNELTKVKYVTEGMRKPAFLSGEQKKAIVDLLFKTNRKVTVKQLKEDYFKKIECFDSVEISGVEDRFNASLGTYHDLLKIIKDKDFLDNEENEDILEDIVLTLTLFEDREMIEERLKTYAHLFDDKVMKQLKRRRYTGWGRLSRKLINGIRDKQSGKTILDFLKSDGFANRNFMQLIHDDSLTFKEDIQKAQVSGQGDSLHEHIANLAGSPAIKKGILQTVKVVDELVKVMGRHKPENIVIEMARENQTTQKGQKNSRERMKRIEEGIKELGSQILKEHPVENTQLQNEKLYLYYLQNGRDMYVDQELDINRLSDYDVDHIVPQSFLKDDSIDNKVLTRSDKARGKSDNVPSEEVVKKMKNYWRQLLNAKLITQRKFDNLTKAERGGLSELDKAGFIKRQLVETRQITKHVAQILDSRMNTKYDENDKLIREVKVITLKSKLVSDFRKDFQFYKVREINNYHHAHDAYLNAVVGTALIKKYPKLESEFVYGDYKVYDVRKMIAKSEQEIGKATAKYFFYSNIMNFFKTEITLANGEIRKRPLIETNGETGEIVWDKGRDFATVRKVLSMPQVNIVKKTEVQTGGFSKESILPKRNSDKLIARKKDWDPKKYGGFDSPTVAYSVLVVAKVEKGKSKKLKSVKELLGITIMERSSFEKNPIDFLEAKGYKEVKKDLIIKLPKYSLFELENGRKRMLASAGELQKGNELALPSKYVNFLYLASHYEKLKGSPEDNEQKQLFVEQHKHYLDEIIEQISEFSKRVILADANLDKVLSAYNKHRDKPIREQAENIIHLFTLTNLGAPAAFKYFDTTIDRKRYTSTKEVLDATLIHQSITGLYETRIDLSQLGGDGGGGGGGTLQLDDEYRLYSPLVKPDQNIQFWLEQFPQAWAETAGMGLAKQVPPQVIQLKASATPVSVRQYPLSKEAQEGIRPHVQRLIQQGILVPVQSPWNTPLLPVRKPGTNDYRPVQDLREVNKRVQDIHPTVPNPYNLLCALPPQRSWYTVLDLKDAFFCLRLHPTSQPLFAFEWRDPGTGRTGQLTWTRLPQGFKNSPTIFDEALHRDLANFRIQHPQVTLLQYVDDLLLAGATKQDCLEGTKALLLELSDLGYRASAKKAQICRREVTYLGYSLRDGQRWLTEARKKTVVQIPAPTTAKQVREFLGTAGFCRLWIPGFATLAAPLYPLTKEKGEFSWAPEHQKAFDAIKKALLSAPALALPDVTKPFTLYVDERKGVARGVLTQTLGPWRRPVAYLSKKLDPVASGWPVCLKAIAAVAILVKDADKLTLGQNITVIAPHALENIVRQPPDRWMTNARMTHYQSLLLTERVTFAPPAALNPATLLPEETDEPVTHDCHQLLIEETGVRKDLTDIPLTGEVLTWFTDGSSYVVEGKRMAGAAVVDGTRTIWASSLPEGTSAQKAELMALTQALRLAEGKSINIYTDSRYAFATAHVHGAIYKQRGLLTSAGREIKNKEEILSLLEALHLPKRLAIIHCPGHQKAKDPISRGNQMADRVAKQAAQGVNLLAGKRTADGSEFEKRTADGSEFESPKKKAKVE

SEQ ID NO: 290 - protein, 2090 aa, synthetic construct
  source 1..2090: note = Description of Artificial Sequence: Synthetic polypeptide
MPAAKRVKLDGGDKKYSIGLDIGTNSVGWAVITDEYKVPSKKFKVLGNTDRHSIKKNLIGALLFDSGETAEATRLKRTARRRYTRRKNRICYLQEIFSNEMAKVDDSFFHRLEESFLVEEDKKHERHPIFGNIVDEVAYHEKYPTIYHLRKKLVDSTDKADLRLIYLALAHMIKFRGHFLIEGDLNPDNSDVDKLFIQLVQTYNQLFEENPINASGVDAKAILSARLSKSRRLENLIAQLPGEKKNGLFGNLIALSLGLTPNFKSNFDLAEDAKLQLSKDTYDDDLDNLLAQIGDQYADLFLAAKNLSDAILLSDILRVNTEITKAPLSASMIKRYDEHHQDLTLLKALVRQQLPEKYKEIFFDQSKNGYAGYIDGGASQEEFYKFIKPILEKMDGTEELLVKLNREDLLRKQRTFDNGSIPHQIHLGELHAILRRQEDFYPFLKDNREKIEKILTFRIPYYVGPLARGNSRFAWMTRKSEETITPWNFEEVVDKGASAQSFIERMTNFDKNLPNEKVLPKHSLLYEYFTVYNELTKVKYVTEGMRKPAFLSGEQKKAIVDLLFKTNRKVTVKQLKEDYFKKIECFDSVEISGVEDRFNASLGTYHDLLKIIKDKDFLDNEENEDILEDIVLTLTLFEDREMIEERLKTYAHLFDDKVMKQLKRRRYTGWGRLSRKLINGIRDKQSGKTILDFLKSDGFANRNFMQLIHDDSLTFKEDIQKAQVSGQGDSLHEHIANLAGSPAIKKGILQTVKVVDELVKVMGRHKPENIVIEMARENQTTQKGQKNSRERMKRIEEGIKELGSQILKEHPVENTQLQNEKLYLYYLQNGRDMYVDQELDINRLSDYDVDHIVPQSFLKDDSIDNKVLTRSDKARGKSDNVPSEEVVKKMKNYWRQLLNAKLITQRKFDNLTKAERGGLSELDKAGFIKRQLVETRQITKHVAQILDSRMNTKYDENDKLIREVKVITLKSKLVSDFRKDFQFYKVREINNYHHAHDAYLNAVVGTALIKKYPKLESEFVYGDYKVYDVRKMIAKSEQEIGKATAKYFFYSNIMNFFKTEITLANGEIRKRPLIETNGETGEIVWDKGRDFATVRKVLSMPQVNIVKKTEVQTGGFSKESILPKRNSDKLIARKKDWDPKKYGGFDSPTVAYSVLVVAKVEKGKSKKLKSVKELLGITIMERSSFEKNPIDFLEAKGYKEVKKDLIIKLPKYSLFELENGRKRMLASAGELQKGNELALPSKYVNFLYLASHYEKLKGSPEDNEQKQLFVEQHKHYLDEIIEQISEFSKRVILADANLDKVLSAYNKHRDKPIREQAENIIHLFTLTNLGAPAAFKYFDTTIDRKRYTSTKEVLDATLIHQSITGLYETRIDLSQLGGDGGEAAAKGGGGSSGGTLQLDDEYRLYSPLVKPDQNIQFWLEQFPQAWAETAGMGLAKQVPPQVIQLKASATPVSVRQYPLSKEAQEGIRPHVQRLIQQGILVPVQSPWNTPLLPVRKPGTNDYRPVQDLREVNKRVQDIHPTVPNPYNLLCALPPQRSWYTVLDLKDAFFCLRLHPTSQPLFAFEWRDPGTGRTGQLTWTRLPQGFKNSPTIFDEALHRDLANFRIQHPQVTLLQYVDDLLLAGATKQDCLEGTKALLLELSDLGYRASAKKAQICRREVTYLGYSLRDGQRWLTEARKKTVVQIPAPTTAKQVREFLGTAGFCRLWIPGFATLAAPLYPLTKEKGEFSWAPEHQKAFDAIKKALLSAPALALPDVTKPFTLYVDERKGVARGVLTQTLGPWRRPVAYLSKKLDPVASGWPVCLKAIAAVAILVKDADKLTLGQNITVIAPHALENIVRQPPDRWMTNARMTHYQSLLLTERVTFAPPAALNPATLLPEETDEPVTHDCHQLLIEETGVRKDLTDIPLTGEVLTWFTDGSSYVVEGKRMAGAAVVDGTRTIWASSLPEGTSAQKAELMALTQALRLAEGKSINIYTDSRYAFATAHVHGAIYKQRGLLTSAGREIKNKEEILSLLEALHLPKRLAIIHCPGHQKAKDPISRGNQMADRVAKQAAQGVNLLAGKRTADGSEFEKRTADGSEFESPKKKAKVE

SEQ ID NO: 291 - protein, 2083 aa, synthetic construct
  source 1..2083: note = Description of Artificial Sequence: Synthetic polypeptide
MPAAKRVKLDGGDKKYSIGLDIGTNSVGWAVITDEYKVPSKKFKVLGNTDRHSIKKNLIGALLFDSGETAEATRLKRTARRRYTRRKNRICYLQEIFSNEMAKVDDSFFHRLEESFLVEEDKKHERHPIFGNIVDEVAYHEKYPTIYHLRKKLVDSTDKADLRLIYLALAHMIKFRGHFLIEGDLNPDNSDVDKLFIQLVQTYNQLFEENPINASGVDAKAILSARLSKSRRLENLIAQLPGEKKNGLFGNLIALSLGLTPNFKSNFDLAEDAKLQLSKDTYDDDLDNLLAQIGDQYADLFLAAKNLSDAILLSDILRVNTEITKAPLSASMIKRYDEHHQDLTLLKALVRQQLPEKYKEIFFDQSKNGYAGYIDGGASQEEFYKFIKPILEKMDGTEELLVKLNREDLLRKQRTFDNGSIPHQIHLGELHAILRRQEDFYPFLKDNREKIEKILTFRIPYYVGPLARGNSRFAWMTRKSEETITPWNFEEVVDKGASAQSFIERMTNFDKNLPNEKVLPKHSLLYEYFTVYNELTKVKYVTEGMRKPAFLSGEQKKAIVDLLFKTNRKVTVKQLKEDYFKKIECFDSVEISGVEDRFNASLGTYHDLLKIIKDKDFLDNEENEDILEDIVLTLTLFEDREMIEERLKTYAHLFDDKVMKQLKRRRYTGWGRLSRKLINGIRDKQSGKTILDFLKSDGFANRNFMQLIHDDSLTFKEDIQKAQVSGQGDSLHEHIANLAGSPAIKKGILQTVKVVDELVKVMGRHKPENIVIEMARENQTTQKGQKNSRERMKRIEEGIKELGSQILKEHPVENTQLQNEKLYLYYLQNGRDMYVDQELDINRLSDYDVDHIVPQSFLKDDSIDNKVLTRSDKARGKSDNVPSEEVVKKMKNYWRQLLNAKLITQRKFDNLTKAERGGLSELDKAGFIKRQLVETRQITKHVAQILDSRMNTKYDENDKLIREVKVITLKSKLVSDFRKDFQFYKVREINNYHHAHDAYLNAVVGTALIKKYPKLESEFVYGDYKVYDVRKMIAKSEQEIGKATAKYFFYSNIMNFFKTEITLANGEIRKRPLIETNGETGEIVWDKGRDFATVRKVLSMPQVNIVKKTEVQTGGFSKESILPKRNSDKLIARKKDWDPKKYGGFDSPTVAYSVLVVAKVEKGKSKKLKSVKELLGITIMERSSFEKNPIDFLEAKGYKEVKKDLIIKLPKYSLFELENGRKRMLASAGELQKGNELALPSKYVNFLYLASHYEKLKGSPEDNEQKQLFVEQHKHYLDEIIEQISEFSKRVILADANLDKVLSAYNKHRDKPIREQAENIIHLFTLTNLGAPAAFKYFDTTIDRKRYTSTKEVLDATLIHQSITGLYETRIDLSQLGGDGGGGGGGGTLQLDDEYRLYSPLVKPDQNIQFWLEQFPQAWAETAGMGLAKQVPPQVIQLKASATPVSVRQYPLSKEAQEGIRPHVQRLIQQGILVPVQSPWNTPLLPVRKPGTNDYRPVQDLREVNKRVQDIHPTVPNPYNLLCALPPQRSWYTVLDLKDAFFCLRLHPTSQPLFAFEWRDPGTGRTGQLTWTRLPQGFKNSPTIFDEALHRDLANFRIQHPQVTLLQYVDDLLLAGATKQDCLEGTKALLLELSDLGYRASAKKAQICRREVTYLGYSLRDGQRWLTEARKKTVVQIPAPTTAKQVREFLGTAGFCRLWIPGFATLAAPLYPLTKEKGEFSWAPEHQKAFDAIKKALLSAPALALPDVTKPFTLYVDERKGVARGVLTQTLGPWRRPVAYLSKKLDPVASGWPVCLKAIAAVAILVKDADKLTLGQNITVIAPHALENIVRQPPDRWMTNARMTHYQSLLLTERVTFAPPAALNPATLLPEETDEPVTHDCHQLLIEETGVRKDLTDIPLTGEVLTWFTDGSSYVVEGKRMAGAAVVDGTRTIWASSLPEGTSAQKAELMALTQALRLAEGKSINIYTDSRYAFATAHVHGAIYKQRGLLTSAGREIKNKEEILSLLEALHLPKRLAIIHCPGHQKAKDPISRGNQMADRVAKQAAQGVNLLAGKRTADGSEFEKRTADGSEFESPKKKAKVE

SEQ ID NO: 292 - protein, 2097 aa, synthetic construct
  source 1..2097: note = Description of Artificial Sequence: Synthetic polypeptide
MPAAKRVKLDGGDKKYSIGLDIGTNSVGWAVITDEYKVPSKKFKVLGNTDRHSIKKNLIGALLFDSGETAEATRLKRTARRRYTRRKNRICYLQEIFSNEMAKVDDSFFHRLEESFLVEEDKKHERHPIFGNIVDEVAYHEKYPTIYHLRKKLVDSTDKADLRLIYLALAHMIKFRGHFLIEGDLNPDNSDVDKLFIQLVQTYNQLFEENPINASGVDAKAILSARLSKSRRLENLIAQLPGEKKNGLFGNLIALSLGLTPNFKSNFDLAEDAKLQLSKDTYDDDLDNLLAQIGDQYADLFLAAKNLSDAILLSDILRVNTEITKAPLSASMIKRYDEHHQDLTLLKALVRQQLPEKYKEIFFDQSKNGYAGYIDGGASQEEFYKFIKPILEKMDGTEELLVKLNREDLLRKQRTFDNGSIPHQIHLGELHAILRRQEDFYPFLKDNREKIEKILTFRIPYYVGPLARGNSRFAWMTRKSEETITPWNFEEVVDKGASAQSFIERMTNFDKNLPNEKVLPKHSLLYEYFTVYNELTKVKYVTEGMRKPAFLSGEQKKAIVDLLFKTNRKVTVKQLKEDYFKKIECFDSVEISGVEDRFNASLGTYHDLLKIIKDKDFLDNEENEDILEDIVLTLTLFEDREMIEERLKTYAHLFDDKVMKQLKRRRYTGWGRLSRKLINGIRDKQSGKTILDFLKSDGFANRNFMQLIHDDSLTFKEDIQKAQVSGQGDSLHEHIANLAGSPAIKKGILQTVKVVDELVKVMGRHKPENIVIEMARENQTTQKGQKNSRERMKRIEEGIKELGSQILKEHPVENTQLQNEKLYLYYLQNGRDMYVDQELDINRLSDYDVDHIVPQSFLKDDSIDNKVLTRSDKARGKSDNVPSEEVVKKMKNYWRQLLNAKLITQRKFDNLTKAERGGLSELDKAGFIKRQLVETRQITKHVAQILDSRMNTKYDENDKLIREVKVITLKSKLVSDFRKDFQFYKVREINNYHHAHDAYLNAVVGTALIKKYPKLESEFVYGDYKVYDVRKMIAKSEQEIGKATAKYFFYSNIMNFFKTEITLANGEIRKRPLIETNGETGEIVWDKGRDFATVRKVLSMPQVNIVKKTEVQTGGFSKESILPKRNSDKLIARKKDWDPKKYGGFDSPTVAYSVLVVAKVEKGKSKKLKSVKELLGITIMERSSFEKNPIDFLEAKGYKEVKKDLIIKLPKYSLFELENGRKRMLASAGELQKGNELALPSKYVNFLYLASHYEKLKGSPEDNEQKQLFVEQHKHYLDEIIEQISEFSKRVILADANLDKVLSAYNKHRDKPIREQAENIIHLFTLTNLGAPAAFKYFDTTIDRKRYTSTKEVLDATLIHQSITGLYETRIDLSQLGGDGGGGSGGSGGSGGSGGSGGSGGTLQLDDEYRLYSPLVKPDQNIQFWLEQFPQAWAETAGMGLAKQVPPQVIQLKASATPVSVRQYPLSKEAQEGIRPHVQRLIQQGILVPVQSPWNTPLLPVRKPGTNDYRPVQDLREVNKRVQDIHPTVPNPYNLLCALPPQRSWYTVLDLKDAFFCLRLHPTSQPLFAFEWRDPGTGRTGQLTWTRLPQGFKNSPTIFDEALHRDLANFRIQHPQVTLLQYVDDLLLAGATKQDCLEGTKALLLELSDLGYRASAKKAQICRREVTYLGYSLRDGQRWLTEARKKTVVQIPAPTTAKQVREFLGTAGFCRLWIPGFATLAAPLYPLTKEKGEFSWAPEHQKAFDAIKKALLSAPALALPDVTKPFTLYVDERKGVARGVLTQTLGPWRRPVAYLSKKLDPVASGWPVCLKAIAAVAILVKDADKLTLGQNITVIAPHALENIVRQPPDRWMTNARMTHYQSLLLTERVTFAPPAALNPATLLPEETDEPVTHDCHQLLIEETGVRKDLTDIPLTGEVLTWFTDGSSYVVEGKRMAGAAVVDGTRTIWASSLPEGTSAQKAELMALTQALRLAEGKSINIYTDSRYAFATAHVHGAIYKQRGLLTSAGREIKNKEEILSLLEALHLPKRLAIIHCPGHQKAKDPISRGNQMADRVAKQAAQGVNLLAGKRTADGSEFEKRTADGSEFESPKKKAKVE

SEQ ID NO: 293 - protein, 2087 aa, synthetic construct
  source 1..2087: note = Description of Artificial Sequence: Synthetic polypeptide
MPAAKRVKLDGGDKKYSIGLDIGTNSVGWAVITDEYKVPSKKFKVLGNTDRHSIKKNLIGALLFDSGETAEATRLKRTARRRYTRRKNRICYLQEIFSNEMAKVDDSFFHRLEESFLVEEDKKHERHPIFGNIVDEVAYHEKYPTIYHLRKKLVDSTDKADLRLIYLALAHMIKFRGHFLIEGDLNPDNSDVDKLFIQLVQTYNQLFEENPINASGVDAKAILSARLSKSRRLENLIAQLPGEKKNGLFGNLIALSLGLTPNFKSNFDLAEDAKLQLSKDTYDDDLDNLLAQIGDQYADLFLAAKNLSDAILLSDILRVNTEITKAPLSASMIKRYDEHHQDLTLLKALVRQQLPEKYKEIFFDQSKNGYAGYIDGGASQEEFYKFIKPILEKMDGTEELLVKLNREDLLRKQRTFDNGSIPHQIHLGELHAILRRQEDFYPFLKDNREKIEKILTFRIPYYVGPLARGNSRFAWMTRKSEETITPWNFEEVVDKGASAQSFIERMTNFDKNLPNEKVLPKHSLLYEYFTVYNELTKVKYVTEGMRKPAFLSGEQKKAIVDLLFKTNRKVTVKQLKEDYFKKIECFDSVEISGVEDRFNASLGTYHDLLKIIKDKDFLDNEENEDILEDIVLTLTLFEDREMIEERLKTYAHLFDDKVMKQLKRRRYTGWGRLSRKLINGIRDKQSGKTILDFLKSDGFANRNFMQLIHDDSLTFKEDIQKAQVSGQGDSLHEHIANLAGSPAIKKGILQTVKVVDELVKVMGRHKPENIVIEMARENQTTQKGQKNSRERMKRIEEGIKELGSQILKEHPVENTQLQNEKLYLYYLQNGRDMYVDQELDINRLSDYDVDHIVPQSFLKDDSIDNKVLTRSDKARGKSDNVPSEEVVKKMKNYWRQLLNAKLITQRKFDNLTKAERGGLSELDKAGFIKRQLVETRQITKHVAQILDSRMNTKYDENDKLIREVKVITLKSKLVSDFRKDFQFYKVREINNYHHAHDAYLNAVVGTALIKKYPKLESEFVYGDYKVYDVRKMIAKSEQEIGKATAKYFFYSNIMNFFKTEITLANGEIRKRPLIETNGETGEIVWDKGRDFATVRKVLSMPQVNIVKKTEVQTGGFSKESILPKRNSDKLIARKKDWDPKKYGGFDSPTVAYSVLVVAKVEKGKSKKLKSVKELLGITIMERSSFEKNPIDFLEAKGYKEVKKDLIIKLPKYSLFELENGRKRMLASAGELQKGNELALPSKYVNFLYLASHYEKLKGSPEDNEQKQLFVEQHKHYLDEIIEQISEFSKRVILADANLDKVLSAYNKHRDKPIREQAENIIHLFTLTNLGAPAAFKYFDTTIDRKRYTSTKEVLDATLIHQSITGLYETRIDLSQLGGDGGGSSEAAAKGGTLQLDDEYRLYSPLVKPDQNIQFWLEQFPQAWAETAGMGLAKQVPPQVIQLKASATPVSVRQYPLSKEAQEGIRPHVQRLIQQGILVPVQSPWNTPLLPVRKPGTNDYRPVQDLREVNKRVQDIHPTVPNPYNLLCALPPQRSWYTVLDLKDAFFCLRLHPTSQPLFAFEWRDPGTGRTGQLTWTRLPQGFKNSPTIFDEALHRDLANFRIQHPQVTLLQYVDDLLLAGATKQDCLEGTKALLLELSDLGYRASAKKAQICRREVTYLGYSLRDGQRWLTEARKKTVVQIPAPTTAKQVREFLGTAGFCRLWIPGFATLAAPLYPLTKEKGEFSWAPEHQKAFDAIKKALLSAPALALPDVTKPFTLYVDERKGVARGVLTQTLGPWRRPVAYLSKKLDPVASGWPVCLKAIAAVAILVKDADKLTLGQNITVIAPHALENIVRQPPDRWMTNARMTHYQSLLLTERVTFAPPAALNPATLLPEETDEPVTHDCHQLLIEETGVRKDLTDIPLTGEVLTWFTDGSSYVVEGKRMAGAAVVDGTRTIWASSLPEGTSAQKAELMALTQALRLAEGKSINIYTDSRYAFATAHVHGAIYKQRGLLTSAGREIKNKEEILSLLEALHLPKRLAIIHCPGHQKAKDPISRGNQMADRVAKQAAQGVNLLAGKRTADGSEFEKRTADGSEFESPKKKAKVE

SEQ ID NO: 294 - protein, 2088 aa, synthetic construct
  source 1..2088: note = Description of Artificial Sequence: Synthetic polypeptide
MPAAKRVKLDGGDKKYSIGLDIGTNSVGWAVITDEYKVPSKKFKVLGNTDRHSIKKNLIGALLFDSGETAEATRLKRTARRRYTRRKNRICYLQEIFSNEMAKVDDSFFHRLEESFLVEEDKKHERHPIFGNIVDEVAYHEKYPTIYHLRKKLVDSTDKADLRLIYLALAHMIKFRGHFLIEGDLNPDNSDVDKLFIQLVQTYNQLFEENPINASGVDAKAILSARLSKSRRLENLIAQLPGEKKNGLFGNLIALSLGLTPNFKSNFDLAEDAKLQLSKDTYDDDLDNLLAQIGDQYADLFLAAKNLSDAILLSDILRVNTEITKAPLSASMIKRYDEHHQDLTLLKALVRQQLPEKYKEIFFDQSKNGYAGYIDGGASQEEFYKFIKPILEKMDGTEELLVKLNREDLLRKQRTFDNGSIPHQIHLGELHAILRRQEDFYPFLKDNREKIEKILTFRIPYYVGPLARGNSRFAWMTRKSEETITPWNFEEVVDKGASAQSFIERMTNFDKNLPNEKVLPKHSLLYEYFTVYNELTKVKYVTEGMRKPAFLSGEQKKAIVDLLFKTNRKVTVKQLKEDYFKKIECFDSVEISGVEDRFNASLGTYHDLLKIIKDKDFLDNEENEDILEDIVLTLTLFEDREMIEERLKTYAHLFDDKVMKQLKRRRYTGWGRLSRKLINGIRDKQSGKTILDFLKSDGFANRNFMQLIHDDSLTFKEDIQKAQVSGQGDSLHEHIANLAGSPAIKKGILQTVKVVDELVKVMGRHKPENIVIEMARENQTTQKGQKNSRERMKRIEEGIKELGSQILKEHPVENTQLQNEKLYLYYLQNGRDMYVDQELDINRLSDYDVDHIVPQSFLKDDSIDNKVLTRSDKARGKSDNVPSEEVVKKMKNYWRQLLNAKLITQRKFDNLTKAERGGLSELDKAGFIKRQLVETRQITKHVAQILDSRMNTKYDENDKLIREVKVITLKSKLVSDFRKDFQFYKVREINNYHHAHDAYLNAVVGTALIKKYPKLESEFVYGDYKVYDVRKMIAKSEQEIGKATAKYFFYSNIMNFFKTEITLANGEIRKRPLIETNGETGEIVWDKGRDFATVRKVLSMPQVNIVKKTEVQTGGFSKESILPKRNSDKLIARKKDWDPKKYGGFDSPTVAYSVLVVAKVEKGKSKKLKSVKELLGITIMERSSFEKNPIDFLEAKGYKEVKKDLIIKLPKYSLFELENGRKRMLASAGELQKGNELALPSKYVNFLYLASHYEKLKGSPEDNEQKQLFVEQHKHYLDEIIEQISEFSKRVILADANLDKVLSAYNKHRDKPIREQAENIIHLFTLTNLGAPAAFKYFDTTIDRKRYTSTKEVLDATLIHQSITGLYETRIDLSQLGGDGGGGSGGSGGSGGTLQLDDEYRLYSPLVKPDQNIQFWLEQFPQAWAETAGMGLAKQVPPQVIQLKASATPVSVRQYPLSKEAQEGIRPHVQRLIQQGILVPVQSPWNTPLLPVRKPGTNDYRPVQDLREVNKRVQDIHPTVPNPYNLLCALPPQRSWYTVLDLKDAFFCLRLHPTSQPLFAFEWRDPGTGRTGQLTWTRLPQGFKNSPTIFDEALHRDLANFRIQHPQVTLLQYVDDLLLAGATKQDCLEGTKALLLELSDLGYRASAKKAQICRREVTYLGYSLRDGQRWLTEARKKTVVQIPAPTTAKQVREFLGTAGFCRLWIPGFATLAAPLYPLTKEKGEFSWAPEHQKAFDAIKKALLSAPALALPDVTKPFTLYVDERKGVARGVLTQTLGPWRRPVAYLSKKLDPVASGWPVCLKAIAAVAILVKDADKLTLGQNITVIAPHALENIVRQPPDRWMTNARMTHYQSLLLTERVTFAPPAALNPATLLPEETDEPVTHDCHQLLIEETGVRKDLTDIPLTGEVLTWFTDGSSYVVEGKRMAGAAVVDGTRTIWASSLPEGTSAQKAELMALTQALRLAEGKSINIYTDSRYAFATAHVHGAIYKQRGLLTSAGREIKNKEEILSLLEALHLPKRLAIIHCPGHQKAKDPISRGNQMADRVAKQAAQGVNLLAGKRTADGSEFEKRTADGSEFESPKKKAKVE

SEQ ID NO: 295 - protein, 2088 aa, synthetic construct
  source 1..2088: note = Description of Artificial Sequence: Synthetic polypeptide
MPAAKRVKLDGGDKKYSIGLDIGTNSVGWAVITDEYKVPSKKFKVLGNTDRHSIKKNLIGALLFDSGETAEATRLKRTARRRYTRRKNRICYLQEIFSNEMAKVDDSFFHRLEESFLVEEDKKHERHPIFGNIVDEVAYHEKYPTIYHLRKKLVDSTDKADLRLIYLALAHMIKFRGHFLIEGDLNPDNSDVDKLFIQLVQTYNQLFEENPINASGVDAKAILSARLSKSRRLENLIAQLPGEKKNGLFGNLIALSLGLTPNFKSNFDLAEDAKLQLSKDTYDDDLDNLLAQIGDQYADLFLAAKNLSDAILLSDILRVNTEITKAPLSASMIKRYDEHHQDLTLLKALVRQQLPEKYKEIFFDQSKNGYAGYIDGGASQEEFYKFIKPILEKMDGTEELLVKLNREDLLRKQRTFDNGSIPHQIHLGELHAILRRQEDFYPFLKDNREKIEKILTFRIPYYVGPLARGNSRFAWMTRKSEETITPWNFEEVVDKGASAQSFIERMTNFDKNLPNEKVLPKHSLLYEYFTVYNELTKVKYVTEGMRKPAFLSGEQKKAIVDLLFKTNRKVTVKQLKEDYFKKIECFDSVEISGVEDRFNASLGTYHDLLKIIKDKDFLDNEENEDILEDIVLTLTLFEDREMIEERLKTYAHLFDDKVMKQLKRRRYTGWGRLSRKLINGIRDKQSGKTILDFLKSDGFANRNFMQLIHDDSLTFKEDIQKAQVSGQGDSLHEHIANLAGSPAIKKGILQTVKVVDELVKVMGRHKPENIVIEMARENQTTQKGQKNSRERMKRIEEGIKELGSQILKEHPVENTQLQNEKLYLYYLQNGRDMYVDQELDINRLSDYDVDHIVPQSFLKDDSIDNKVLTRSDKARGKSDNVPSEEVVKKMKNYWRQLLNAKLITQRKFDNLTKAERGGLSELDKAGFIKRQLVETRQITKHVAQILDSRMNTKYDENDKLIREVKVITLKSKLVSDFRKDFQFYKVREINNYHHAHDAYLNAVVGTALIKKYPKLESEFVYGDYKVYDVRKMIAKSEQEIGKATAKYFFYSNIMNFFKTEITLANGEIRKRPLIETNGETGEIVWDKGRDFATVRKVLSMPQVNIVKKTEVQTGGFSKESILPKRNSDKLIARKKDWDPKKYGGFDSPTVAYSVLVVAKVEKGKSKKLKSVKELLGITIMERSSFEKNPIDFLEAKGYKEVKKDLIIKLPKYSLFELENGRKRMLASAGELQKGNELALPSKYVNFLYLASHYEKLKGSPEDNEQKQLFVEQHKHYLDEIIEQISEFSKRVILADANLDKVLSAYNKHRDKPIREQAENIIHLFTLTNLGAPAAFKYFDTTIDRKRYTSTKEVLDATLIHQSITGLYETRIDLSQLGGDGGGSSPAPGGSGGTLQLDDEYRLYSPLVKPDQNIQFWLEQFPQAWAETAGMGLAKQVPPQVIQLKASATPVSVRQYPLSKEAQEGIRPHVQRLIQQGILVPVQSPWNTPLLPVRKPGTNDYRPVQDLREVNKRVQDIHPTVPNPYNLLCALPPQRSWYTVLDLKDAFFCLRLHPTSQPLFAFEWRDPGTGRTGQLTWTRLPQGFKNSPTIFDEALHRDLANFRIQHPQVTLLQYVDDLLLAGATKQDCLEGTKALLLELSDLGYRASAKKAQICRREVTYLGYSLRDGQRWLTEARKKTVVQIPAPTTAKQVREFLGTAGFCRLWIPGFATLAAPLYPLTKEKGEFSWAPEHQKAFDAIKKALLSAPALALPDVTKPFTLYVDERKGVARGVLTQTLGPWRRPVAYLSKKLDPVASGWPVCLKAIAAVAILVKDADKLTLGQNITVIAPHALENIVRQPPDRWMTNARMTHYQSLLLTERVTFAPPAALNPATLLPEETDEPVTHDCHQLLIEETGVRKDLTDIPLTGEVLTWFTDGSSYVVEGKRMAGAAVVDGTRTIWASSLPEGTSAQKAELMALTQALRLAEGKSINIYTDSRYAFATAHVHGAIYKQRGLLTSAGREIKNKEEILSLLEALHLPKRLAIIHCPGHQKAKDPISRGNQMADRVAKQAAQGVNLLAGKRTADGSEFEKRTADGSEFESPKKKAKVE

SEQ ID NO: 296 - protein, 2090 aa, synthetic construct
  source 1..2090: note = Description of Artificial Sequence: Synthetic polypeptide
MPAAKRVKLDGGDKKYSIGLDIGTNSVGWAVITDEYKVPSKKFKVLGNTDRHSIKKNLIGALLFDSGETAEATRLKRTARRRYTRRKNRICYLQEIFSNEMAKVDDSFFHRLEESFLVEEDKKHERHPIFGNIVDEVAYHEKYPTIYHLRKKLVDSTDKADLRLIYLALAHMIKFRGHFLIEGDLNPDNSDVDKLFIQLVQTYNQLFEENPINASGVDAKAILSARLSKSRRLENLIAQLPGEKKNGLFGNLIALSLGLTPNFKSNFDLAEDAKLQLSKDTYDDDLDNLLAQIGDQYADLFLAAKNLSDAILLSDILRVNTEITKAPLSASMIKRYDEHHQDLTLLKALVRQQLPEKYKEIFFDQSKNGYAGYIDGGASQEEFYKFIKPILEKMDGTEELLVKLNREDLLRKQRTFDNGSIPHQIHLGELHAILRRQEDFYPFLKDNREKIEKILTFRIPYYVGPLARGNSRFAWMTRKSEETITPWNFEEVVDKGASAQSFIERMTNFDKNLPNEKVLPKHSLLYEYFTVYNELTKVKYVTEGMRKPAFLSGEQKKAIVDLLFKTNRKVTVKQLKEDYFKKIECFDSVEISGVEDRFNASLGTYHDLLKIIKDKDFLDNEENEDILEDIVLTLTLFEDREMIEERLKTYAHLFDDKVMKQLKRRRYTGWGRLSRKLINGIRDKQSGKTILDFLKSDGFANRNFMQLIHDDSLTFKEDIQKAQVSGQGDSLHEHIANLAGSPAIKKGILQTVKVVDELVKVMGRHKPENIVIEMARENQTTQKGQKNSRERMKRIEEGIKELGSQILKEHPVENTQLQNEKLYLYYLQNGRDMYVDQELDINRLSDYDVDHIVPQSFLKDDSIDNKVLTRSDKARGKSDNVPSEEVVKKMKNYWRQLLNAKLITQRKFDNLTKAERGGLSELDKAGFIKRQLVETRQITKHVAQILDSRMNTKYDENDKLIREVKVITLKSKLVSDFRKDFQFYKVREINNYHHAHDAYLNAVVGTALIKKYPKLESEFVYGDYKVYDVRKMIAKSEQEIGKATAKYFFYSNIMNFFKTEITLANGEIRKRPLIETNGETGEIVWDKGRDFATVRKVLSMPQVNIVKKTEVQTGGFSKESILPKRNSDKLIARKKDWDPKKYGGFDSPTVAYSVLVVAKVEKGKSKKLKSVKELLGITIMERSSFEKNPIDFLEAKGYKEVKKDLIIKLPKYSLFELENGRKRMLASAGELQKGNELALPSKYVNFLYLASHYEKLKGSPEDNEQKQLFVEQHKHYLDEIIEQISEFSKRVILADANLDKVLSAYNKHRDKPIREQAENIIHLFTLTNLGAPAAFKYFDTTIDRKRYTSTKEVLDATLIHQSITGLYETRIDLSQLGGDGGEAAAKGSSGGGGGTLQLDDEYRLYSPLVKPDQNIQFWLEQFPQAWAETAGMGLAKQVPPQVIQLKASATPVSVRQYPLSKEAQEGIRPHVQRLIQQGILVPVQSPWNTPLLPVRKPGTNDYRPVQDLREVNKRVQDIHPTVPNPYNLLCALPPQRSWYTVLDLKDAFFCLRLHPTSQPLFAFEWRDPGTGRTGQLTWTRLPQGFKNSPTIFDEALHRDLANFRIQHPQVTLLQYVDDLLLAGATKQDCLEGTKALLLELSDLGYRASAKKAQICRREVTYLGYSLRDGQRWLTEARKKTVVQIPAPTTAKQVREFLGTAGFCRLWIPGFATLAAPLYPLTKEKGEFSWAPEHQKAFDAIKKALLSAPALALPDVTKPFTLYVDERKGVARGVLTQTLGPWRRPVAYLSKKLDPVASGWPVCLKAIAAVAILVKDADKLTLGQNITVIAPHALENIVRQPPDRWMTNARMTHYQSLLLTERVTFAPPAALNPATLLPEETDEPVTHDCHQLLIEETGVRKDLTDIPLTGEVLTWFTDGSSYVVEGKRMAGAAVVDGTRTIWASSLPEGTSAQKAELMALTQALRLAEGKSINIYTDSRYAFATAHVHGAIYKQRGLLTSAGREIKNKEEILSLLEALHLPKRLAIIHCPGHQKAKDPISRGNQMADRVAKQAAQGVNLLAGKRTADGSEFEKRTADGSEFESPKKKAKVE

SEQ ID NO: 297 - protein, 2087 aa, synthetic construct
  source 1..2087: note = Description of Artificial Sequence: Synthetic polypeptide
MPAAKRVKLDGGDKKYSIGLDIGTNSVGWAVITDEYKVPSKKFKVLGNTDRHSIKKNLIGALLFDSGETAEATRLKRTARRRYTRRKNRICYLQEIFSNEMAKVDDSFFHRLEESFLVEEDKKHERHPIFGNIVDEVAYHEKYPTIYHLRKKLVDSTDKADLRLIYLALAHMIKFRGHFLIEGDLNPDNSDVDKLFIQLVQTYNQLFEENPINASGVDAKAILSARLSKSRRLENLIAQLPGEKKNGLFGNLIALSLGLTPNFKSNFDLAEDAKLQLSKDTYDDDLDNLLAQIGDQYADLFLAAKNLSDAILLSDILRVNTEITKAPLSASMIKRYDEHHQDLTLLKALVRQQLPEKYKEIFFDQSKNGYAGYIDGGASQEEFYKFIKPILEKMDGTEELLVKLNREDLLRKQRTFDNGSIPHQIHLGELHAILRRQEDFYPFLKDNREKIEKILTFRIPYYVGPLARGNSRFAWMTRKSEETITPWNFEEVVDKGASAQSFIERMTNFDKNLPNEKVLPKHSLLYEYFTVYNELTKVKYVTEGMRKPAFLSGEQKKAIVDLLFKTNRKVTVKQLKEDYFKKIECFDSVEISGVEDRFNASLGTYHDLLKIIKDKDFLDNEENEDILEDIVLTLTLFEDREMIEERLKTYAHLFDDKVMKQLKRRRYTGWGRLSRKLINGIRDKQSGKTILDFLKSDGFANRNFMQLIHDDSLTFKEDIQKAQVSGQGDSLHEHIANLAGSPAIKKGILQTVKVVDELVKVMGRHKPENIVIEMARENQTTQKGQKNSRERMKRIEEGIKELGSQILKEHPVENTQLQNEKLYLYYLQNGRDMYVDQELDINRLSDYDVDHIVPQSFLKDDSIDNKVLTRSDKARGKSDNVPSEEVVKKMKNYWRQLLNAKLITQRKFDNLTKAERGGLSELDKAGFIKRQLVETRQITKHVAQILDSRMNTKYDENDKLIREVKVITLKSKLVSDFRKDFQFYKVREINNYHHAHDAYLNAVVGTALIKKYPKLESEFVYGDYKVYDVRKMIAKSEQEIGKATAKYFFYSNIMNFFKTEITLANGEIRKRPLIETNGETGEIVWDKGRDFATVRKVLSMPQVNIVKKTEVQTGGFSKESILPKRNSDKLIARKKDWDPKKYGGFDSPTVAYSVLVVAKVEKGKSKKLKSVKELLGITIMERSSFEKNPIDFLEAKGYKEVKKDLIIKLPKYSLFELENGRKRMLASAGELQKGNELALPSKYVNFLYLASHYEKLKGSPEDNEQKQLFVEQHKHYLDEIIEQISEFSKRVILADANLDKVLSAYNKHRDKPIREQAENIIHLFTLTNLGAPAAFKYFDTTIDRKRYTSTKEVLDATLIHQSITGLYETRIDLSQLGGDGGEAAAKPAPGGTLQLDDEYRLYSPLVKPDQNIQFWLEQFPQAWAETAGMGLAKQVPPQVIQLKASATPVSVRQYPLSKEAQEGIRPHVQRLIQQGILVPVQSPWNTPLLPVRKPGTNDYRPVQDLREVNKRVQDIHPTVPNPYNLLCALPPQRSWYTVLDLKDAFFCLRLHPTSQPLFAFEWRDPGTGRTGQLTWTRLPQGFKNSPTIFDEALHRDLANFRIQHPQVTLLQYVDDLLLAGATKQDCLEGTKALLLELSDLGYRASAKKAQICRREVTYLGYSLRDGQRWLTEARKKTVVQIPAPTTAKQVREFLGTAGFCRLWIPGFATLAAPLYPLTKEKGEFSWAPEHQKAFDAIKKALLSAPALALPDVTKPFTLYVDERKGVARGVLTQTLGPWRRPVAYLSKKLDPVASGWPVCLKAIAAVAILVKDADKLTLGQNITVIAPHALENIVRQPPDRWMTNARMTHYQSLLLTERVTFAPPAALNPATLLPEETDEPVTHDCHQLLIEETGVRKDLTDIPLTGEVLTWFTDGSSYVVEGKRMAGAAVVDGTRTIWASSLPEGTSAQKAELMALTQALRLAEGKSINIYTDSRYAFATAHVHGAIYKQRGLLTSAGREIKNKEEILSLLEALHLPKRLAIIHCPGHQKAKDPISRGNQMADRVAKQAAQGVNLLAGKRTADGSEFEKRTADGSEFESPKKKAKVE

SEQ ID NO: 298 - protein, 2094 aa, synthetic construct
  source 1..2094: note = Description of Artificial Sequence: Synthetic polypeptide
MPAAKRVKLDGGDKKYSIGLDIGTNSVGWAVITDEYKVPSKKFKVLGNTDRHSIKKNLIGALLFDSGETAEATRLKRTARRRYTRRKNRICYLQEIFSNEMAKVDDSFFHRLEESFLVEEDKKHERHPIFGNIVDEVAYHEKYPTIYHLRKKLVDSTDKADLRLIYLALAHMIKFRGHFLIEGDLNPDNSDVDKLFIQLVQTYNQLFEENPINASGVDAKAILSARLSKSRRLENLIAQLPGEKKNGLFGNLIALSLGLTPNFKSNFDLAEDAKLQLSKDTYDDDLDNLLAQIGDQYADLFLAAKNLSDAILLSDILRVNTEITKAPLSASMIKRYDEHHQDLTLLKALVRQQLPEKYKEIFFDQSKNGYAGYIDGGASQEEFYKFIKPILEKMDGTEELLVKLNREDLLRKQRTFDNGSIPHQIHLGELHAILRRQEDFYPFLKDNREKIEKILTFRIPYYVGPLARGNSRFAWMTRKSEETITPWNFEEVVDKGASAQSFIERMTNFDKNLPNEKVLPKHSLLYEYFTVYNELTKVKYVTEGMRKPAFLSGEQKKAIVDLLFKTNRKVTVKQLKEDYFKKIECFDSVEISGVEDRFNASLGTYHDLLKIIKDKDFLDNEENEDILEDIVLTLTLFEDREMIEERLKTYAHLFDDKVMKQLKRRRYTGWGRLSRKLINGIRDKQSGKTILDFLKSDGFANRNFMQLIHDDSLTFKEDIQKAQVSGQGDSLHEHIANLAGSPAIKKGILQTVKVVDELVKVMGRHKPENIVIEMARENQTTQKGQKNSRERMKRIEEGIKELGSQILKEHPVENTQLQNEKLYLYYLQNGRDMYVDQELDINRLSDYDVDHIVPQSFLKDDSIDNKVLTRSDKARGKSDNVPSEEVVKKMKNYWRQLLNAKLITQRKFDNLTKAERGGLSELDKAGFIKRQLVETRQITKHVAQILDSRMNTKYDENDKLIREVKVITLKSKLVSDFRKDFQFYKVREINNYHHAHDAYLNAVVGTALIKKYPKLESEFVYGDYKVYDVRKMIAKSEQEIGKATAKYFFYSNIMNFFKTEITLANGEIRKRPLIETNGETGEIVWDKGRDFATVRKVLSMPQVNIVKKTEVQTGGFSKESILPKRNSDKLIARKKDWDPKKYGGFDSPTVAYSVLVVAKVEKGKSKKLKSVKELLGITIMERSSFEKNPIDFLEAKGYKEVKKDLIIKLPKYSLFELENGRKRMLASAGELQKGNELALPSKYVNFLYLASHYEKLKGSPEDNEQKQLFVEQHKHYLDEIIEQISEFSKRVILADANLDKVLSAYNKHRDKPIREQAENIIHLFTLTNLGAPAAFKYFDTTIDRKRYTSTKEVLDATLIHQSITGLYETRIDLSQLGGDGGEAAAKEAAAKEAAAKGGTLQLDDEYRLYSPLVKPDQNIQFWLEQFPQAWAETAGMGLAKQVPPQVIQLKASATPVSVRQYPLSKEAQEGIRPHVQRLIQQGILVPVQSPWNTPLLPVRKPGTNDYRPVQDLREVNKRVQDIHPTVPNPYNLLCALPPQRSWYTVLDLKDAFFCLRLHPTSQPLFAFEWRDPGTGRTGQLTWTRLPQGFKNSPTIFNEALHRDLANFRIQHPQVTLLQYVDDLLLAGATKQDCLEGTKALLLELSDLGYRASAKKAQICRREVTYLGYSLRDGQRWLTEARKKTVVQIPAPTTAKQVREFLGTAGFCRLWIPGFATLAAPLYPLTKPKGEFSWAPEHQKAFDAIKKALLSAPALALPDVTKPFTLYVDERKGVARGVLTQTLGPWRRPVAYLSKKLDPVASGWPVCLKAIAAVAILVKDADKLTLGQNITVIAPHALENIVRQPPDRWMTNARMTHYQSLLLTERVTFAPPAALNPATLLPEETDEPVTHDCHQLLIEETGVRKDLTDIPLTGEVLTWFTDGSSYVVEGKRMAGAAVVDGTRTIWASSLPEGTSAQKAELMALTQALRLAEGKSINIYTDSRYAFATAHVHGAIYKQRGWLTSAGREIKNKEEILSLLEALHLPKRLAIIHCPGHQKAKDPISRGNQMADRVAKQAAQGVNLLAGKRTADGSEFEKRTADGSEFESPKKKAKVE

SEQ ID NO: 299 - protein, 2090 aa, synthetic construct
  source 1..2090: note = Description of Artificial Sequence: Synthetic polypeptide
MPAAKRVKLDGGDKKYSIGLDIGTNSVGWAVITDEYKVPSKKFKVLGNTDRHSIKKNLIGALLFDSGETAEATRLKRTARRRYTRRKNRICYLQEIFSNEMAKVDDSFFHRLEESFLVEEDKKHERHPIFGNIVDEVAYHEKYPTIYHLRKKLVDSTDKADLRLIYLALAHMIKFRGHFLIEGDLNPDNSDVDKLFIQLVQTYNQLFEENPINASGVDAKAILSARLSKSRRLENLIAQLPGEKKNGLFGNLIALSLGLTPNFKSNFDLAEDAKLQLSKDTYDDDLDNLLAQIGDQYADLFLAAKNLSDAILLSDILRVNTEITKAPLSASMIKRYDEHHQDLTLLKALVRQQLPEKYKEIFFDQSKNGYAGYIDGGASQEEFYKFIKPILEKMDGTEELLVKLNREDLLRKQRTFDNGSIPHQIHLGELHAILRRQEDFYPFLKDNREKIEKILTFRIPYYVGPLARGNSRFAWMTRKSEETITPWNFEEVVDKGASAQSFIERMTNFDKNLPNEKVLPKHSLLYEYFTVYNELTKVKYVTEGMRKPAFLSGEQKKAIVDLLFKTNRKVTVKQLKEDYFKKIECFDSVEISGVEDRFNASLGTYHDLLKIIKDKDFLDNEENEDILEDIVLTLTLFEDREMIEERLKTYAHLFDDKVMKQLKRRRYTGWGRLSRKLINGIRDKQSGKTILDFLKSDGFANRNFMQLIHDDSLTFKEDIQKAQVSGQGDSLHEHIANLAGSPAIKKGILQTVKVVDELVKVMGRHKPENIVIEMARENQTTQKGQKNSRERMKRIEEGIKELGSQILKEHPVENTQLQNEKLYLYYLQNGRDMYVDQELDINRLSDYDVDHIVPQSFLKDDSIDNKVLTRSDKARGKSDNVPSEEVVKKMKNYWRQLLNAKLITQRKFDNLTKAERGGLSELDKAGFIKRQLVETRQITKHVAQILDSRMNTKYDENDKLIREVKVITLKSKLVSDFRKDFQFYKVREINNYHHAHDAYLNAVVGTALIKKYPKLESEFVYGDYKVYDVRKMIAKSEQEIGKATAKYFFYSNIMNFFKTEITLANGEIRKRPLIETNGETGEIVWDKGRDFATVRKVLSMPQVNIVKKTEVQTGGFSKESILPKRNSDKLIARKKDWDPKKYGGFDSPTVAYSVLVVAKVEKGKSKKLKSVKELLGITIMERSSFEKNPIDFLEAKGYKEVKKDLIIKLPKYSLFELENGRKRMLASAGELQKGNELALPSKYVNFLYLASHYEKLKGSPEDNEQKQLFVEQHKHYLDEIIEQISEFSKRVILADANLDKVLSAYNKHRDKPIREQAENIIHLFTLTNLGAPAAFKYFDTTIDRKRYTSTKEVLDATLIHQSITGLYETRIDLSQLGGDGGEAAAKGGSGGGGGTLQLDDEYRLYSPLVKPDQNIQFWLEQFPQAWAETAGMGLAKQVPPQVIQLKASATPVSVRQYPLSKEAQEGIRPHVQRLIQQGILVPVQSPWNTPLLPVRKPGTNDYRPVQDLREVNKRVQDIHPTVPNPYNLLCALPPQRSWYTVLDLKDAFFCLRLHPTSQPLFAFEWRDPGTGRTGQLTWTRLPQGFKNSPTIFNEALHRDLANFRIQHPQVTLLQYVDDLLLAGATKQDCLEGTKALLLELSDLGYRASAKKAQICRREVTYLGYSLRDGQRWLTEARKKTVVQIPAPTTAKQVREFLGTAGFCRLWIPGFATLAAPLYPLTKPKGEFSWAPEHQKAFDAIKKALLSAPALALPDVTKPFTLYVDERKGVARGVLTQTLGPWRRPVAYLSKKLDPVASGWPVCLKAIAAVAILVKDADKLTLGQNITVIAPHALENIVRQPPDRWMTNARMTHYQSLLLTERVTFAPPAALNPATLLPEETDEPVTHDCHQLLIEETGVRKDLTDIPLTGEVLTWFTDGSSYVVEGKRMAGAAVVDGTRTIWASSLPEGTSAQKAELMALTQALRLAEGKSINIYTDSRYAFATAHVHGAIYKQRGWLTSAGREIKNKEEILSLLEALHLPKRLAIIHCPGHQKAKDPISRGNQMADRVAKQAAQGVNLLAGKRTADGSEFEKRTADGSEFESPKKKAKVE

SEQ ID NO: 300 - protein, 2125 aa, synthetic construct; identical to SEQ ID NO: 156
  source 1..2125: note = Description of Artificial Sequence: Synthetic polypeptide

SEQ ID NO: 301 - protein, 2090 aa, synthetic construct
  source 1..2090: note = Description of Artificial Sequence: Synthetic polypeptide
MPAAKRVKLDGGDKKYSIGLDIGTNSVGWAVITDEYKVPSKKFKVLGNTDRHSIKKNLIGALLFDSGETAEATRLKRTARRRYTRRKNRICYLQEIFSNEMAKVDDSFFHRLEESFLVEEDKKHERHPIFGNIVDEVAYHEKYPTIYHLRKKLVDSTDKADLRLIYLALAHMIKFRGHFLIEGDLNPDNSDVDKLFIQLVQTYNQLFEENPINASGVDAKAILSARLSKSRRLENLIAQLPGEKKNGLFGNLIALSLGLTPNFKSNFDLAEDAKLQLSKDTYDDDLDNLLAQIGDQYADLFLAAKNLSDAILLSDILRVNTEITKAPLSASMIKRYDEHHQDLTLLKALVRQQLPEKYKEIFFDQSKNGYAGYIDGGASQEEFYKFIKPILEKMDGTEELLVKLNREDLLRKQRTFDNGSIPHQIHLGELHAILRRQEDFYPFLKDNREKIEKILTFRIPYYVGPLARGNSRFAWMTRKSEETITPWNFEEVVDKGASAQSFIERMTNFDKNLPNEKVLPKHSLLYEYFTVYNELTKVKYVTEGMRKPAFLSGEQKKAIVDLLFKTNRKVTVKQLKEDYFKKIECFDSVEISGVEDRFNASLGTYHDLLKIIKDKDFLDNEENEDILEDIVLTLTLFEDREMIEERLKTYAHLFDDKVMKQLKRRRYTGWGRLSRKLINGIRDKQSGKTILDFLKSDGFANRNFMQLIHDDSLTFKEDIQKAQVSGQGDSLHEHIANLAGSPAIKKGILQTVKVVDELVKVMGRHKPENIVIEMARENQTTQKGQKNSRERMKRIEEGIKELGSQILKEHPVENTQLQNEKLYLYYLQNGRDMYVDQELDINRLSDYDVDHIVPQSFLKDDSIDNKVLTRSDKARGKSDNVPSEEVVKKMKNYWRQLLNAKLITQRKFDNLTKAERGGLSELDKAGFIKRQLVETRQITKHVAQILDSRMNTKYDENDKLIREVKVITLKSKLVSDFRKDFQFYKVREINNYHHAHDAYLNAVVGTALIKKYPKLESEFVYGDYKVYDVRKMIAKSEQEIGKATAKYFFYSNIMNFFKTEITLANGEIRKRPLIETNGETGEIVWDKGRDFATVRKVLSMPQVNIVKKTEVQTGGFSKESILPKRNSDKLIARKKDWDPKKYGGFDSPTVAYSVLVVAKVEKGKSKKLKSVKELLGITIMERSSFEKNPIDFLEAKGYKEVKKDLIIKLPKYSLFELENGRKRMLASAGELQKGNELALPSKYVNFLYLASHYEKLKGSPEDNEQKQLFVEQHKHYLDEIIEQISEFSKRVILADANLDKVLSAYNKHRDKPIREQAENIIHLFTLTNLGAPAAFKYFDTTIDRKRYTSTKEVLDATLIHQSITGLYETRIDLSQLGGDGGGGGEAAAKGSSGGTLQLDDEYRLYSPLVKPDQNIQFWLEQFPQAWAETAGMGLAKQVPPQVIQLKASATPVSVRQYPLSKEAQEGIRPHVQRLIQQGILVPVQSPWNTPLLPVRKPGTNDYRPVQDLREVNKRVQDIHPTVPNPYNLLCALPPQRSWYTVLDLKDAFFCLRLHPTSQPLFAFEWRDPGTGRTGQLTWTRLPQGFKNSPTIFNEALHRDLANFRIQHPQVTLLQYVDDLLLAGATKQDCLEGTKALLLELSDLGYRASAKKAQICRREVTYLGYSLRDGQRWLTEARKKTVVQIPAPTTAKQVREFLGTAGFCRLWIPGFATLAAPLYPLTKPKGEFSWAPEHQKAFDAIKKALLSAPALALPDVTKPFTLYVDERKGVARGVLTQTLGPWRRPVAYLSKKLDPVASGWPVCLKAIAAVAILVKDADKLTLGQNITVIAPHALENIVRQPPDRWMTNARMTHYQSLLLTERVTFAPPAALNPATLLPEETDEPVTHDCHQLLIEETGVRKDLTDIPLTGEVLTWFTDGSSYVVEGKRMAGAAVVDGTRTIWASSLPEGTSAQKAELMALTQALRLAEGKSINIYTDSRYAFATAHVHGAIYKQRGWLTSAGREIKNKEEILSLLEALHLPKRLAIIHCPGHQKAKDPISRGNQMADRVAKQAAQGVNLLAGKRTADGSEFEKRTADGSEFESPKKKAKVE

SEQ ID NO: 302 - protein, 2090 aa, synthetic construct; identical to SEQ ID NO: 164
  source 1..2090: note = Description of Artificial Sequence: Synthetic polypeptide

SEQ ID NO: 303 - protein, 2112 aa, synthetic construct; identical to SEQ ID NO: 140
  source 1..2112: note = Description of Artificial Sequence: Synthetic polypeptide

SEQ ID NO: 304 - protein, 2090 aa, synthetic construct
  source 1..2090: note = Description of Artificial Sequence: Synthetic polypeptide
MPAAKRVKLDGGDKKYSIGLDIGTNSVGWAVITDEYKVPSKKFKVLGNTDRHSIKKNLIGALLFDSGETAEATRLKRTARRRYTRRKNRICYLQEIFSNEMAKVDDSFFHRLEESFLVEEDKKHERHPIFGNIVDEVAYHEKYPTIYHLRKKLVDSTDKADLRLIYLALAHMIKFRGHFLIEGDLNPDNSDVDKLFIQLVQTYNQLFEENPINASGVDAKAILSARLSKSRRLENLIAQLPGEKKNGLFGNLIALSLGLTPNFKSNFDLAEDAKLQLSKDTYDDDLDNLLAQIGDQYADLFLAAKNLSDAILLSDILRVNTEITKAPLSASMIKRYDEHHQDLTLLKALVRQQLPEKYKEIFFDQSKNGYAGYIDGGASQEEFYKFIKPILEKMDGTEELLVKLNREDLLRKQRTFDNGSIPHQIHLGELHAILRRQEDFYPFLKDNREKIEKILTFRIPYYVGPLARGNSRFAWMTRKSEETITPWNFEEVVDKGASAQSFIERMTNFDKNLPNEKVLPKHSLLYEYFTVYNELTKVKYVTEGMRKPAFLSGEQKKAIVDLLFKTNRKVTVKQLKEDYFKKIECFDSVEISGVEDRFNASLGTYHDLLKIIKDKDFLDNEENEDILEDIVLTLTLFEDREMIEERLKTYAHLFDDKVMKQLKRRRYTGWGRLSRKLINGIRDKQSGKTILDFLKSDGFANRNFMQLIHDDSLTFKEDIQKAQVSGQGDSLHEHIANLAGSPAIKKGILQTVKVVDELVKVMGRHKPENIVIEMARENQTTQKGQKNSRERMKRIEEGIKELGSQILKEHPVENTQLQNEKLYLYYLQNGRDMYVDQELDINRLSDYDVDHIVPQSFLKDDSIDNKVLTRSDKARGKSDNVPSEEVVKKMKNYWRQLLNAKLITQRKFDNLTKAERGGLSELDKAGFIKRQLVETRQITKHVAQILDSRMNTKYDENDKLIREVKVITLKSKLVSDFRKDFQFYKVREINNYHHAHDAYLNAVVGTALIKKYPKLESEFVYGDYKVYDVRKMIAKSEQEIGKATAKYFFYSNIMNFFKTEITLANGEIRKRPLIETNGETGEIVWDKGRDFATVRKVLSMPQVNIVKKTEVQTGGFSKESILPKRNSDKLIARKKDWDPKKYGGFDSPTVAYSVLVVAKVEKGKSKKLKSVKELLGITIMERSSFEKNPIDFLEAKGYKEVKKDLIIKLPKYSLFELENGRKRMLASAGELQKGNELALPSKYVNFLYLASHYEKLKGSPEDNEQKQLFVEQHKHYLDEIIEQISEFSKRVILADANLDKVLSAYNKHRDKPIREQAENIIHLFTLTNLGAPAAFKYFDTTIDRKRYTSTKEVLDATLIHQSITGLYETRIDLSQLGGDGGEAAAKPAPGSSGGTLQLDDEYRLYSPLVKPDQNIQFWLEQFPQAWAETAGMGLAKQVPPQVIQLKASATPVSVRQYPLSKEAQEGIRPHVQRLIQQGILVPVQSPWNTPLLPVRKPGTNDYRPVQDLREVNKRVQDIHPTVPNPYNLLCALPPQRSWYTVLDLKDAFFCLRLHPTSQPLFAFEWRDPGTGRTGQLTWTRLPQGFKNSPTIFNEALHRDLANFRIQHPQVTLLQYVDDLLLAGATKQDCLEGTKALLLELSDLGYRASAKKAQICRREVTYLGYSLRDGQRWLTEARKKTVVQIPAPTTAKQVREFLGTAGFCRLWIPGFATLAAPLYPLTKPKGEFSWAPEHQKAFDAIKKALLSAPALALPDVTKPFTLYVDERKGVARGVLTQTLGPWRRPVAYLSKKLDPVASGWPVCLKAIAAVAILVKDADKLTLGQNITVIAPHALENIVRQPPDRWMTNARMTHYQSLLLTERVTFAPPAALNPATLLPEETDEPVTHDCHQLLIEETGVRKDLTDIPLTGEVLTWFTDGSSYVVEGKRMAGAAVVDGTRTIWASSLPEGTSAQKAELMALTQALRLAEGKSINIYTDSRYAFATAHVHGAIYKQRGWLTSAGREIKNKEEILSLLEALHLPKRLAIIHCPGHQKAKDPISRGNQMADRVAKQAAQGVNLLAGKRTADGSEFEKRTADGSEFESPKKKAKVE

SEQ ID NO: 305 - protein, 2090 aa, synthetic construct; identical to SEQ ID NO: 127
  source 1..2090: note = Description of Artificial Sequence: Synthetic polypeptide

SEQ ID NO: 306 - protein, 2087 aa, synthetic construct; identical to SEQ ID NO: 126
  source 1..2087: note = Description of Artificial Sequence: Synthetic polypeptide

SEQ ID NO: 307 - protein, 2088 aa, synthetic construct
  source 1..2088: note = Description of Artificial Sequence: Synthetic polypeptide
MPAAKRVKLDGGDKKYSIGLDIGTNSVGWAVITDEYKVPSKKFKVLGNTDRHSIKKNLIGALLFDSGETAEATRLKRTARRRYTRRKNRICYLQEIFSNEMAKVDDSFFHRLEESFLVEEDKKHERHPIFGNIVDEVAYHEKYPTIYHLRKKLVDSTDKADLRLIYLALAHMIKFRGHFLIEGDLNPDNSDVDKLFIQLVQTYNQLFEENPINASGVDAKAILSARLSKSRRLENLIAQLPGEKKNGLFGNLIALSLGLTPNFKSNFDLAEDAKLQLSKDTYDDDLDNLLAQIGDQYADLFLAAKNLSDAILLSDILRVNTEITKAPLSASMIKRYDEHHQDLTLLKALVRQQLPEKYKEIFFDQSKNGYAGYIDGGASQEEFYKFIKPILEKMDGTEELLVKLNREDLLRKQRTFDNGSIPHQIHLGELHAILRRQEDFYPFLKDNREKIEKILTFRIPYYVGPLARGNSRFAWMTRKSEETITPWNFEEVVDKGASAQSFIERMTNFDKNLPNEKVLPKHSLLYEYFTVYNELTKVKYVTEGMRKPAFLSGEQKKAIVDLLFKTNRKVTVKQLKEDYFKKIECFDSVEISGVEDRFNASLGTYHDLLKIIKDKDFLDNEENEDILEDIVLTLTLFEDREMIEERLKTYAHLFDDKVMKQLKRRRYTGWGRLSRKLINGIRDKQSGKTILDFLKSDGFANRNFMQLIHDDSLTFKEDIQKAQVSGQGDSLHEHIANLAGSPAIKKGILQTVKVVDELVKVMGRHKPENIVIEMARENQTTQKGQKNSRERMKRIEEGIKELGSQILKEHPVENTQLQNEKLYLYYLQNGRDMYVDQELDINRLSDYDVDHIVPQSFLKDDSIDNKVLTRSDKARGKSDNVPSEEVVKKMKNYWRQLLNAKLITQRKFDNLTKAERGGLSELDKAGFIKRQLVETRQITKHVAQILDSRMNTKYDENDKLIREVKVITLKSKLVSDFRKDFQFYKVREINNYHHAHDAYLNAVVGTALIKKYPKLESEFVYGDYKVYDVRKMIAKSEQEIGKATAKYFFYSNIMNFFKTEITLANGEIRKRPLIETNGETGEIVWDKGRDFATVRKVLSMPQVNIVKKTEVQTGGFSKESILPKRNSDKLIARKKDWDPKKYGGFDSPTVAYSVLVVAKVEKGKSKKLKSVKELLGITIMERSSFEKNPIDFLEAKGYKEVKKDLIIKLPKYSLFELENGRKRMLASAGELQKGNELALPSKYVNFLYLASHYEKLKGSPEDNEQKQLFVEQHKHYLDEIIEQISEFSKRVILADANLDKVLSAYNKHRDKPIREQAENIIHLFTLTNLGAPAAFKYFDTTIDRKRYTSTKEVLDATLIHQSITGLYETRIDLSQLGGDGGGGGGSSPAPGGTLQLDDEYRLYSPLVKPDQNIQFWLEQFPQAWAETAGMGLAKQVPPQVIQLKASATPVSVRQYPLSKEAQEGIRPHVQRLIQQGILVPVQSPWNTPLLPVRKPGTNDYRPVQDLREVNKRVQDIHPTVPNPYNLLCALPPQRSWYTVLDLKDAFFCLRLHPTSQPLFAFEWRDPGTGRTGQLTWTRLPQGFKNSPTIFNEALHRDLANFRIQHPQVTLLQYVDDLLLAGATKQDCLEGTKALLLELSDLGYRASAKKAQICRREVTYLGYSLRDGQRWLTEARKKTVVQIPAPTTAKQVREFLGTAGFCRLWIPGFATLAAPLYPLTKPKGEFSWAPEHQKAFDAIKKALLSAPALALPDVTKPFTLYVDERKGVARGVLTQTLGPWRRPVAYLSKKLDPVASGWPVCLKAIAAVAILVKDADKLTLGQNITVIAPHALENIVRQPPDRWMTNARMTHYQSLLLTERVTFAPPAALNPATLLPEETDEPVTHDCHQLLIEETGVRKDLTDIPLTGEVLTWFTDGSSYVVEGKRMAGAAVVDGTRTIWASSLPEGTSAQKAELMALTQALRLAEGKSINIYTDSRYAFATAHVHGAIYKQRGWLTSAGREIKNKEEILSLLEALHLPKRLAIIHCPGHQKAKDPISRGNQMADRVAKQAAQGVNLLAGKRTADGSEFEKRTADGSEFESPKKKAKVE

SEQ ID NO: 308 - protein, 2084 aa, synthetic construct; identical to SEQ ID NO: 151
  source 1..2084: note = Description of Artificial Sequence: Synthetic polypeptide

SEQ ID NO: 309 - protein, 2092 aa, synthetic construct; identical to SEQ ID NO: 157
  source 1..2092: note = Description of Artificial Sequence: Synthetic polypeptide

SEQ ID NO: 310 - protein, 2090 aa, synthetic construct
  source 1..2090: note = Description of Artificial Sequence: Synthetic polypeptide
MPAAKRVKLDGGDKKYSIGLDIGTNSVGWAVITDEYKVPSKKFKVLGNTDRHSIKKNLIGALLFDSGETAEATRLKRTARRRYTRRKNRICYLQEIFSNEMAKVDDSFFHRLEESFLVEEDKKHERHPIFGNIVDEVAYHEKYPTIYHLRKKLVDSTDKADLRLIYLALAHMIKFRGHFLIEGDLNPDNSDVDKLFIQLVQTYNQLFEENPINASGVDAKAILSARLSKSRRLENLIAQLPGEKKNGLFGNLIALSLGLTPNFKSNFDLAEDAKLQLSKDTYDDDLDNLLAQIGDQYADLFLAAKNLSDAILLSDILRVNTEITKAPLSASMIKRYDEHHQDLTLLKALVRQQLPEKYKEIFFDQSKNGYAGYIDGGASQEEFYKFIKPILEKMDGTEELLVKLNREDLLRKQRTFDNGSIPHQIHLGELHAILRRQEDFYPFLKDNREKIEKILTFRIPYYVGPLARGNSRFAWMTRKSEETITPWNFEEVVDKGASAQSFIERMTNFDKNLPNEKVLPKHSLLYEYFTVYNELTKVKYVTEGMRKPAFLSGEQKKAIVDLLFKTNRKVTVKQLKEDYFKKIECFDSVEISGVEDRFNASLGTYHDLLKIIKDKDFLDNEENEDILEDIVLTLTLFEDREMIEERLKTYAHLFDDKVMKQLKRRRYTGWGRLSRKLINGIRDKQSGKTILDFLKSDGFANRNFMQLIHDDSLTFKEDIQKAQVSGQGDSLHEHIANLAGSPAIKKGILQTVKVVDELVKVMGRHKPENIVIEMARENQTTQKGQKNSRERMKRIEEGIKELGSQILKEHPVENTQLQNEKLYLYYLQNGRDMYVDQELDINRLSDYDVDHIVPQSFLKDDSIDNKVLTRSDKARGKSDNVPSEEVVKKMKNYWRQLLNAKLITQRKFDNLTKAERGGLSELDKAGFIKRQLVETRQITKHVAQILDSRMNTKYDENDKLIREVKVITLKSKLVSDFRKDFQFYKVREINNYHHAHDAYLNAVVGTALIKKYPKLESEFVYGDYKVYDVRKMIAKSEQEIGKATAKYFFYSNIMNFFKTEITLANGEIRKRPLIETNGETGEIVWDKGRDFATVRKVLSMPQVNIVKKTEVQTGGFSKESILPKRNSDKLIARKKDWDPKKYGGFDSPTVAYSVLVVAKVEKGKSKKLKSVKELLGITIMERSSFEKNPIDFLEAKGYKEVKKDLIIKLPKYSLFELENGRKRMLASAGELQKGNELALPSKYVNFLYLASHYEKLKGSPEDNEQKQLFVEQHKHYLDEIIEQISEFSKRVILADANLDKVLSAYNKHRDKPIREQAENIIHLFTLTNLGAPAAFKYFDTTIDRKRYTSTKEVLDATLIHQSITGLYETRIDLSQLGGDGGGSSPAPEAAAKGGTLQLDDEYRLYSPLVKPDQNIQFWLEQFPQAWAETAGMGLAKQVPPQVIQLKASATPVSVRQYPLSKEAQEGIRPHVQRLIQQGILVPVQSPWNTPLLPVRKPGTNDYRPVQDLREVNKRVQDIHPTVPNPYNLLCALPPQRSWYTVLDLKDAFFCLRLHPTSQPLFAFEWRDPGTGRTGQLTWTRLPQGFKNSPTIFNEALHRDLANFRIQHPQVTLLQYVDDLLLAGATKQDCLEGTKALLLELSDLGYRASAKKAQICRREVTYLGYSLRDGQRWLTEARKKTVVQIPAPTTAKQVREFLGTAGFCRLWIPGFATLAAPLYPLTKPKGEFSWAPEHQKAFDAIKKALLSAPALALPDVTKPFTLYVDERKGVARGVLTQTLGPWRRPVAYLSKKLDPVASGWPVCLKAIAAVAILVKDADKLTLGQNITVIAPHALENIVRQPPDRWMTNARMTHYQSLLLTERVTFAPPAALNPATLLPEETDEPVTHDCHQLLIEETGVRKDLTDIPLTGEVLTWFTDGSSYVVEGKRMAGAAVVDGTRTIWASSLPEGTSAQKAELMALTQALRLAEGKSINIYTDSRYAFATAHVHGAIYKQRGWLTSAGREIKNKEEILSLLEALHLPKRLAIIHCPGHQKAKDPISRGNQMADRVAKQAAQGVNLLAGKRTADGSEFEKRTADGSEFESPKKKAKVE

SEQ ID NO: 311 - protein, 2090 aa, synthetic construct
  source 1..2090: note = Description of Artificial Sequence: Synthetic polypeptide
MPAAKRVKLDGGDKKYSIGLDIGTNSVGWAVITDEYKVPSKKFKVLGNTDRHSIKKNLIGALLFDSGETAEATRLKRTARRRYTRRKNRICYLQEIFSNEMAKVDDSFFHRLEESFLVEEDKKHERHPIFGNIVDEVAYHEKYPTIYHLRKKLVDSTDKADLRLIYLALAHMIKFRGHFLIEGDLNPDNSDVDKLFIQLVQTYNQLFEENPINASGVDAKAILSARLSKSRRLENLIAQLPGEKKNGLFGNLIALSLGLTPNFKSNFDLAEDAKLQLSKDTYDDDLDNLLAQIGDQYADLFLAAKNLSDAILLSDILRVNTEITKAPLSASMIKRYDEHHQDLTLLKALVRQQLPEKYKEIFFDQSKNGYAGYIDGGASQEEFYKFIKPILEKMDGTEELLVKLNREDLLRKQRTFDNGSIPHQIHLGELHAILRRQEDFYPFLKDNREKIEKILTFRIPYYVGPLARGNSRFAWMTRKSEETITPWNFEEVVDKGASAQSFIERMTNFDKNLPNEKVLPKHSLLYEYFTVYNELTKVKYVTEGMRKPAFLSGEQKKAIVDLLFKTNRKVTVKQLKEDYFKKIECFDSVEISGVEDRFNASLGTYHDLLKIIKDKDFLDNEENEDILEDIVLTLTLFEDREMIEERLKTYAHLFDDKVMKQLKRRRYTGWGRLSRKLINGIRDKQSGKTILDFLKSDGFANRNFMQLIHDDSLTFKEDIQKAQVSGQGDSLHEHIANLAGSPAIKKGILQTVKVVDELVKVMGRHKPENIVIEMARENQTTQKGQKNSRERMKRIEEGIKELGSQILKEHPVENTQLQNEKLYLYYLQNGRDMYVDQELDINRLSDYDVDHIVPQSFLKDDSIDNKVLTRSDKARGKSDNVPSEEVVKKMKNYWRQLLNAKLITQRKFDNLTKAERGGLSELDKAGFIKRQLVETRQITKHVAQILDSRMNTKYDENDKLIREVKVITLKSKLVSDFRKDFQFYKVREINNYHHAHDAYLNAVVGTALIKKYPKLESEFVYGDYKVYDVRKMIAKSEQEIGKATAKYFFYSNIMNFFKTEITLANGEIRKRPLIETNGETGEIVWDKGRDFATVRKVLSMPQVNIVKKTEVQTGGFSKESILPKRNSDKLIARKKDWDPKKYGGFDSPTVAYSVLVVAKVEKGKSKKLKSVKELLGITIMERSSFEKNPIDFLEAKGYKEVKKDLIIKLPKYSLFELENGRKRMLASAGELQKGNELALPSKYVNFLYLASHYEKLKGSPEDNEQKQLFVEQHKHYLDEIIEQISEFSKRVILADANLDKVLSAYNKHRDKPIREQAENIIHLFTLTNLGAPAAFKYFDTTIDRKRYTSTKEVLDATLIHQSITGLYETRIDLSQLGGDGGGGGGGSEAAAKGGTLQLDDEYRLYSPLVKPDQNIQFWLEQFPQAWAETAGMGLAKQVPPQVIQLKASATPVSVRQYPLSKEAQEGIRPHVQRLIQQGILVPVQSPWNTPLLPVRKPGTNDYRPVQDLREVNKRVQDIHPTVPNPYNLLCALPPQRSWYTVLDLKDAFFCLRLHPTSQPLFAFEWRDPGTGRTGQLTWTRLPQGFKNSPTIFNEALHRDLANFRIQHPQVTLLQYVDDLLLAGATKQDCLEGTKALLLELSDLGYRASAKKAQICRREVTYLGYSLRDGQRWLTEARKKTVVQIPAPTTAKQVREFLGTAGFCRLWIPGFATLAAPLYPLTKPKGEFSWAPEHQKAFDAIKKALLSAPALALPDVTKPFTLYVDERKGVARGVLTQTLGPWRRPVAYLSKKLDPVASGWPVCLKAIAAVAILVKDADKLTLGQNITVIAPHALENIVRQPPDRWMTNARMTHYQSLLLTERVTFAPPAALNPATLLPEETDEPVTHDCHQLLIEETGVRKDLTDIPLTGEVLTWFTDGSSYVVEGKRMAGAAVVDGTRTIWASSLPEGTSAQKAELMALTQALRLAEGKSINIYTDSRYAFATAHVHGAIYKQRGWLTSAGREIKNKEEILSLLEALHLPKRLAIIHCPGHQKAKDPISRGNQMADRVAKQAAQGVNLLAGKRTADGSEFEKRTADGSEFESPKKKAKVE

SEQ ID NO: 312 - protein, 2090 aa, synthetic construct; identical to SEQ ID NO: 116
  source 1..2090: note = Description of Artificial Sequence: Synthetic polypeptide

SEQ ID NO: 313 - protein, 2109 aa, synthetic construct; identical to SEQ ID NO: 117
  source 1..2109: note = Description of Artificial Sequence: Synthetic polypeptide

SEQ ID NO: 314 - protein, 2088 aa, synthetic construct
  source 1..2088: note = Description of Artificial Sequence: Synthetic polypeptide
MPAAKRVKLDGGDKKYSIGLDIGTNSVGWAVITDEYKVPSKKFKVLGNTDRHSIKKNLIGALLFDSGETAEATRLKRTARRRYTRRKNRICYLQEIFSNEMAKVDDSFFHRLEESFLVEEDKKHERHPIFGNIVDEVAYHEKYPTIYHLRKKLVDSTDKADLRLIYLALAHMIKFRGHFLIEGDLNPDNSDVDKLFIQLVQTYNQLFEENPINASGVDAKAILSARLSKSRRLENLIAQLPGEKKNGLFGNLIALSLGLTPNFKSNFDLAEDAKLQLSKDTYDDDLDNLLAQIGDQYADLFLAAKNLSDAILLSDILRVNTEITKAPLSASMIKRYDEHHQDLTLLKALVRQQLPEKYKEIFFDQSKNGYAGYIDGGASQEEFYKFIKPILEKMDGTEELLVKLNREDLLRKQRTFDNGSIPHQIHLGELHAILRRQEDFYPFLKDNREKIEKILTFRIPYYVGPLARGNSRFAWMTRKSEETITPWNFEEVVDKGASAQSFIERMTNFDKNLPNEKVLPKHSLLYEYFTVYNELTKVKYVTEGMRKPAFLSGEQKKAIVDLLFKTNRKVTVKQLKEDYFKKIECFDSVEISGVEDRFNASLGTYHDLLKIIKDKDFLDNEENEDILEDIVLTLTLFEDREMIEERLKTYAHLFDDKVMKQLKRRRYTGWGRLSRKLINGIRDKQSGKTILDFLKSDGFANRNFMQLIHDDSLTFKEDIQKAQVSGQGDSLHEHIANLAGSPAIKKGILQTVKVVDELVKVMGRHKPENIVIEMARENQTTQKGQKNSRERMKRIEEGIKELGSQILKEHPVENTQLQNEKLYLYYLQNGRDMYVDQELDINRLSDYDVDHIVPQSFLKDDSIDNKVLTRSDKARGKSDNVPSEEVVKKMKNYWRQLLNAKLITQRKFDNLTKAERGGLSELDKAGFIKRQLVETRQITKHVAQILDSRMNTKYDENDKLIREVKVITLKSKLVSDFRKDFQFYKVREINNYHHAHDAYLNAVVGTALIKKYPKLESEFVYGDYKVYDVRKMIAKSEQEIGKATAKYFFYSNIMNFFKTEITLANGEIRKRPLIETNGETGEIVWDKGRDFATVRKVLSMPQVNIVKKTEVQTGGFSKESILPKRNSDKLIARKKDWDPKKYGGFDSPTVAYSVLVVAKVEKGKSKKLKSVKELLGITIMERSSFEKNPIDFLEAKGYKEVKKDLIIKLPKYSLFELENGRKRMLASAGELQKGNELALPSKYVNFLYLASHYEKLKGSPEDNEQKQLFVEQHKHYLDEIIEQISEFSKRVILADANLDKVLSAYNKHRDKPIREQAENIIHLFTLTNLGAPAAFKYFDTTIDRKRYTSTKEVLDATLIHQSITGLYETRIDLSQLGGDGGGGGPAPGSSGGTLQLDDEYRLYSPLVKPDQNIQFWLEQFPQAWAETAGMGLAKQVPPQVIQLKASATPVSVRQYPLSKEAQEGIRPHVQRLIQQGILVPVQSPWNTPLLPVRKPGTNDYRPVQDLREVNKRVQDIHPTVPNPYNLLCALPPQRSWYTVLDLKDAFFCLRLHPTSQPLFAFEWRDPGTGRTGQLTWTRLPQGFKNSPTIFNEALHRDLANFRIQHPQVTLLQYVDDLLLAGATKQDCLEGTKALLLELSDLGYRASAKKAQICRREVTYLGYSLRDGQRWLTEARKKTVVQIPAPTTAKQVREFLGTAGFCRLWIPGFATLAAPLYPLTKPKGEFSWAPEHQKAFDAIKKALLSAPALALPDVTKPFTLYVDERKGVARGVLTQTLGPWRRPVAYLSKKLDPVASGWPVCLKAIAAVAILVKDADKLTLGQNITVIAPHALENIVRQPPDRWMTNARMTHYQSLLLTERVTFAPPAALNPATLLPEETDEPVTHDCHQLLIEETGVRKDLTDIPLTGEVLTWFTDGSSYVVEGKRMAGAAVVDGTRTIWASSLPEGTSAQKAELMALTQALRLAEGKSINIYTDSRYAFATAHVHGAIYKQRGWLTSAGREIKNKEEILSLLEALHLPKRLAIIHCPGHQKAKDPISRGNQMADRVAKQAAQGVNLLAGKRTADGSEFEKRTADGSEFESPKKKAKVE

SEQ ID NO: 315 - protein, 2082 aa, synthetic construct; identical to SEQ ID NO: 120
  source 1..2082: note = Description of Artificial Sequence: Synthetic polypeptide

SEQ ID NO: 316 - protein, 2097 aa, synthetic construct; identical to SEQ ID NO: 142
  source 1..2097: note = Description of Artificial Sequence: Synthetic polypeptide

SEQ ID NO: 317 - protein, 2090 aa, synthetic construct
  source 1..2090: note = Description of Artificial Sequence: Synthetic polypeptide
MPAAKRVKLDGGDKKYSIGLDIGTNSVGWAVITDEYKVPSKKFKVLGNTDRHSIKKNLIGALLFDSGETAEATRLKRTARRRYTRRKNRICYLQEIFSNEMAKVDDSFFHRLEESFLVEEDKKHERHPIFGNIVDEVAYHEKYPTIYHLRKKLVDSTDKADLRLIYLALAHMIKFRGHFLIEGDLNPDNSDVDKLFIQLVQTYNQLFEENPINASGVDAKAILSARLSKSRRLENLIAQLPGEKKNGLFGNLIALSLGLTPNFKSNFDLAEDAKLQLSKDTYDDDLDNLLAQIGDQYADLFLAAKNLSDAILLSDILRVNTEITKAPLSASMIKRYDEHHQDLTLLKALVRQQLPEKYKEIFFDQSKNGYAGYIDGGASQEEFYKFIKPILEKMDGTEELLVKLNREDLLRKQRTFDNGSIPHQIHLGELHAILRRQEDFYPFLKDNREKIEKILTFRIPYYVGPLARGNSRFAWMTRKSEETITPWNFEEVVDKGASAQSFIERMTNFDKNLPNEKVLPKHSLLYEYFTVYNELTKVKYVTEGMRKPAFLSGEQKKAIVDLLFKTNRKVTVKQLKEDYFKKIECFDSVEISGVEDRFNASLGTYHDLLKIIKDKDFLDNEENEDILEDIVLTLTLFEDREMIEERLKTYAHLFDDKVMKQLKRRRYTGWGRLSRKLINGIRDKQSGKTILDFLKSDGFANRNFMQLIHDDSLTFKEDIQKAQVSGQGDSLHEHIANLAGSPAIKKGILQTVKVVDELVKVMGRHKPENIVIEMARENQTTQKGQKNSRERMKRIEEGIKELGSQILKEHPVENTQLQNEKLYLYYLQNGRDMYVDQELDINRLSDYDVDHIVPQSFLKDDSIDNKVLTRSDKARGKSDNVPSEEVVKKMKNYWRQLLNAKLITQRKFDNLTKAERGGLSELDKAGFIKRQLVETRQITKHVAQILDSRMNTKYDENDKLIREVKVITLKSKLVSDFRKDFQFYKVREINNYHHAHDAYLNAVVGTALIKKYPKLESEFVYGDYKVYDVRKMIAKSEQEIGKATAKYFFYSNIMNFFKTEITLANGEIRKRPLIETNGETGEIVWDKGRDFATVRKVLSMPQVNIVKKTEVQTGGFSKESILPKRNSDKLIARKKDWDPKKYGGFDSPTVAYSVLVVAKVEKGKSKKLKSVKELLGITIMERSSFEKNPIDFLEAKGYKEVKKDLIIKLPKYSLFELENGRKRMLASAGELQKGNELALPSKYVNFLYLASHYEKLKGSPEDNEQKQLFVEQHKHYLDEIIEQISEFSKRVILADANLDKVLSAYNKHRDKPIREQAENIIHLFTLTNLGAPAAFKYFDTTIDRKRYTSTKEVLDATLIHQSITGLYETRIDLSQLGGDGGGSSGGGEAAAKGGTLQLDDEYRLYSPLVKPDQNIQFWLEQFPQAWAETAGMGLAKQVPPQVIQLKASATPVSVRQYPLSKEAQEGIRPHVQRLIQQGILVPVQSPWNTPLLPVRKPGTNDYRPVQDLREVNKRVQDIHPTVPNPYNLLCALPPQRSWYTVLDLKDAFFCLRLHPTSQPLFAFEWRDPGTGRTGQLTWTRLPQGFKNSPTIFNEALHRDLANFRIQHPQVTLLQYVDDLLLAGATKQDCLEGTKALLLELSDLGYRASAKKAQICRREVTYLGYSLRDGQRWLTEARKKTVVQIPAPTTAKQVREFLGTAGFCRLWIPGFATLAAPLYPLTKPKGEFSWAPEHQKAFDAIKKALLSAPALALPDVTKPFTLYVDERKGVARGVLTQTLGPWRRPVAYLSKKLDPVASGWPVCLKAIAAVAILVKDADKLTLGQNITVIAPHALENIVRQPPDRWMTNARMTHYQSLLLTERVTFAPPAALNPATLLPEETDEPVTHDCHQLLIEETGVRKDLTDIPLTGEVLTWFTDGSSYVVEGKRMAGAAVVDGTRTIWASSLPEGTSAQKAELMALTQALRLAEGKSINIYTDSRYAFATAHVHGAIYKQRGWLTSAGREIKNKEEILSLLEALHLPKRLAIIHCPGHQKAKDPISRGNQMADRVAKQAAQGVNLLAGKRTADGSEFEKRTADGSEFESPKKKAKVE

SEQ ID NO: 318 - protein, 2090 aa, synthetic construct; identical to SEQ ID NO: 121
  source 1..2090: note = Description of Artificial Sequence: Synthetic polypeptide

SEQ ID NO: 319 - protein, 2090 aa, synthetic construct; identical to SEQ ID NO: 124
  source 1..2090: note = Description of Artificial Sequence: Synthetic polypeptide

SEQ ID NO: 320 - protein, 2088 aa, synthetic construct
  source 1..2088: note = Description of Artificial Sequence: Synthetic polypeptide
MPAAKRVKLDGGDKKYSIGLDIGTNSVGWAVITDEYKVPSKKFKVLGNTDRHSIKKNLIGALLFDSGETAEATRLKRTARRRYTRRKNRICYLQEIFSNEMAKVDDSFFHRLEESFLVEEDKKHERHPIFGNIVDEVAYHEKYPTIYHLRKKLVDSTDKADLRLIYLALAHMIKFRGHFLIEGDLNPDNSDVDKLFIQLVQTYNQLFEENPINASGVDAKAILSARLSKSRRLENLIAQLPGEKKNGLFGNLIALSLGLTPNFKSNFDLAEDAKLQLSKDTYDDDLDNLLAQIGDQYADLFLAAKNLSDAILLSDILRVNTEITKAPLSASMIKRYDEHHQDLTLLKALVRQQLPEKYKEIFFDQSKNGYAGYIDGGASQEEFYKFIKPILEKMDGTEELLVKLNREDLLRKQRTFDNGSIPHQIHLGELHAILRRQEDFYPFLKDNREKIEKILTFRIPYYVGPLARGNSRFAWMTRKSEETITPWNFEEVVDKGASAQSFIERMTNFDKNLPNEKVLPKHSLLYEYFTVYNELTKVKYVTEGMRKPAFLSGEQKKAIVDLLFKTNRKVTVKQLKEDYFKKIECFDSVEISGVEDRFNASLGTYHDLLKIIKDKDFLDNEENEDILEDIVLTLTLFEDREMIEERLKTYAHLFDDKVMKQLKRRRYTGWGRLSRKLINGIRDKQSGKTILDFLKSDGFANRNFMQLIHDDSLTFKEDIQKAQVSGQGDSLHEHIANLAGSPAIKKGILQTVKVVDELVKVMGRHKPENIVIEMARENQTTQKGQKNSRERMKRIEEGIKELGSQILKEHPVENTQLQNEKLYLYYLQNGRDMYVDQELDINRLSDYDVDHIVPQSFLKDDSIDNKVLTRSDKARGKSDNVPSEEVVKKMKNYWRQLLNAKLITQRKFDNLTKAERGGLSELDKAGFIKRQLVETRQITKHVAQILDSRMNTKYDENDKLIREVKVITLKSKLVSDFRKDFQFYKVREINNYHHAHDAYLNAVVGTALIKKYPKLESEFVYGDYKVYDVRKMIAKSEQEIGKATAKYFFYSNIMNFFKTEITLANGEIRKRPLIETNGETGEIVWDKGRDFATVRKVLSMPQVNIVKKTEVQTGGFSKESILPKRNSDKLIARKKDWDPKKYGGFDSPTVAYSVLVVAKVEKGKSKKLKSVKELLGITIMERSSFEKNPIDFLEAKGYKEVKKDLIIKLPKYSLFELENGRKRMLASAGELQKGNELALPSKYVNFLYLASHYEKLKGSPEDNEQKQLFVEQHKHYLDEIIEQISEFSKRVILADANLDKVLSAYNKHRDKPIREQAENIIHLFTLTNLGAPAAFKYFDTTIDRKRYTSTKEVLDATLIHQSITGLYETRIDLSQLGGDGGGGGGGSGSSGGTLQLDDEYRLYSPLVKPDQNIQFWLEQFPQAWAETAGMGLAKQVPPQVIQLKASATPVSVRQYPLSKEAQEGIRPHVQRLIQQGILVPVQSPWNTPLLPVRKPGTNDYRPVQDLREVNKRVQDIHPTVPNPYNLLCALPPQRSWYTVLDLKDAFFCLRLHPTSQPLFAFEWRDPGTGRTGQLTWTRLPQGFKNSPTIFNEALHRDLANFRIQHPQVTLLQYVDDLLLAGATKQDCLEGTKALLLELSDLGYRASAKKAQICRREVTYLGYSLRDGQRWLTEARKKTVVQIPAPTTAKQVREFLGTAGFCRLWIPGFATLAAPLYPLTKPKGEFSWAPEHQKAFDAIKKALLSAPALALPDVTKPFTLYVDERKGVARGVLTQTLGPWRRPVAYLSKKLDPVASGWPVCLKAIAAVAILVKDADKLTLGQNITVIAPHALENIVRQPPDRWMTNARMTHYQSLLLTERVTFAPPAALNPATLLPEETDEPVTHDCHQLLIEETGVRKDLTDIPLTGEVLTWFTDGSSYVVEGKRMAGAAVVDGTRTIWASSLPEGTSAQKAELMALTQALRLAEGKSINIYTDSRYAFATAHVHGAIYKQRGWLTSAGREIKNKEEILSLLEALHLPKRLAIIHCPGHQKAKDPISRGNQMADRVAKQAAQGVNLLAGKRTADGSEFEKRTADGSEFESPKKKAKVE

SEQ ID NO: 321 - protein, 2090 aa, synthetic construct; identical to SEQ ID NO: 138
  source 1..2090: note = Description of Artificial Sequence: Synthetic polypeptide

SEQ ID NO: 322 - protein, 2090 aa, synthetic construct
  source 1..2090: note = Description of Artificial Sequence: Synthetic polypeptide
MPAAKRVKLDGGDKKYSIGLDIGTNSVGWAVITDEYKVPSKKFKVLGNTDRHSIKKNLIGALLFDSGETAEATRLKRTARRRYTRRKNRICYLQEIFSNEMAKVDDSFFHRLEESFLVEEDKKHERHPIFGNIVDEVAYHEKYPTIYHLRKKLVDSTDKADLRLIYLALAHMIKFRGHFLIEGDLNPDNSDVDKLFIQLVQTYNQLFEENPINASGVDAKAILSARLSKSRRLENLIAQLPGEKKNGLFGNLIALSLGLTPNFKSNFDLAEDAKLQLSKDTYDDDLDNLLAQIGDQYADLFLAAKNLSDAILLSDILRVNTEITKAPLSASMIKRYDEHHQDLTLLKALVRQQLPEKYKEIFFDQSKNGYAGYIDGGASQEEFYKFIKPILEKMDGTEELLVKLNREDLLRKQRTFDNGSIPHQIHLGELHAILRRQEDFYPFLKDNREKIEKILTFRIPYYVGPLARGNSRFAWMTRKSEETITPWNFEEVVDKGASAQSFIERMTNFDKNLPNEKVLPKHSLLYEYFTVYNELTKVKYVTEGMRKPAFLSGEQKKAIVDLLFKTNRKVTVKQLKEDYFKKIECFDSVEISGVEDRFNASLGTYHDLLKIIKDKDFLDNEENEDILEDIVLTLTLFEDREMIEERLKTYAHLFDDKVMKQLKRRRYTGWGRLSRKLINGIRDKQSGKTILDFLKSDGFANRNFMQLIHDDSLTFKEDIQKAQVSGQGDSLHEHIANLAGSPAIKKGILQTVKVVDELVKVMGRHKPENIVIEMARENQTTQKGQKNSRERMKRIEEGIKELGSQILKEHPVENTQLQNEKLYLYYLQNGRDMYVDQELDINRLSDYDVDHIVPQSFLKDDSIDNKVLTRSDKARGKSDNVPSEEVVKKMKNYWRQLLNAKLITQRKFDNLTKAERGGLSELDKAGFIKRQLVETRQITKHVAQILDSRMNTKYDENDKLIREVKVITLKSKLVSDFRKDFQFYKVREINNYHHAHDAYLNAVVGTALIKKYPKLESEFVYGDYKVYDVRKMIAKSEQEIGKATAKYFFYSNIMNFFKTEITLANGEIRKRPLIETNGETGEIVWDKGRDFATVRKVLSMPQVNIVKKTEVQTGGFSKESILPKRNSDKLIARKKDWDPKKYGGFDSPTVAYSVLVVAKVEKGKSKKLKSVKELLGITIMERSSFEKNPIDFLEAKGYKEVKKDLIIKLPKYSLFELENGRKRMLASAGELQKGNELALPSKYVNFLYLASHYEKLKGSPEDNEQKQLFVEQHKHYLDEIIEQISEFSKRVILADANLDKVLSAYNKHRDKPIREQAENIIHLFTLTNLGAPAAFKYFDTTIDRKRYTSTKEVLDATLIHQSITGLYETRIDLSQLGGDGGGGGEAAAKGGSGGTLQLDDEYRLYSPLVKPDQNIQFWLEQFPQAWAETAGMGLAKQVPPQVIQLKASATPVSVRQYPLSKEAQEGIRPHVQRLIQQGILVPVQSPWNTPLLPVRKPGTNDYRPVQDLREVNKRVQDIHPTVPNPYNLLCALPPQRSWYTVLDLKDAFFCLRLHPTSQPLFAFEWRDPGTGRTGQLTWTRLPQGFKNSPTIFNEALHRDLANFRIQHPQVTLLQYVDDLLLAGATKQDCLEGTKALLLELSDLGYRASAKKAQICRREVTYLGYSLRDGQRWLTEARKKTVVQIPAPTTAKQVREFLGTAGFCRLWIPGFATLAAPLYPLTKPKGEFSWAPEHQKAFDAIKKALLSAPALALPDVTKPFTLYVDERKGVARGVLTQTLGPWRRPVAYLSKKLDPVASGWPVCLKAIAAVAILVKDADKLTLGQNITVIAPHALENIVRQPPDRWMTNARMTHYQSLLLTERVTFAPPAALNPATLLPEETDEPVTHDCHQLLIEETGVRKDLTDIPLTGEVLTWFTDGSSYVVEGKRMAGAAVVDGTRTIWASSLPEGTSAQKAELMALTQALRLAEGKSINIYTDSRYAFATAHVHGAIYKQRGWLTSAGREIKNKEEILSLLEALHLPKRLAIIHCPGHQKAKDPISRGNQMADRVAKQAAQGVNLLAGKRTADGSEFEKRTADGSEFESPKKKAKVE

SEQ ID NO: 323 - protein, 2090 aa, synthetic construct
  source 1..2090: note = Description of Artificial Sequence: Synthetic polypeptide
MPAAKRVKLDGGDKKYSIGLDIGTNSVGWAVITDEYKVPSKKFKVLGNTDRHSIKKNLIGALLFDSGETAEATRLKRTARRRYTRRKNRICYLQEIFSNEMAKVDDSFFHRLEESFLVEEDKKHERHPIFGNIVDEVAYHEKYPTIYHLRKKLVDSTDKADLRLIYLALAHMIKFRGHFLIEGDLNPDNSDVDKLFIQLVQTYNQLFEENPINASGVDAKAILSARLSKSRRLENLIAQLPGEKKNGLFGNLIALSLGLTPNFKSNFDLAEDAKLQLSKDTYDDDLDNLLAQIGDQYADLFLAAKNLSDAILLSDILRVNTEITKAPLSASMIKRYDEHHQDLTLLKALVRQQLPEKYKEIFFDQSKNGYAGYIDGGASQEEFYKFIKPILEKMDGTEELLVKLNREDLLRKQRTFDNGSIPHQIHLGELHAILRRQEDFYPFLKDNREKIEKILTFRIPYYVGPLARGNSRFAWMTRKSEETITPWNFEEVVDKGASAQSFIERMTNFDKNLPNEKVLPKHSLLYEYFTVYNELTKVKYVTEGMRKPAFLSGEQKKAIVDLLFKTNRKVTVKQLKEDYFKKIECFDSVEISGVEDRFNASLGTYHDLLKIIKDKDFLDNEENEDILEDIVLTLTLFEDREMIEERLKTYAHLFDDKVMKQLKRRRYTGWGRLSRKLINGIRDKQSGKTILDFLKSDGFANRNFMQLIHDDSLTFKEDIQKAQVSGQGDSLHEHIANLAGSPAIKKGILQTVKVVDELVKVMGRHKPENIVIEMARENQTTQKGQKNSRERMKRIEEGIKELGSQILKEHPVENTQLQNEKLYLYYLQNGRDMYVDQELDINRLSDYDVDHIVPQSFLKDDSIDNKVLTRSDKARGKSDNVPSEEVVKKMKNYWRQLLNAKLITQRKFDNLTKAERGGLSELDKAGFIKRQLVETRQITKHVAQILDSRMNTKYDENDKLIREVKVITLKSKLVSDFRKDFQFYKVREINNYHHAHDAYLNAVVGTALIKKYPKLESEFVYGDYKVYDVRKMIAKSEQEIGKATAKYFFYSNIMNFFKTEITLANGEIRKRPLIETNGETGEIVWDKGRDFATVRKVLSMPQVNIVKKTEVQTGGFSKESILPKRNSDKLIARKKDWDPKKYGGFDSPTVAYSVLVVAKVEKGKSKKLKSVKELLGITIMERSSFEKNPIDFLEAKGYKEVKKDLIIKLPKYSLFELENGRKRMLASAGELQKGNELALPSKYVNFLYLASHYEKLKGSPEDNEQKQLFVEQHKHYLDEIIEQISEFSKRVILADANLDKVLSAYNKHRDKPIREQAENIIHLFTLTNLGAPAAFKYFDTTIDRKRYTSTKEVLDATLIHQSITGLYETRIDLSQLGGDGGGGSEAAAKGSSGGTLQLDDEYRLYSPLVKPDQNIQFWLEQFPQAWAETAGMGLAKQVPPQVIQLKASATPVSVRQYPLSKEAQEGIRPHVQRLIQQGILVPVQSPWNTPLLPVRKPGTNDYRPVQDLREVNKRVQDIHPTVPNPYNLLCALPPQRSWYTVLDLKDAFFCLRLHPTSQPLFAFEWRDPGTGRTGQLTWTRLPQGFKNSPTIFNEALHRDLANFRIQHPQVTLLQYVDDLLLAGATKQDCLEGTKALLLELSDLGYRASAKKAQICRREVTYLGYSLRDGQRWLTEARKKTVVQIPAPTTAKQVREFLGTAGFCRLWIPGFATLAAPLYPLTKPKGEFSWAPEHQKAFDAIKKALLSAPALALPDVTKPFTLYVDERKGVARGVLTQTLGPWRRPVAYLSKKLDPVASGWPVCLKAIAAVAILVKDADKLTLGQNITVIAPHALENIVRQPPDRWMTNARMTHYQSLLLTERVTFAPPAALNPATLLPEETDEPVTHDCHQLLIEETGVRKDLTDIPLTGEVLTWFTDGSSYVVEGKRMAGAAVVDGTRTIWASSLPEGTSAQKAELMALTQALRLAEGKSINIYTDSRYAFATAHVHGAIYKQRGWLTSAGREIKNKEEILSLLEALHLPKRLAIIHCPGHQKAKDPISRGNQMADRVAKQAAQGVNLLAGKRTADGSEFEKRTADGSEFESPKKKAKVE

SEQ ID NO: 324 - protein, 2090 aa, synthetic construct
  source 1..2090: note = Description of Artificial Sequence: Synthetic polypeptide
MPAAKRVKLDGGDKKYSIGLDIGTNSVGWAVITDEYKVPSKKFKVLGNTDRHSIKKNLIGALLFDSGETAEATRLKRTARRRYTRRKNRICYLQEIFSNEMAKVDDSFFHRLEESFLVEEDKKHERHPIFGNIVDEVAYHEKYPTIYHLRKKLVDSTDKADLRLIYLALAHMIKFRGHFLIEGDLNPDNSDVDKLFIQLVQTYNQLFEENPINASGVDAKAILSARLSKSRRLENLIAQLPGEKKNGLFGNLIALSLGLTPNFKSNFDLAEDAKLQLSKDTYDDDLDNLLAQIGDQYADLFLAAKNLSDAILLSDILRVNTEITKAPLSASMIKRYDEHHQDLTLLKALVRQQLPEKYKEIFFDQSKNGYAGYIDGGASQEEFYKFIKPILEKMDGTEELLVKLNREDLLRKQRTFDNGSIPHQIHLGELHAILRRQEDFYPFLKDNREKIEKILTFRIPYYVGPLARGNSRFAWMTRKSEETITPWNFEEVVDKGASAQSFIERMTNFDKNLPNEKVLPKHSLLYEYFTVYNELTKVKYVTEGMRKPAFLSGEQKKAIVDLLFKTNRKVTVKQLKEDYFKKIECFDSVEISGVEDRFNASLGTYHDLLKIIKDKDFLDNEENEDILEDIVLTLTLFEDREMIEERLKTYAHLFDDKVMKQLKRRRYTGWGRLSRKLINGIRDKQSGKTILDFLKSDGFANRNFMQLIHDDSLTFKEDIQKAQVSGQGDSLHEHIANLAGSPAIKKGILQTVKVVDELVKVMGRHKPENIVIEMARENQTTQKGQKNSRERMKRIEEGIKELGSQILKEHPVENTQLQNEKLYLYYLQNGRDMYVDQELDINRLSDYDVDHIVPQSFLKDDSIDNKVLTRSDKARGKSDNVPSEEVVKKMKNYWRQLLNAKLITQRKFDNLTKAERGGLSELDKAGFIKRQLVETRQITKHVAQILDSRMNTKYDENDKLIREVKVITLKSKLVSDFRKDFQFYKVREINNYHHAHDAYLNAVVGTALIKKYPKLESEFVYGDYKVYDVRKMIAKSEQEIGKATAKYFFYSNIMNFFKTEITLANGEIRKRPLIETNGETGEIVWDKGRDFATVRKVLSMPQVNIVKKTEVQTGGFSKESILPKRNSDKLIARKKDWDPKKYGGFDSPTVAYSVLVVAKVEKGKSKKLKSVKELLGITIMERSSFEKNPIDFLEAKGYKEVKKDLIIKLPKYSLFELENGRKRMLASAGELQKGNELALPSKYVNFLYLASHYEKLKGSPEDNEQKQLFVEQHKHYLDEIIEQISEFSKRVILADANLDKVLSAYNKHRDKPIREQAENIIHLFTLTNLGAPAAFKYFDTTIDRKRYTSTKEVLDATLIHQSITGLYETRIDLSQLGGDGGGGGEAAAKPAPGGTLQLDDEYRLYSPLVKPDQNIQFWLEQFPQAWAETAGMGLAKQVPPQVIQLKASATPVSVRQYPLSKEAQEGIRPHVQRLIQQGILVPVQSPWNTPLLPVRKPGTNDYRPVQDLREVNKRVQDIHPTVPNPYNLLCALPPQRSWYTVLDLKDAFFCLRLHPTSQPLFAFEWRDPGTGRTGQLTWTRLPQGFKNSPTIFNEALHRDLANFRIQHPQVTLLQYVDDLLLAGATKQDCLEGTKALLLELSDLGYRASAKKAQICRREVTYLGYSLRDGQRWLTEARKKTVVQIPAPTTAKQVREFLGTAGFCRLWIPGFATLAAPLYPLTKPKGEFSWAPEHQKAFDAIKKALLSAPALALPDVTKPFTLYVDERKGVARGVLTQTLGPWRRPVAYLSKKLDPVASGWPVCLKAIAAVAILVKDADKLTLGQNITVIAPHALENIVRQPPDRWMTNARMTHYQSLLLTERVTFAPPAALNPATLLPEETDEPVTHDCHQLLIEETGVRKDLTDIPLTGEVLTWFTDGSSYVVEGKRMAGAAVVDGTRTIWASSLPEGTSAQKAELMALTQALRLAEGKSINIYTDSRYAFATAHVHGAIYKQRGWLTSAGREIKNKEEILSLLEALHLPKRLAIIHCPGHQKAKDPISRGNQMADRVAKQAAQGVNLLAGKRTADGSEFEKRTADGSEFESPKKKAKVE

SEQ ID NO: 325 - protein, 2087 aa, synthetic construct; identical to SEQ ID NO: 128
  source 1..2087: note = Description of Artificial Sequence: Synthetic polypeptide

SEQ ID NO: 326 - protein, 2082 aa, synthetic construct
  source 1..2082: note = Description of Artificial Sequence: Synthetic polypeptide
MPAAKRVKLDGGDKKYSIGLDIGTNSVGWAVITDEYKVPSKKFKVLGNTDRHSIKKNLIGALLFDSGETAEATRLKRTARRRYTRRKNRICYLQEIFSNEMAKVDDSFFHRLEESFLVEEDKKHERHPIFGNIVDEVAYHEKYPTIYHLRKKLVDSTDKADLRLIYLALAHMIKFRGHFLIEGDLNPDNSDVDKLFIQLVQTYNQLFEENPINASGVDAKAILSARLSKSRRLENLIAQLPGEKKNGLFGNLIALSLGLTPNFKSNFDLAEDAKLQLSKDTYDDDLDNLLAQIGDQYADLFLAAKNLSDAILLSDILRVNTEITKAPLSASMIKRYDEHHQDLTLLKALVRQQLPEKYKEIFFDQSKNGYAGYIDGGASQEEFYKFIKPILEKMDGTEELLVKLNREDLLRKQRTFDNGSIPHQIHLGELHAILRRQEDFYPFLKDNREKIEKILTFRIPYYVGPLARGNSRFAWMTRKSEETITPWNFEEVVDKGASAQSFIERMTNFDKNLPNEKVLPKHSLLYEYFTVYNELTKVKYVTEGMRKPAFLSGEQKKAIVDLLFKTNRKVTVKQLKEDYFKKIECFDSVEISGVEDRFNASLGTYHDLLKIIKDKDFLDNEENEDILEDIVLTLTLFEDREMIEERLKTYAHLFDDKVMKQLKRRRYTGWGRLSRKLINGIRDKQSGKTILDFLKSDGFANRNFMQLIHDDSLTFKEDIQKAQVSGQGDSLHEHIANLAGSPAIKKGILQTVKVVDELVKVMGRHKPENIVIEMARENQTTQKGQKNSRERMKRIEEGIKELGSQILKEHPVENTQLQNEKLYLYYLQNGRDMYVDQELDINRLSDYDVDHIVPQSFLKDDSIDNKVLTRSDKARGKSDNVPSEEVVKKMKNYWRQLLNAKLITQRKFDNLTKAERGGLSELDKAGFIKRQLVETRQITKHVAQILDSRMNTKYDENDKLIREVKVITLKSKLVSDFRKDFQFYKVREINNYHHAHDAYLNAVVGTALIKKYPKLESEFVYGDYKVYDVRKMIAKSEQEIGKATAKYFFYSNIMNFFKTEITLANGEIRKRPLIETNGETGEIVWDKGRDFATVRKVLSMPQVNIVKKTEVQTGGFSKESILPKRNSDKLIARKKDWDPKKYGGFDSPTVAYSVLVVAKVEKGKSKKLKSVKELLGITIMERSSFEKNPIDFLEAKGYKEVKKDLIIKLPKYSLFELENGRKRMLASAGELQKGNELALPSKYVNFLYLASHYEKLKGSPEDNEQKQLFVEQHKHYLDEIIEQISEFSKRVILADANLDKVLSAYNKHRDKPIREQAENIIHLFTLTNLGAPAAFKYFDTTIDRKRYTSTKEVLDATLIHQSITGLYETRIDLSQLGGDGGGGSGGTLQLDDEYRLYSPLVKPDQNIQFWLEQFPQAWAETAGMGLAKQVPPQVIQLKASATPVSVRQYPLSKEAQEGIRPHVQRLIQQGILVPVQSPWNTPLLPVRKPGTNDYRPVQDLREVNKRVQDIHPTVPNPYNLLCALPPQRSWYTVLDLKDAFFCLRLHPTSQPLFAFEWRDPGTGRTGQLTWTRLPQGFKNSPTIFNEALHRDLANFRIQHPQVTLLQYVDDLLLAGATKQDCLEGTKALLLELSDLGYRASAKKAQICRREVTYLGYSLRDGQRWLTEARKKTVVQIPAPTTAKQVREFLGTAGFCRLWIPGFATLAAPLYPLTKPKGEFSWAPEHQKAFDAIKKALLSAPALALPDVTKPFTLYVDERKGVARGVLTQTLGPWRRPVAYLSKKLDPVASGWPVCLKAIAAVAILVKDADKLTLGQNITVIAPHALENIVRQPPDRWMTNARMTHYQSLLLTERVTFAPPAALNPATLLPEETDEPVTHDCHQLLIEETGVRKDLTDIPLTGEVLTWFTDGSSYVVEGKRMAGAAVVDGTRTIWASSLPEGTSAQKAELMALTQALRLAEGKSINIYTDSRYAFATAHVHGAIYKQRGWLTSAGREIKNKEEILSLLEALHLPKRLAIIHCPGHQKAKDPISRGNQMADRVAKQAAQGVNLLAGKRTADGSEFEKRTADGSEFESPKKKAKVE

SEQ ID NO: 327 - protein, 2090 aa, synthetic construct; identical to SEQ ID NO: 132
  source 1..2090: note = Description of Artificial Sequence: Synthetic polypeptide

SEQ ID NO: 328 - protein, 2095 aa, synthetic construct; identical to SEQ ID NO: 122
  source 1..2095: note = Description of Artificial Sequence: Synthetic polypeptide

SEQ ID NO: 329 - protein, 2085 aa, synthetic construct; identical to SEQ ID NO: 143
  source 1..2085: note = Description of Artificial Sequence: Synthetic polypeptide

SEQ ID NO: 330 - protein, 2090 aa, synthetic construct; identical to SEQ ID NO: 160
  source 1..2090: note = Description of Artificial Sequence: Synthetic polypeptide

SEQ ID NO: 331 - protein, 2090 aa, synthetic construct
  source 1..2090: note = Description of Artificial Sequence: Synthetic polypeptide
MPAAKRVKLDGGDKKYSIGLDIGTNSVGWAVITDEYKVPSKKFKVLGNTDRHSIKKNLIGALLFDSGETAEATRLKRTARRRYTRRKNRICYLQEIFSNEMAKVDDSFFHRLEESFLVEEDKKHERHPIFGNIVDEVAYHEKYPTIYHLRKKLVDSTDKADLRLIYLALAHMIKFRGHFLIEGDLNPDNSDVDKLFIQLVQTYNQLFEENPINASGVDAKAILSARLSKSRRLENLIAQLPGEKKNGLFGNLIALSLGLTPNFKSNFDLAEDAKLQLSKDTYDDDLDNLLAQIGDQYADLFLAAKNLSDAILLSDILRVNTEITKAPLSASMIKRYDEHHQDLTLLKALVRQQLPEKYKEIFFDQSKNGYAGYIDGGASQEEFYKFIKPILEKMDGTEELLVKLNREDLLRKQRTFDNGSIPHQIHLGELHAILRRQEDFYPFLKDNREKIEKILTFRIPYYVGPLARGNSRFAWMTRKSEETITPWNFEEVVDKGASAQSFIERMTNFDKNLPNEKVLPKHSLLYEYFTVYNELTKVKYVTEGMRKPAFLSGEQKKAIVDLLFKTNRKVTVKQLKEDYFKKIECFDSVEISGVEDRFNASLGTYHDLLKIIKDKDFLDNEENEDILEDIVLTLTLFEDREMIEERLKTYAHLFDDKVMKQLKRRRYTGWGRLSRKLINGIRDKQSGKTILDFLKSDGFANRNFMQLIHDDSLTFKEDIQKAQVSGQGDSLHEHIANLAGSPAIKKGILQTVKVVDELVKVMGRHKPENIVIEMARENQTTQKGQKNSRERMKRIEEGIKELGSQILKEHPVENTQLQNEKLYLYYLQNGRDMYVDQELDINRLSDYDVDHIVPQSFLKDDSIDNKVLTRSDKARGKSDNVPSEEVVKKMKNYWRQLLNAKLITQRKFDNLTKAERGGLSELDKAGFIKRQLVETRQITKHVAQILDSRMNTKYDENDKLIREVKVITLKSKLVSDFRKDFQFYKVREINNYHHAHDAYLNAVVGTALIKKYPKLESEFVYGDYKVYDVRKMIAKSEQEIGKATAKYFFYSNIMNFFKTEITLANGEIRKRPLIETNGETGEIVWDKGRDFATVRKVLSMPQVNIVKKTEVQTGGFSKESILPKRNSDKLIARKKDWDPKKYGGFDSPTVAYSVLVVAKVEKGKSKKLKSVKELLGITIMERSSFEKNPIDFLEAKGYKEVKKDLIIKLPKYSLFELENGRKRMLASAGELQKGNELALPSKYVNFLYLASHYEKLKGSPEDNEQKQLFVEQHKHYLDEIIEQISEFSKRVILADANLDKVLSAYNKHRDKPIREQAENIIHLFTLTNLGAPAAFKYFDTTIDRKRYTSTKEVLDATLIHQSITGLYETRIDLSQLGGDGGPAPEAAAKGGSGGTLQLDDEYRLYSPLVKPDQNIQFWLEQFPQAWAETAGMGLAKQVPPQVIQLKASATPVSVRQYPLSKEAQEGIRPHVQRLIQQGILVPVQSPWNTPLLPVRKPGTNDYRPVQDLREVNKRVQDIHPTVPNPYNLLCALPPQRSWYTVLDLKDAFFCLRLHPTSQPLFAFEWRDPGTGRTGQLTWTRLPQGFKNSPTIFNEALHRDLANFRIQHPQVTLLQYVDDLLLAGATKQDCLEGTKALLLELSDLGYRASAKKAQICRREVTYLGYSLRDGQRWLTEARKKTVVQIPAPTTAKQVREFLGTAGFCRLWIPGFATLAAPLYPLTKPKGEFSWAPEHQKAFDAIKKALLSAPALALPDVTKPFTLYVDERKGVARGVLTQTLGPWRRPVAYLSKKLDPVASGWPVCLKAIAAVAILVKDADKLTLGQNITVIAPHALENIVRQPPDRWMTNARMTHYQSLLLTERVTFAPPAALNPATLLPEETDEPVTHDCHQLLIEETGVRKDLTDIPLTGEVLTWFTDGSSYVVEGKRMAGAAVVDGTRTIWASSLPEGTSAQKAELMALTQALRLAEGKSINIYTDSRYAFATAHVHGAIYKQRGWLTSAGREIKNKEEILSLLEALHLPKRLAIIHCPGHQKAKDPISRGNQMADRVAKQAAQGVNLLAGKRTADGSEFEKRTADGSEFESPKKKAKVE

SEQ ID NO: 332 - protein, 2085 aa, synthetic construct
  source 1..2085: note = Description of Artificial Sequence: Synthetic polypeptide
MPAAKRVKLDGGDKKYSIGLDIGTNSVGWAVITDEYKVPSKKFKVLGNTDRHSIKKNLIGALLFDSGETAEATRLKRTARRRYTRRKNRICYLQEIFSNEMAKVDDSFFHRLEESFLVEEDKKHERHPIFGNIVDEVAYHEKYPTIYHLRKKLVDSTDKADLRLIYLALAHMIKFRGHFLIEGDLNPDNSDVDKLFIQLVQTYNQLFEENPINASGVDAKAILSARLSKSRRLENLIAQLPGEKKNGLFGNLIALSLGLTPNFKSNFDLAEDAKLQLSKDTYDDDLDNLLAQIGDQYADLFLAAKNLSDAILLSDILRVNTEITKAPLSASMIKRYDEHHQDLTLLKALVRQQLPEKYKEIFFDQSKNGYAGYIDGGASQEEFYKFIKPILEKMDGTEELLVKLNREDLLRKQRTFDNGSIPHQIHLGELHAILRRQEDFYPFLKDNREKIEKILTFRIPYYVGPLARGNSRFAWMTRKSEETITPWNFEEVVDKGASAQSFIERMTNFDKNLPNEKVLPKHSLLYEYFTVYNELTKVKYVTEGMRKPAFLSGEQKKAIVDLLFKTNRKVTVKQLKEDYFKKIECFDSVEISGVEDRFNASLGTYHDLLKIIKDKDFLDNEENEDILEDIVLTLTLFEDREMIEERLKTYAHLFDDKVMKQLKRRRYTGWGRLSRKLINGIRDKQSGKTILDFLKSDGFANRNFMQLIHDDSLTFKEDIQKAQVSGQGDSLHEHIANLAGSPAIKKGILQTVKVVDELVKVMGRHKPENIVIEMARENQTTQKGQKNSRERMKRIEEGIKELGSQILKEHPVENTQLQNEKLYLYYLQNGRDMYVDQELDINRLSDYDVDHIVPQSFLKDDSIDNKVLTRSDKARGKSDNVPSEEVVKKMKNYWRQLLNAKLITQRKFDNLTKAERGGLSELDKAGFIKRQLVETRQITKHVAQILDSRMNTKYDENDKLIREVKVITLKSKLVSDFRKDFQFYKVREINNYHHAHDAYLNAVVGTALIKKYPKLESEFVYGDYKVYDVRKMIAKSEQEIGKATAKYFFYSNIMNFFKTEITLANGEIRKRPLIETNGETGEIVWDKGRDFATVRKVLSMPQVNIVKKTEVQTGGFSKESILPKRNSDKLIARKKDWDPKKYGGFDSPTVAYSVLVVAKVEKGKSKKLKSVKELLGITIMERSSFEKNPIDFLEAKGYKEVKKDLIIKLPKYSLFELENGRKRMLASAGELQKGNELALPSKYVNFLYLASHYEKLKGSPEDNEQKQLFVEQHKHYLDEIIEQISEFSKRVILADANLDKVLSAYNKHRDKPIREQAENIIHLFTLTNLGAPAAFKYFDTTIDRKRYTSTKEVLDATLIHQSITGLYETRIDLSQLGGDGGPAPGGGGGTLQLDDEYRLYSPLVKPDQNIQFWLEQFPQAWAETAGMGLAKQVPPQVIQLKASATPVSVRQYPLSKEAQEGIRPHVQRLIQQGILVPVQSPWNTPLLPVRKPGTNDYRPVQDLREVNKRVQDIHPTVPNPYNLLCALPPQRSWYTVLDLKDAFFCLRLHPTSQPLFAFEWRDPGTGRTGQLTWTRLPQGFKNSPTIFNEALHRDLANFRIQHPQVTLLQYVDDLLLAGATKQDCLEGTKALLLELSDLGYRASAKKAQICRREVTYLGYSLRDGQRWLTEARKKTVVQIPAPTTAKQVREFLGTAGFCRLWIPGFATLAAPLYPLTKPKGEFSWAPEHQKAFDAIKKALLSAPALALPDVTKPFTLYVDERKGVARGVLTQTLGPWRRPVAYLSKKLDPVASGWPVCLKAIAAVAILVKDADKLTLGQNITVIAPHALENIVRQPPDRWMTNARMTHYQSLLLTERVTFAPPAALNPATLLPEETDEPVTHDCHQLLIEETGVRKDLTDIPLTGEVLTWFTDGSSYVVEGKRMAGAAVVDGTRTIWASSLPEGTSAQKAELMALTQALRLAEGKSINIYTDSRYAFATAHVHGAIYKQRGWLTSAGREIKNKEEILSLLEALHLPKRLAIIHCPGHQKAKDPISRGNQMADRVAKQAAQGVNLLAGKRTADGSEFEKRTADGSEFESPKKKAKVE

SEQ ID NO: 333 - protein, 2083 aa, synthetic construct; identical to SEQ ID NO: 149
  source 1..2083: note = Description of Artificial Sequence: Synthetic polypeptide

SEQ ID NO: 334 - protein, 2090 aa, synthetic construct; identical to SEQ ID NO: 146
  source 1..2090: note = Description of Artificial Sequence: Synthetic polypeptide

SEQ ID NO: 335 - protein, 2087 aa, synthetic construct; identical to SEQ ID NO: 158
  source 1..2087: note = Description of Artificial Sequence: Synthetic polypeptide

SEQ ID NO: 336 - protein, 2088 aa, synthetic construct
  source 1..2088: note = Description of Artificial Sequence: Synthetic polypeptide
MPAAKRVKLDGGDKKYSIGLDIGTNSVGWAVITDEYKVPSKKFKVLGNTDRHSIKKNLIGALLFDSGETAEATRLKRTARRRYTRRKNRICYLQEIFSNEMAKVDDSFFHRLEESFLVEEDKKHERHPIFGNIVDEVAYHEKYPTIYHLRKKLVDSTDKADLRLIYLALAHMIKFRGHFLIEGDLNPDNSDVDKLFIQLVQTYNQLFEENPINASGVDAKAILSARLSKSRRLENLIAQLPGEKKNGLFGNLIALSLGLTPNFKSNFDLAEDAKLQLSKDTYDDDLDNLLAQIGDQYADLFLAAKNLSDAILLSDILRVNTEITKAPLSASMIKRYDEHHQDLTLLKALVRQQLPEKYKEIFFDQSKNGYAGYIDGGASQEEFYKFIKPILEKMDGTEELLVKLNREDLLRKQRTFDNGSIPHQIHLGELHAILRRQEDFYPFLKDNREKIEKILTFRIPYYVGPLARGNSRFAWMTRKSEETITPWNFEEVVDKGASAQSFIERMTNFDKNLPNEKVLPKHSLLYEYFTVYNELTKVKYVTEGMRKPAFLSGEQKKAIVDLLFKTNRKVTVKQLKEDYFKKIECFDSVEISGVEDRFNASLGTYHDLLKIIKDKDFLDNEENEDILEDIVLTLTLFEDREMIEERLKTYAHLFDDKVMKQLKRRRYTGWGRLSRKLINGIRDKQSGKTILDFLKSDGFANRNFMQLIHDDSLTFKEDIQKAQVSGQGDSLHEHIANLAGSPAIKKGILQTVKVVDELVKVMGRHKPENIVIEMARENQTTQKGQKNSRERMKRIEEGIKELGSQILKEHPVENTQLQNEKLYLYYLQNGRDMYVDQELDINRLSDYDVDHIVPQSFLKDDSIDNKVLTRSDKARGKSDNVPSEEVVKKMKNYWRQLLNAKLITQRKFDNLTKAERGGLSELDKAGFIKRQLVETRQITKHVAQILDSRMNTKYDENDKLIREVKVITLKSKLVSDFRKDFQFYKVREINNYHHAHDAYLNAVVGTALIKKYPKLESEFVYGDYKVYDVRKMIAKSEQEIGKATAKYFFYSNIMNFFKTEITLANGEIRKRPLIETNGETGEIVWDKGRDFATVRKVLSMPQVNIVKKTEVQTGGFSKESILPKRNSDKLIARKKDWDPKKYGGFDSPTVAYSVLVVAKVEKGKSKKLKSVKELLGITIMERSSFEKNPIDFLEAKGYKEVKKDLIIKLPKYSLFELENGRKRMLASAGELQKGNELALPSKYVNFLYLASHYEKLKGSPEDNEQKQLFVEQHKHYLDEIIEQISEFSKRVILADANLDKVLSAYNKHRDKPIREQAENIIHLFTLTNLGAPAAFKYFDTTIDRKRYTSTKEVLDATLIHQSITGLYETRIDLSQLGGDGGGGSGGGGSSGGTLQLDDEYRLYSPLVKPDQNIQFWLEQFPQAWAETAGMGLAKQVPPQVIQLKASATPVSVRQYPLSKEAQEGIRPHVQRLIQQGILVPVQSPWNTPLLPVRKPGTNDYRPVQDLREVNKRVQDIHPTVPNPYNLLCALPPQRSWYTVLDLKDAFFCLRLHPTSQPLFAFEWRDPGTGRTGQLTWTRLPQGFKNSPTIFNEALHRDLANFRIQHPQVTLLQYVDDLLLAGATKQDCLEGTKALLLELSDLGYRASAKKAQICRREVTYLGYSLRDGQRWLTEARKKTVVQIPAPTTAKQVREFLGTAGFCRLWIPGFATLAAPLYPLTKPKGEFSWAPEHQKAFDAIKKALLSAPALALPDVTKPFTLYVDERKGVARGVLTQTLGPWRRPVAYLSKKLDPVASGWPVCLKAIAAVAILVKDADKLTLGQNITVIAPHALENIVRQPPDRWMTNARMTHYQSLLLTERVTFAPPAALNPATLLPEETDEPVTHDCHQLLIEETGVRKDLTDIPLTGEVLTWFTDGSSYVVEGKRMAGAAVVDGTRTIWASSLPEGTSAQKAELMALTQALRLAEGKSINIYTDSRYAFATAHVHGAIYKQRGWLTSAGREIKNKEEILSLLEALHLPKRLAIIHCPGHQKAKDPISRGNQMADRVAKQAAQGVNLLAGKRTADGSEFEKRTADGSEFESPKKKAKVE

SEQ ID NO: 337 - protein, 2104 aa, synthetic construct; identical to SEQ ID NO: 150
  source 1..2104: note = Description of Artificial Sequence: Synthetic polypeptide

SEQ ID NO: 338 - protein, 2088 aa, synthetic construct; identical to SEQ ID NO: 169
  source 1..2088: note = Description of Artificial Sequence: Synthetic polypeptide

SEQ ID NO: 339 - protein, 2088 aa, synthetic construct; identical to SEQ ID NO: 162
  source 1..2088: note = Description of Artificial Sequence: Synthetic polypeptide

SEQ ID NO: 340 - protein, 2088 aa, synthetic construct; identical to SEQ ID NO: 173
  source 1..2088: note = Description of Artificial Sequence: Synthetic polypeptide

SEQ ID NO: 341 - protein, 2090 aa, synthetic construct; identical to SEQ ID NO: 141
  source 1..2090: note = Description of Artificial Sequence: Synthetic polypeptide

SEQ ID NO: 342 - protein, 2094 aa, synthetic construct
  source 1..2094: note = Description of Artificial Sequence: Synthetic polypeptide
MPAAKRVKLDGGDKKYSIGLDIGTNSVGWAVITDEYKVPSKKFKVLGNTDRHSIKKNLIGALLFDSGETAEATRLKRTARRRYTRRKNRICYLQEIFSNEMAKVDDSFFHRLEESFLVEEDKKHERHPIFGNIVDEVAYHEKYPTIYHLRKKLVDSTDKADLRLIYLALAHMIKFRGHFLIEGDLNPDNSDVDKLFIQLVQTYNQLFEENPINASGVDAKAILSARLSKSRRLENLIAQLPGEKKNGLFGNLIALSLGLTPNFKSNFDLAEDAKLQLSKDTYDDDLDNLLAQIGDQYADLFLAAKNLSDAILLSDILRVNTEITKAPLSASMIKRYDEHHQDLTLLKALVRQQLPEKYKEIFFDQSKNGYAGYIDGGASQEEFYKFIKPILEKMDGTEELLVKLNREDLLRKQRTFDNGSIPHQIHLGELHAILRRQEDFYPFLKDNREKIEKILTFRIPYYVGPLARGNSRFAWMTRKSEETITPWNFEEVVDKGASAQSFIERMTNFDKNLPNEKVLPKHSLLYEYFTVYNELTKVKYVTEGMRKPAFLSGEQKKAIVDLLFKTNRKVTVKQLKEDYFKKIECFDSVEISGVEDRFNASLGTYHDLLKIIKDKDFLDNEENEDILEDIVLTLTLFEDREMIEERLKTYAHLFDDKVMKQLKRRRYTGWGRLSRKLINGIRDKQSGKTILDFLKSDGFANRNFMQLIHDDSLTFKEDIQKAQVSGQGDSLHEHIANLAGSPAIKKGILQTVKVVDELVKVMGRHKPENIVIEMARENQTTQKGQKNSRERMKRIEEGIKELGSQILKEHPVENTQLQNEKLYLYYLQNGRDMYVDQELDINRLSDYDVDHIVPQSFLKDDSIDNKVLTRSDKARGKSDNVPSEEVVKKMKNYWRQLLNAKLITQRKFDNLTKAERGGLSELDKAGFIKRQLVETRQITKHVAQILDSRMNTKYDENDKLIREVKVITLKSKLVSDFRKDFQFYKVREINNYHHAHDAYLNAVVGTALIKKYPKLESEFVYGDYKVYDVRKMIAKSEQEIGKATAKYFFYSNIMNFFKTEITLANGEIRKRPLIETNGETGEIVWDKGRDFATVRKVLSMPQVNIVKKTEVQTGGFSKESILPKRNSDKLIARKKDWDPKKYGGFDSPTVAYSVLVVAKVEKGKSKKLKSVKELLGITIMERSSFEKNPIDFLEAKGYKEVKKDLIIKLPKYSLFELENGRKRMLASAGELQKGNELALPSKYVNFLYLASHYEKLKGSPEDNEQKQLFVEQHKHYLDEIIEQISEFSKRVILADANLDKVLSAYNKHRDKPIREQAENIIHLFTLTNLGAPAAFKYFDTTIDRKRYTSTKEVLDATLIHQSITGLYETRIDLSQLGGDGGEAAAKGGGGSEAAAKGGTLQLDDEYRLYSPLVKPDQNIQFWLEQFPQAWAETAGMGLAKQVPPQVIQLKASATPVSVRQYPLSKEAQEGIRPHVQRLIQQGILVPVQSPWNTPLLPVRKPGTNDYRPVQDLREVNKRVQDIHPTVPNPYNLLCALPPQRSWYTVLDLKDAFFCLRLHPTSQPLFAFEWRDPGTGRTGQLTWTRLPQGFKNSPTIFNEALHRDLANFRIQHPQVTLLQYVDDLLLAGATKQDCLEGTKALLLELSDLGYRASAKKAQICRREVTYLGYSLRDGQRWLTEARKKTVVQIPAPTTAKQVREFLGTAGFCRLWIPGFATLAAPLYPLTKPKGEFSWAPEHQKAFDAIKKALLSAPALALPDVTKPFTLYVDERKGVARGVLTQTLGPWRRPVAYLSKKLDPVASGWPVCLKAIAAVAILVKDADKLTLGQNITVIAPHALENIVRQPPDRWMTNARMTHYQSLLLTERVTFAPPAALNPATLLPEETDEPVTHDCHQLLIEETGVRKDLTDIPLTGEVLTWFTDGSSYVVEGKRMAGAAVVDGTRTIWASSLPEGTSAQKAELMALTQALRLAEGKSINIYTDSRYAFATAHVHGAIYKQRGWLTSAGREIKNKEEILSLLEALHLPKRLAIIHCPGHQKAKDPISRGNQMADRVAKQAAQGVNLLAGKRTADGSEFEKRTADGSEFESPKKKAKVE

SEQ ID NO: 343 - protein, 2087 aa, synthetic construct
  source 1..2087: note = Description of Artificial Sequence: Synthetic polypeptide
MPAAKRVKLDGGDKKYSIGLDIGTNSVGWAVITDEYKVPSKKFKVLGNTDRHSIKKNLIGALLFDSGETAEATRLKRTARRRYTRRKNRICYLQEIFSNEMAKVDDSFFHRLEESFLVEEDKKHERHPIFGNIVDEVAYHEKYPTIYHLRKKLVDSTDKADLRLIYLALAHMIKFRGHFLIEGDLNPDNSDVDKLFIQLVQTYNQLFEENPINASGVDAKAILSARLSKSRRLENLIAQLPGEKKNGLFGNLIALSLGLTPNFKSNFDLAEDAKLQLSKDTYDDDLDNLLAQIGDQYADLFLAAKNLSDAILLSDILRVNTEITKAPLSASMIKRYDEHHQDLTLLKALVRQQLPEKYKEIFFDQSKNGYAGYIDGGASQEEFYKFIKPILEKMDGTEELLVKLNREDLLRKQRTFDNGSIPHQIHLGELHAILRRQEDFYPFLKDNREKIEKILTFRIPYYVGPLARGNSRFAWMTRKSEETITPWNFEEVVDKGASAQSFIERMTNFDKNLPNEKVLPKHSLLYEYFTVYNELTKVKYVTEGMRKPAFLSGEQKKAIVDLLFKTNRKVTVKQLKEDYFKKIECFDSVEISGVEDRFNASLGTYHDLLKIIKDKDFLDNEENEDILEDIVLTLTLFEDREMIEERLKTYAHLFDDKVMKQLKRRRYTGWGRLSRKLINGIRDKQSGKTILDFLKSDGFANRNFMQLIHDDSLTFKEDIQKAQVSGQGDSLHEHIANLAGSPAIKKGILQTVKVVDELVKVMGRHKPENIVIEMARENQTTQKGQKNSRERMKRIEEGIKELGSQILKEHPVENTQLQNEKLYLYYLQNGRDMYVDQELDINRLSDYDVDHIVPQSFLKDDSIDNKVLTRSDKARGKSDNVPSEEVVKKMKNYWRQLLNAKLITQRKFDNLTKAERGGLSELDKAGFIKRQLVETRQITKHVAQILDSRMNTKYDENDKLIREVKVITLKSKLVSDFRKDFQFYKVREINNYHHAHDAYLNAVVGTALIKKYPKLESEFVYGDYKVYDVRKMIAKSEQEIGKATAKYFFYSNIMNFFKTEITLANGEIRKRPLIETNGETGEIVWDKGRDFATVRKVLSMPQVNIVKKTEVQTGGFSKESILPKRNSDKLIARKKDWDPKKYGGFDSPTVAYSVLVVAKVEKGKSKKLKSVKELLGITIMERSSFEKNPIDFLEAKGYKEVKKDLIIKLPKYSLFELENGRKRMLASAGELQKGNELALPSKYVNFLYLASHYEKLKGSPEDNEQKQLFVEQHKHYLDEIIEQISEFSKRVILADANLDKVLSAYNKHRDKPIREQAENIIHLFTLTNLGAPAAFKYFDTTIDRKRYTSTKEVLDATLIHQSITGLYETRIDLSQLGGDGGEAAAKPAPGGTLQLDDEYRLYSPLVKPDQNIQFWLEQFPQAWAETAGMGLAKQVPPQVIQLKASATPVSVRQYPLSKEAQEGIRPHVQRLIQQGILVPVQSPWNTPLLPVRKPGTNDYRPVQDLREVNKRVQDIHPTVPNPYNLLCALPPQRSWYTVLDLKDAFFCLRLHPTSQPLFAFEWRDPGTGRTGQLTWTRLPQGFKNSPTIFNEALHRDLANFRIQHPQVTLLQYVDDLLLAGATKQDCLEGTKALLLELSDLGYRASAKKAQICRREVTYLGYSLRDGQRWLTEARKKTVVQIPAPTTAKQVREFLGTAGFCRLWIPGFATLAAPLYPLTKPKGEFSWAPEHQKAFDAIKKALLSAPALALPDVTKPFTLYVDERKGVARGVLTQTLGPWRRPVAYLSKKLDPVASGWPVCLKAIAAVAILVKDADKLTLGQNITVIAPHALENIVRQPPDRWMTNARMTHYQSLLLTERVTFAPPAALNPATLLPEETDEPVTHDCHQLLIEETGVRKDLTDIPLTGEVLTWFTDGSSYVVEGKRMAGAAVVDGTRTIWASSLPEGTSAQKAELMALTQALRLAEGKSINIYTDSRYAFATAHVHGAIYKQRGWLTSAGREIKNKEEILSLLEALHLPKRLAIIHCPGHQKAKDPISRGNQMADRVAKQAAQGVNLLAGKRTADGSEFEKRTADGSEFESPKKKAKVE

SEQ ID NO: 344 - protein, 2088 aa, synthetic construct; identical to SEQ ID NO: 131
  source 1..2088: note = Description of Artificial Sequence: Synthetic polypeptide

SEQ ID NO: 345 - protein, 2085 aa, synthetic construct
  source 1..2085: note = Description of Artificial Sequence: Synthetic polypeptide
MPAAKRVKLDGGDKKYSIGLDIGTNSVGWAVITDEYKVPSKKFKVLGNTDRHSIKKNLIGALLFDSGETAEATRLKRTARRRYTRRKNRICYLQEIFSNEMAKVDDSFFHRLEESFLVEEDKKHERHPIFGNIVDEVAYHEKYPTIYHLRKKLVDSTDKADLRLIYLALAHMIKFRGHFLIEGDLNPDNSDVDKLFIQLVQTYNQLFEENPINASGVDAKAILSARLSKSRRLENLIAQLPGEKKNGLFGNLIALSLGLTPNFKSNFDLAEDAKLQLSKDTYDDDLDNLLAQIGDQYADLFLAAKNLSDAILLSDILRVNTEITKAPLSASMIKRYDEHHQDLTLLKALVRQQLPEKYKEIFFDQSKNGYAGYIDGGASQEEFYKFIKPILEKMDGTEELLVKLNREDLLRKQRTFDNGSIPHQIHLGELHAILRRQEDFYPFLKDNREKIEKILTFRIPYYVGPLARGNSRFAWMTRKSEETITPWNFEEVVDKGASAQSFIERMTNFDKNLPNEKVLPKHSLLYEYFTVYNELTKVKYVTEGMRKPAFLSGEQKKAIVDLLFKTNRKVTVKQLKEDYFKKIECFDSVEISGVEDRFNASLGTYHDLLKIIKDKDFLDNEENEDILEDIVLTLTLFEDREMIEERLKTYAHLFDDKVMKQLKRRRYTGWGRLSRKLINGIRDKQSGKTILDFLKSDGFANRNFMQLIHDDSLTFKEDIQKAQVSGQGDSLHEHIANLAGSPAIKKGILQTVKVVDELVKVMGRHKPENIVIEMARENQTTQKGQKNSRERMKRIEEGIKELGSQILKEHPVENTQLQNEKLYLYYLQNGRDMYVDQELDINRLSDYDVDHIVPQSFLKDDSIDNKVLTRSDKARGKSDNVPSEEVVKKMKNYWRQLLNAKLITQRKFDNLTKAERGGLSELDKAGFIKRQLVETRQITKHVAQILDSRMNTKYDENDKLIREVKVITLKSKLVSDFRKDFQFYKVREINNYHHAHDAYLNAVVGTALIKKYPKLESEFVYGDYKVYDVRKMIAKSEQEIGKATAKYFFYSNIMNFFKTEITLANGEIRKRPLIETNGETGEIVWDKGRDFATVRKVLSMPQVNIVKKTEVQTGGFSKESILPKRNSDKLIARKKDWDPKKYGGFDSPTVAYSVLVVAKVEKGKSKKLKSVKELLGITIMERSSFEKNPIDFLEAKGYKEVKKDLIIKLPKYSLFELENGRKRMLASAGELQKGNELALPSKYVNFLYLASHYEKLKGSPEDNEQKQLFVEQHKHYLDEIIEQISEFSKRVILADANLDKVLSAYNKHRDKPIREQAENIIHLFTLTNLGAPAAFKYFDTTIDRKRYTSTKEVLDATLIHQSITGLYETRIDLSQLGGDGGGGSPAPGGTLQLDDEYRLYSPLVKPDQNIQFWLEQFPQAWAETAGMGLAKQVPPQVIQLKASATPVSVRQYPLSKEAQEGIRPHVQRLIQQGILVPVQSPWNTPLLPVRKPGTNDYRPVQDLREVNKRVQDIHPTVPNPYNLLCALPPQRSWYTVLDLKDAFFCLRLHPTSQPLFAFEWRDPGTGRTGQLTWTRLPQGFKNSPTIFNEALHRDLANFRIQHPQVTLLQYVDDLLLAGATKQDCLEGTKALLLELSDLGYRASAKKAQICRREVTYLGYSLRDGQRWLTEARKKTVVQIPAPTTAKQVREFLGTAGFCRLWIPGFATLAAPLYPLTKPKGEFSWAPEHQKAFDAIKKALLSAPALALPDVTKPFTLYVDERKGVARGVLTQTLGPWRRPVAYLSKKLDPVASGWPVCLKAIAAVAILVKDADKLTLGQNITVIAPHALENIVRQPPDRWMTNARMTHYQSLLLTERVTFAPPAALNPATLLPEETDEPVTHDCHQLLIEETGVRKDLTDIPLTGEVLTWFTDGSSYVVEGKRMAGAAVVDGTRTIWASSLPEGTSAQKAELMALTQALRLAEGKSINIYTDSRYAFATAHVHGAIYKQRGWLTSAGREIKNKEEILSLLEALHLPKRLAIIHCPGHQKAKDPISRGNQMADRVAKQAAQGVNLLAGKRTADGSEFEKRTADGSEFESPKKKAKVE

SEQ ID NO: 346 - protein, 2090 aa, synthetic construct
  source 1..2090: note = Description of Artificial Sequence: Synthetic polypeptide
MPAAKRVKLDGGDKKYSIGLDIGTNSVGWAVITDEYKVPSKKFKVLGNTDRHSIKKNLIGALLFDSGETAEATRLKRTARRRYTRRKNRICYLQEIFSNEMAKVDDSFFHRLEESFLVEEDKKHERHPIFGNIVDEVAYHEKYPTIYHLRKKLVDSTDKADLRLIYLALAHMIKFRGHFLIEGDLNPDNSDVDKLFIQLVQTYNQLFEENPINASGVDAKAILSARLSKSRRLENLIAQLPGEKKNGLFGNLIALSLGLTPNFKSNFDLAEDAKLQLSKDTYDDDLDNLLAQIGDQYADLFLAAKNLSDAILLSDILRVNTEITKAPLSASMIKRYDEHHQDLTLLKALVRQQLPEKYKEIFFDQSKNGYAGYIDGGASQEEFYKFIKPILEKMDGTEELLVKLNREDLLRKQRTFDNGSIPHQIHLGELHAILRRQEDFYPFLKDNREKIEKILTFRIPYYVGPLARGNSRFAWMTRKSEETITPWNFEEVVDKGASAQSFIERMTNFDKNLPNEKVLPKHSLLYEYFTVYNELTKVKYVTEGMRKPAFLSGEQKKAIVDLLFKTNRKVTVKQLKEDYFKKIECFDSVEISGVEDRFNASLGTYHDLLKIIKDKDFLDNEENEDILEDIVLTLTLFEDREMIEERLKTYAHLFDDKVMKQLKRRRYTGWGRLSRKLINGIRDKQSGKTILDFLKSDGFANRNFMQLIHDDSLTFKEDIQKAQVSGQGDSLHEHIANLAGSPAIKKGILQTVKVVDELVKVMGRHKPENIVIEMARENQTTQKGQKNSRERMKRIEEGIKELGSQILKEHPVENTQLQNEKLYLYYLQNGRDMYVDQELDINRLSDYDVDHIVPQSFLKDDSIDNKVLTRSDKARGKSDNVPSEEVVKKMKNYWRQLLNAKLITQRKFDNLTKAERGGLSELDKAGFIKRQLVETRQITKHVAQILDSRMNTKYDENDKLIREVKVITLKSKLVSDFRKDFQFYKVREINNYHHAHDAYLNAVVGTALIKKYPKLESEFVYGDYKVYDVRKMIAKSEQEIGKATAKYFFYSNIMNFFKTEITLANGEIRKRPLIETNGETGEIVWDKGRDFATVRKVLSMPQVNIVKKTEVQTGGFSKESILPKRNSDKLIARKKDWDPKKYGGFDSPTVAYSVLVVAKVEKGKSKKLKSVKELLGITIMERSSFEKNPIDFLEAKGYKEVKKDLIIKLPKYSLFELENGRKRMLASAGELQKGNELALPSKYVNFLYLASHYEKLKGSPEDNEQKQLFVEQHKHYLDEIIEQISEFSKRVILADANLDKVLSAYNKHRDKPIREQAENIIHLFTLTNLGAPAAFKYFDTTIDRKRYTSTKEVLDATLIHQSITGLYETRIDLSQLGGDGGGGGPAPEAAAKGGTLQLDDEYRLYSPLVKPDQNIQFWLEQFPQAWAETAGMGLAKQVPPQVIQLKASATPVSVRQYPLSKEAQEGIRPHVQRLIQQGILVPVQSPWNTPLLPVRKPGTNDYRPVQDLREVNKRVQDIHPTVPNPYNLLCALPPQRSWYTVLDLKDAFFCLRLHPTSQPLFAFEWRDPGTGRTGQLTWTRLPQGFKNSPTIFNEALHRDLANFRIQHPQVTLLQYVDDLLLAGATKQDCLEGTKALLLELSDLGYRASAKKAQICRREVTYLGYSLRDGQRWLTEARKKTVVQIPAPTTAKQVREFLGTAGFCRLWIPGFATLAAPLYPLTKPKGEFSWAPEHQKAFDAIKKALLSAPALALPDVTKPFTLYVDERKGVARGVLTQTLGPWRRPVAYLSKKLDPVASGWPVCLKAIAAVAILVKDADKLTLGQNITVIAPHALENIVRQPPDRWMTNARMTHYQSLLLTERVTFAPPAALNPATLLPEETDEPVTHDCHQLLIEETGVRKDLTDIPLTGEVLTWFTDGSSYVVEGKRMAGAAVVDGTRTIWASSLPEGTSAQKAELMALTQALRLAEGKSINIYTDSRYAFATAHVHGAIYKQRGWLTSAGREIKNKEEILSLLEALHLPKRLAIIHCPGHQKAKDPISRGNQMADRVAKQAAQGVNLLAGKRTADGSEFEKRTADGSEFESPKKKAKVE

SEQ ID NO: 347 - protein, 2082 aa, synthetic construct; identical to SEQ ID NO: 177
  source 1..2082: note = Description of Artificial Sequence: Synthetic polypeptide

SEQ ID NO: 348 - protein, 2090 aa, synthetic construct
  source 1..2090: note = Description of Artificial Sequence: Synthetic polypeptide
MPAAKRVKLDGGDKKYSIGLDIGTNSVGWAVITDEYKVPSKKFKVLGNTDRHSIKKNLIGALLFDSGETAEATRLKRTARRRYTRRKNRICYLQEIFSNEMAKVDDSFFHRLEESFLVEEDKKHERHPIFGNIVDEVAYHEKYPTIYHLRKKLVDSTDKADLRLIYLALAHMIKFRGHFLIEGDLNPDNSDVDKLFIQLVQTYNQLFEENPINASGVDAKAILSARLSKSRRLENLIAQLPGEKKNGLFGNLIALSLGLTPNFKSNFDLAEDAKLQLSKDTYDDDLDNLLAQIGDQYADLFLAAKNLSDAILLSDILRVNTEITKAPLSASMIKRYDEHHQDLTLLKALVRQQLPEKYKEIFFDQSKNGYAGYIDGGASQEEFYKFIKPILEKMDGTEELLVKLNREDLLRKQRTFDNGSIPHQIHLGELHAILRRQEDFYPFLKDNREKIEKILTFRIPYYVGPLARGNSRFAWMTRKSEETITPWNFEEVVDKGASAQSFIERMTNFDKNLPNEKVLPKHSLLYEYFTVYNELTKVKYVTEGMRKPAFLSGEQKKAIVDLLFKTNRKVTVKQLKEDYFKKIECFDSVEISGVEDRFNASLGTYHDLLKIIKDKDFLDNEENEDILEDIVLTLTLFEDREMIEERLKTYAHLFDDKVMKQLKRRRYTGWGRLSRKLINGIRDKQSGKTILDFLKSDGFANRNFMQLIHDDSLTFKEDIQKAQVSGQGDSLHEHIANLAGSPAIKKGILQTVKVVDELVKVMGRHKPENIVIEMARENQTTQKGQKNSRERMKRIEEGIKELGSQILKEHPVENTQLQNEKLYLYYLQNGRDMYVDQELDINRLSDYDVDHIVPQSFLKDDSIDNKVLTRSDKARGKSDNVPSEEVVKKMKNYWRQLLNAKLITQRKFDNLTKAERGGLSELDKAGFIKRQLVETRQITKHVAQILDSRMNTKYDENDKLIREVKVITLKSKLVSDFRKDFQFYKVREINNYHHAHDAYLNAVVGTALIKKYPKLESEFVYGDYKVYDVRKMIAKSEQEIGKATAKYFFYSNIMNFFKTEITLANGEIRKRPLIETNGETGEIVWDKGRDFATVRKVLSMPQVNIVKKTEVQTGGFSKESILPKRNSDKLIARKKDWDPKKYGGFDSPTVAYSVLVVAKVEKGKSKKLKSVKELLGITIMERSSFEKNPIDFLEAKGYKEVKKDLIIKLPKYSLFELENGRKRMLASAGELQKGNELALPSKYVNFLYLASHYEKLKGSPEDNEQKQLFVEQHKHYLDEIIEQISEFSKRVILADANLDKVLSAYNKHRDKPIREQAENIIHLFTLTNLGAPAAFKYFDTTIDRKRYTSTKEVLDATLIHQSITGLYETRIDLSQLGGDGGEAAAKGGGPAPGGTLQLDDEYRLYSPLVKPDQNIQFWLEQFPQAWAETAGMGLAKQVPPQVIQLKASATPVSVRQYPLSKEAQEGIRPHVQRLIQQGILVPVQSPWNTPLLPVRKPGTNDYRPVQDLREVNKRVQDIHPTVPNPYNLLCALPPQRSWYTVLDLKDAFFCLRLHPTSQPLFAFEWRDPGTGRTGQLTWTRLPQGFKNSPTIFNEALHRDLANFRIQHPQVTLLQYVDDLLLAGATKQDCLEGTKALLLELSDLGYRASAKKAQICRREVTYLGYSLRDGQRWLTEARKKTVVQIPAPTTAKQVREFLGTAGFCRLWIPGFATLAAPLYPLTKPKGEFSWAPEHQKAFDAIKKALLSAPALALPDVTKPFTLYVDERKGVARGVLTQTLGPWRRPVAYLSKKLDPVASGWPVCLKAIAAVAILVKDADKLTLGQNITVIAPHALENIVRQPPDRWMTNARMTHYQSLLLTERVTFAPPAALNPATLLPEETDEPVTHDCHQLLIEETGVRKDLTDIPLTGEVLTWFTDGSSYVVEGKRMAGAAVVDGTRTIWASSLPEGTSAQKAELMALTQALRLAEGKSINIYTDSRYAFATAHVHGAIYKQRGWLTSAGREIKNKEEILSLLEALHLPKRLAIIHCPGHQKAKDPISRGNQMADRVAKQAAQGVNLLAGKRTADGSEFEKRTADGSEFESPKKKAKVE

SEQ ID NO: 349 - protein, 2090 aa, synthetic construct; identical to SEQ ID NO: 136
  source 1..2090: note = Description of Artificial Sequence: Synthetic polypeptide

SEQ ID NO: 350 - protein, 2090 aa, synthetic construct; identical to SEQ ID NO: 115
  source 1..2090: note = Description of Artificial Sequence: Synthetic polypeptide

SEQ ID NO: 351 - protein, 2099 aa, synthetic construct; identical to SEQ ID NO: 137
  source 1..2099: note = Description of Artificial Sequence: Synthetic polypeptide

SEQ ID NO: 352 - protein, 2090 aa, synthetic construct
  source 1..2090: note = Description of Artificial Sequence: Synthetic polypeptide
MPAAKRVKLDGGDKKYSIGLDIGTNSVGWAVITDEYKVPSKKFKVLGNTDRHSIKKNLIGALLFDSGETAEATRLKRTARRRYTRRKNRICYLQEIFSNEMAKVDDSFFHRLEESFLVEEDKKHERHPIFGNIVDEVAYHEKYPTIYHLRKKLVDSTDKADLRLIYLALAHMIKFRGHFLIEGDLNPDNSDVDKLFIQLVQTYNQLFEENPINASGVDAKAILSARLSKSRRLENLIAQLPGEKKNGLFGNLIALSLGLTPNFKSNFDLAEDAKLQLSKDTYDDDLDNLLAQIGDQYADLFLAAKNLSDAILLSDILRVNTEITKAPLSASMIKRYDEHHQDLTLLKALVRQQLPEKYKEIFFDQSKNGYAGYIDGGASQEEFYKFIKPILEKMDGTEELLVKLNREDLLRKQRTFDNGSIPHQIHLGELHAILRRQEDFYPFLKDNREKIEKILTFRIPYYVGPLARGNSRFAWMTRKSEETITPWNFEEVVDKGASAQSFIERMTNFDKNLPNEKVLPKHSLLYEYFTVYNELTKVKYVTEGMRKPAFLSGEQKKAIVDLLFKTNRKVTVKQLKEDYFKKIECFDSVEISGVEDRFNASLGTYHDLLKIIKDKDFLDNEENEDILEDIVLTLTLFEDREMIEERLKTYAHLFDDKVMKQLKRRRYTGWGRLSRKLINGIRDKQSGKTILDFLKSDGFANRNFMQLIHDDSLTFKEDIQKAQVSGQGDSLHEHIANLAGSPAIKKGILQTVKVVDELVKVMGRHKPENIVIEMARENQTTQKGQKNSRERMKRIEEGIKELGSQILKEHPVENTQLQNEKLYLYYLQNGRDMYVDQELDINRLSDYDVDHIVPQSFLKDDSIDNKVLTRSDKARGKSDNVPSEEVVKKMKNYWRQLLNAKLITQRKFDNLTKAERGGLSELDKAGFIKRQLVETRQITKHVAQILDSRMNTKYDENDKLIREVKVITLKSKLVSDFRKDFQFYKVREINNYHHAHDAYLNAVVGTALIKKYPKLESEFVYGDYKVYDVRKMIAKSEQEIGKATAKYFFYSNIMNFFKTEITLANGEIRKRPLIETNGETGEIVWDKGRDFATVRKVLSMPQVNIVKKTEVQTGGFSKESILPKRNSDKLIARKKDWDPKKYGGFDSPTVAYSVLVVAKVEKGKSKKLKSVKELLGITIMERSSFEKNPIDFLEAKGYKEVKKDLIIKLPKYSLFELENGRKRMLASAGELQKGNELALPSKYVNFLYLASHYEKLKGSPEDNEQKQLFVEQHKHYLDEIIEQISEFSKRVILADANLDKVLSAYNKHRDKPIREQAENIIHLFTLTNLGAPAAFKYFDTTIDRKRYTSTKEVLDATLIHQSITGLYETRIDLSQLGGDGGGGSEAAAKGGGGGTLQLDDEYRLYSPLVKPDQNIQFWLEQFPQAWAETAGMGLAKQVPPQVIQLKASATPVSVRQYPLSKEAQEGIRPHVQRLIQQGILVPVQSPWNTPLLPVRKPGTNDYRPVQDLREVNKRVQDIHPTVPNPYNLLCALPPQRSWYTVLDLKDAFFCLRLHPTSQPLFAFEWRDPGTGRTGQLTWTRLPQGFKNSPTIFNEALHRDLANFRIQHPQVTLLQYVDDLLLAGATKQDCLEGTKALLLELSDLGYRASAKKAQICRREVTYLGYSLRDGQRWLTEARKKTVVQIPAPTTAKQVREFLGTAGFCRLWIPGFATLAAPLYPLTKPKGEFSWAPEHQKAFDAIKKALLSAPALALPDVTKPFTLYVDERKGVARGVLTQTLGPWRRPVAYLSKKLDPVASGWPVCLKAIAAVAILVKDADKLTLGQNITVIAPHALENIVRQPPDRWMTNARMTHYQSLLLTERVTFAPPAALNPATLLPEETDEPVTHDCHQLLIEETGVRKDLTDIPLTGEVLTWFTDGSSYVVEGKRMAGAAVVDGTRTIWASSLPEGTSAQKAELMALTQALRLAEGKSINIYTDSRYAFATAHVHGAIYKQRGWLTSAGREIKNKEEILSLLEALHLPKRLAIIHCPGHQKAKDPISRGNQMADRVAKQAAQGVNLLAGKRTADGSEFEKRTADGSEFESPKKKAKVE

SEQ ID NO: 353 - protein, 2085 aa, synthetic construct; identical to SEQ ID NO: 183
  source 1..2085: note = Description of Artificial Sequence: Synthetic polypeptide

SEQ ID NO: 354 - protein, 2090 aa, synthetic construct
  source 1..2090: note = Description of Artificial Sequence: Synthetic polypeptide
MPAAKRVKLDGGDKKYSIGLDIGTNSVGWAVITDEYKVPSKKFKVLGNTDRHSIKKNLIGALLFDSGETAEATRLKRTARRRYTRRKNRICYLQEIFSNEMAKVDDSFFHRLEESFLVEEDKKHERHPIFGNIVDEVAYHEKYPTIYHLRKKLVDSTDKADLRLIYLALAHMIKFRGHFLIEGDLNPDNSDVDKLFIQLVQTYNQLFEENPINASGVDAKAILSARLSKSRRLENLIAQLPGEKKNGLFGNLIALSLGLTPNFKSNFDLAEDAKLQLSKDTYDDDLDNLLAQIGDQYADLFLAAKNLSDAILLSDILRVNTEITKAPLSASMIKRYDEHHQDLTLLKALVRQQLPEKYKEIFFDQSKNGYAGYIDGGASQEEFYKFIKPILEKMDGTEELLVKLNREDLLRKQRTFDNGSIPHQIHLGELHAILRRQEDFYPFLKDNREKIEKILTFRIPYYVGPLARGNSRFAWMTRKSEETITPWNFEEVVDKGASAQSFIERMTNFDKNLPNEKVLPKHSLLYEYFTVYNELTKVKYVTEGMRKPAFLSGEQKKAIVDLLFKTNRKVTVKQLKEDYFKKIECFDSVEISGVEDRFNASLGTYHDLLKIIKDKDFLDNEENEDILEDIVLTLTLFEDREMIEERLKTYAHLFDDKVMKQLKRRRYTGWGRLSRKLINGIRDKQSGKTILDFLKSDGFANRNFMQLIHDDSLTFKEDIQKAQVSGQGDSLHEHIANLAGSPAIKKGILQTVKVVDELVKVMGRHKPENIVIEMARENQTTQKGQKNSRERMKRIEEGIKELGSQILKEHPVENTQLQNEKLYLYYLQNGRDMYVDQELDINRLSDYDVDHIVPQSFLKDDSIDNKVLTRSDKARGKSDNVPSEEVVKKMKNYWRQLLNAKLITQRKFDNLTKAERGGLSELDKAGFIKRQLVETRQITKHVAQILDSRMNTKYDENDKLIREVKVITLKSKLVSDFRKDFQFYKVREINNYHHAHDAYLNAVVGTALIKKYPKLESEFVYGDYKVYDVRKMIAKSEQEIGKATAKYFFYSNIMNFFKTEITLANGEIRKRPLIETNGETGEIVWDKGRDFATVRKVLSMPQVNIVKKTEVQTGGFSKESILPKRNSDKLIARKKDWDPKKYGGFDSPTVAYSVLVVAKVEKGKSKKLKSVKELLGITIMERSSFEKNPIDFLEAKGYKEVKKDLIIKLPKYSLFELENGRKRMLASAGELQKGNELALPSKYVNFLYLASHYEKLKGSPEDNEQKQLFVEQHKHYLDEIIEQISEFSKRVILADANLDKVLSAYNKHRDKPIREQAENIIHLFTLTNLGAPAAFKYFDTTIDRKRYTSTKEVLDATLIHQSITGLYETRIDLSQLGGDGGEAAAKGGGGGSGGTLQLDDEYRLYSPLVKPDQNIQFWLEQFPQAWAETAGMGLAKQVPPQVIQLKASATPVSVRQYPLSKEAQEGIRPHVQRLIQQGILVPVQSPWNTPLLPVRKPGTNDYRPVQDLREVNKRVQDIHPTVPNPYNLLCALPPQRSWYTVLDLKDAFFCLRLHPTSQPLFAFEWRDPGTGRTGQLTWTRLPQGFKNSPTIFNEALHRDLANFRIQHPQVTLLQYVDDLLLAGATKQDCLEGTKALLLELSDLGYRASAKKAQICRREVTYLGYSLRDGQRWLTEARKKTVVQIPAPTTAKQVREFLGTAGFCRLWIPGFATLAAPLYPLTKPKGEFSWAPEHQKAFDAIKKALLSAPALALPDVTKPFTLYVDERKGVARGVLTQTLGPWRRPVAYLSKKLDPVASGWPVCLKAIAAVAILVKDADKLTLGQNITVIAPHALENIVRQPPDRWMTNARMTHYQSLLLTERVTFAPPAALNPATLLPEETDEPVTHDCHQLLIEETGVRKDLTDIPLTGEVLTWFTDGSSYVVEGKRMAGAAVVDGTRTIWASSLPEGTSAQKAELMALTQALRLAEGKSINIYTDSRYAFATAHVHGAIYKQRGWLTSAGREIKNKEEILSLLEALHLPKRLAIIHCPGHQKAKDPISRGNQMADRVAKQAAQGVNLLAGKRTADGSEFEKRTADGSEFESPKKKAKVE

SEQ ID NO: 355 - protein, 2099 aa, synthetic construct
  source 1..2099: note = Description of Artificial Sequence: Synthetic polypeptide
MPAAKRVKLDGGDKKYSIGLDIGTNSVGWAVITDEYKVPSKKFKVLGNTDRHSIKKNLIGALLFDSGETAEATRLKRTARRRYTRRKNRICYLQEIFSNEMAKVDDSFFHRLEESFLVEEDKKHERHPIFGNIVDEVAYHEKYPTIYHLRKKLVDSTDKADLRLIYLALAHMIKFRGHFLIEGDLNPDNSDVDKLFIQLVQTYNQLFEENPINASGVDAKAILSARLSKSRRLENLIAQLPGEKKNGLFGNLIALSLGLTPNFKSNFDLAEDAKLQLSKDTYDDDLDNLLAQIGDQYADLFLAAKNLSDAILLSDILRVNTEITKAPLSASMIKRYDEHHQDLTLLKALVRQQLPEKYKEIFFDQSKNGYAGYIDGGASQEEFYKFIKPILEKMDGTEELLVKLNREDLLRKQRTFDNGSIPHQIHLGELHAILRRQEDFYPFLKDNREKIEKILTFRIPYYVGPLARGNSRFAWMTRKSEETITPWNFEEVVDKGASAQSFIERMTNFDKNLPNEKVLPKHSLLYEYFTVYNELTKVKYVTEGMRKPAFLSGEQKKAIVDLLFKTNRKVTVKQLKEDYFKKIECFDSVEISGVEDRFNASLGTYHDLLKIIKDKDFLDNEENEDILEDIVLTLTLFEDREMIEERLKTYAHLFDDKVMKQLKRRRYTGWGRLSRKLINGIRDKQSGKTILDFLKSDGFANRNFMQLIHDDSLTFKEDIQKAQVSGQGDSLHEHIANLAGSPAIKKGILQTVKVVDELVKVMGRHKPENIVIEMARENQTTQKGQKNSRERMKRIEEGIKELGSQILKEHPVENTQLQNEKLYLYYLQNGRDMYVDQELDINRLSDYDVDHIVPQSFLKDDSIDNKVLTRSDKARGKSDNVPSEEVVKKMKNYWRQLLNAKLITQRKFDNLTKAERGGLSELDKAGFIKRQLVETRQITKHVAQILDSRMNTKYDENDKLIREVKVITLKSKLVSDFRKDFQFYKVREINNYHHAHDAYLNAVVGTALIKKYPKLESEFVYGDYKVYDVRKMIAKSEQEIGKATAKYFFYSNIMNFFKTEITLANGEIRKRPLIETNGETGEIVWDKGRDFATVRKVLSMPQVNIVKKTEVQTGGFSKESILPKRNSDKLIARKKDWDPKKYGGFDSPTVAYSVLVVAKVEKGKSKKLKSVKELLGITIMERSSFEKNPIDFLEAKGYKEVKKDLIIKLPKYSLFELENGRKRMLASAGELQKGNELALPSKYVNFLYLASHYEKLKGSPEDNEQKQLFVEQHKHYLDEIIEQISEFSKRVILADANLDKVLSAYNKHRDKPIREQAENIIHLFTLTNLGAPAAFKYFDTTIDRKRYTSTKEVLDATLIHQSITGLYETRIDLSQLGGDGGGGGGSGGGGSGGGGSGGGGSGGTLQLDDEYRLYSPLVKPDQNIQFWLEQFPQAWAETAGMGLAKQVPPQVIQLKASATPVSVRQYPLSKEAQEGIRPHVQRLIQQGILVPVQSPWNTPLLPVRKPGTNDYRPVQDLREVNKRVQDIHPTVPNPYNLLCALPPQRSWYTVLDLKDAFFCLRLHPTSQPLFAFEWRDPGTGRTGQLTWTRLPQGFKNSPTIFNEALHRDLANFRIQHPQVTLLQYVDDLLLAGATKQDCLEGTKALLLELSDLGYRASAKKAQICRREVTYLGYSLRDGQRWLTEARKKTVVQIPAPTTAKQVREFLGTAGFCRLWIPGFATLAAPLYPLTKPKGEFSWAPEHQKAFDAIKKALLSAPALALPDVTKPFTLYVDERKGVARGVLTQTLGPWRRPVAYLSKKLDPVASGWPVCLKAIAAVAILVKDADKLTLGQNITVIAPHALENIVRQPPDRWMTNARMTHYQSLLLTERVTFAPPAALNPATLLPEETDEPVTHDCHQLLIEETGVRKDLTDIPLTGEVLTWFTDGSSYVVEGKRMAGAAVVDGTRTIWASSLPEGTSAQKAELMALTQALRLAEGKSINIYTDSRYAFATAHVHGAIYKQRGWLTSAGREIKNKEEILSLLEALHLPKRLAIIHCPGHQKAKDPISRGNQMADRVAKQAAQGVNLLAGKRTADGSEFEKRTADGSEFESPKKKAKVE

SEQ ID NO: 356 - protein, 2085 aa, synthetic construct; identical to SEQ ID NO: 125
  source 1..2085: note = Description of Artificial Sequence: Synthetic polypeptide

SEQ ID NO: 357 - protein, 2091 aa, synthetic construct
  source 1..2091: note = Description of Artificial Sequence: Synthetic polypeptide
MPAAKRVKLDGGDKKYSIGLDIGTNSVGWAVITDEYKVPSKKFKVLGNTDRHSIKKNLIGALLFDSGETAEATRLKRTARRRYTRRKNRICYLQEIFSNEMAKVDDSFFHRLEESFLVEEDKKHERHPIFGNIVDEVAYHEKYPTIYHLRKKLVDSTDKADLRLIYLALAHMIKFRGHFLIEGDLNPDNSDVDKLFIQLVQTYNQLFEENPINASGVDAKAILSARLSKSRRLENLIAQLPGEKKNGLFGNLIALSLGLTPNFKSNFDLAEDAKLQLSKDTYDDDLDNLLAQIGDQYADLFLAAKNLSDAILLSDILRVNTEITKAPLSASMIKRYDEHHQDLTLLKALVRQQLPEKYKEIFFDQSKNGYAGYIDGGASQEEFYKFIKPILEKMDGTEELLVKLNREDLLRKQRTFDNGSIPHQIHLGELHAILRRQEDFYPFLKDNREKIEKILTFRIPYYVGPLARGNSRFAWMTRKSEETITPWNFEEVVDKGASAQSFIERMTNFDKNLPNEKVLPKHSLLYEYFTVYNELTKVKYVTEGMRKPAFLSGEQKKAIVDLLFKTNRKVTVKQLKEDYFKKIECFDSVEISGVEDRFNASLGTYHDLLKIIKDKDFLDNEENEDILEDIVLTLTLFEDREMIEERLKTYAHLFDDKVMKQLKRRRYTGWGRLSRKLINGIRDKQSGKTILDFLKSDGFANRNFMQLIHDDSLTFKEDIQKAQVSGQGDSLHEHIANLAGSPAIKKGILQTVKVVDELVKVMGRHKPENIVIEMARENQTTQKGQKNSRERMKRIEEGIKELGSQILKEHPVENTQLQNEKLYLYYLQNGRDMYVDQELDINRLSDYDVDHIVPQSFLKDDSIDNKVLTRSDKARGKSDNVPSEEVVKKMKNYWRQLLNAKLITQRKFDNLTKAERGGLSELDKAGFIKRQLVETRQITKHVAQILDSRMNTKYDENDKLIREVKVITLKSKLVSDFRKDFQFYKVREINNYHHAHDAYLNAVVGTALIKKYPKLESEFVYGDYKVYDVRKMIAKSEQEIGKATAKYFFYSNIMNFFKTEITLANGEIRKRPLIETNGETGEIVWDKGRDFATVRKVLSMPQVNIVKKTEVQTGGFSKESILPKRNSDKLIARKKDWDPKKYGGFDSPTVAYSVLVVAKVEKGKSKKLKSVKELLGITIMERSSFEKNPIDFLEAKGYKEVKKDLIIKLPKYSLFELENGRKRMLASAGELQKGNELALPSKYVNFLYLASHYEKLKGSPEDNEQKQLFVEQHKHYLDEIIEQISEFSKRVILADANLDKVLSAYNKHRDKPIREQAENIIHLFTLTNLGAPAAFKYFDTTIDRKRYTSTKEVLDATLIHQSITGLYETRIDLSQLGGDGGGSSGSSGSSGSSGGTLQLDDEYRLYSPLVKPDQNIQFWLEQFPQAWAETAGMGLAKQVPPQVIQLKASATPVSVRQYPLSKEAQEGIRPHVQRLIQQGILVPVQSPWNTPLLPVRKPGTNDYRPVQDLREVNKRVQDIHPTVPNPYNLLCALPPQRSWYTVLDLKDAFFCLRLHPTSQPLFAFEWRDPGTGRTGQLTWTRLPQGFKNSPTIFNEALHRDLANFRIQHPQVTLLQYVDDLLLAGATKQDCLEGTKALLLELSDLGYRASAKKAQICRREVTYLGYSLRDGQRWLTEARKKTVVQIPAPTTAKQVREFLGTAGFCRLWIPGFATLAAPLYPLTKPKGEFSWAPEHQKAFDAIKKALLSAPALALPDVTKPFTLYVDERKGVARGVLTQTLGPWRRPVAYLSKKLDPVASGWPVCLKAIAAVAILVKDADKLTLGQNITVIAPHALENIVRQPPDRWMTNARMTHYQSLLLTERVTFAPPAALNPATLLPEETDEPVTHDCHQLLIEETGVRKDLTDIPLTGEVLTWFTDGSSYVVEGKRMAGAAVVDGTRTIWASSLPEGTSAQKAELMALTQALRLAEGKSINIYTDSRYAFATAHVHGAIYKQRGWLTSAGREIKNKEEILSLLEALHLPKRLAIIHCPGHQKAKDPISRGNQMADRVAKQAAQGVNLLAGKRTADGSEFEKRTADGSEFESPKKKAKVE

SEQ ID NO: 358 - protein, 2090 aa, synthetic construct
  source 1..2090: note = Description of Artificial Sequence: Synthetic polypeptide
MPAAKRVKLDGGDKKYSIGLDIGTNSVGWAVITDEYKVPSKKFKVLGNTDRHSIKKNLIGALLFDSGETAEATRLKRTARRRYTRRKNRICYLQEIFSNEMAKVDDSFFHRLEESFLVEEDKKHERHPIFGNIVDEVAYHEKYPTIYHLRKKLVDSTDKADLRLIYLALAHMIKFRGHFLIEGDLNPDNSDVDKLFIQLVQTYNQLFEENPINASGVDAKAILSARLSKSRRLENLIAQLPGEKKNGLFGNLIALSLGLTPNFKSNFDLAEDAKLQLSKDTYDDDLDNLLAQIGDQYADLFLAAKNLSDAILLSDILRVNTEITKAPLSASMIKRYDEHHQDLTLLKALVRQQLPEKYKEIFFDQSKNGYAGYIDGGASQEEFYKFIKPILEKMDGTEELLVKLNREDLLRKQRTFDNGSIPHQIHLGELHAILRRQEDFYPFLKDNREKIEKILTFRIPYYVGPLARGNSRFAWMTRKSEETITPWNFEEVVDKGASAQSFIERMTNFDKNLPNEKVLPKHSLLYEYFTVYNELTKVKYVTEGMRKPAFLSGEQKKAIVDLLFKTNRKVTVKQLKEDYFKKIECFDSVEISGVEDRFNASLGTYHDLLKIIKDKDFLDNEENEDILEDIVLTLTLFEDREMIEERLKTYAHLFDDKVMKQLKRRRYTGWGRLSRKLINGIRDKQSGKTILDFLKSDGFANRNFMQLIHDDSLTFKEDIQKAQVSGQGDSLHEHIANLAGSPAIKKGILQTVKVVDELVKVMGRHKPENIVIEMARENQTTQKGQKNSRERMKRIEEGIKELGSQILKEHPVENTQLQNEKLYLYYLQNGRDMYVDQELDINRLSDYDVDHIVPQSFLKDDSIDNKVLTRSDKARGKSDNVPSEEVVKKMKNYWRQLLNAKLITQRKFDNLTKAERGGLSELDKAGFIKRQLVETRQITKHVAQILDSRMNTKYDENDKLIREVKVITLKSKLVSDFRKDFQFYKVREINNYHHAHDAYLNAVVGTALIKKYPKLESEFVYGDYKVYDVRKMIAKSEQEIGKATAKYFFYSNIMNFFKTEITLANGEIRKRPLIETNGETGEIVWDKGRDFATVRKVLSMPQVNIVKKTEVQTGGFSKESILPKRNSDKLIARKKDWDPKKYGGFDSPTVAYSVLVVAKVEKGKSKKLKSVKELLGITIMERSSFEKNPIDFLEAKGYKEVKKDLIIKLPKYSLFELENGRKRMLASAGELQKGNELALPSKYVNFLYLASHYEKLKGSPEDNEQKQLFVEQHKHYLDEIIEQISEFSKRVILADANLDKVLSAYNKHRDKPIREQAENIIHLFTLTNLGAPAAFKYFDTTIDRKRYTSTKEVLDATLIHQSITGLYETRIDLSQLGGDGGEAAAKPAPGGGGGTLQLDDEYRLYSPLVKPDQNIQFWLEQFPQAWAETAGMGLAKQVPPQVIQLKASATPVSVRQYPLSKEAQEGIRPHVQRLIQQGILVPVQSPWNTPLLPVRKPGTNDYRPVQDLREVNKRVQDIHPTVPNPYNLLCALPPQRSWYTVLDLKDAFFCLRLHPTSQPLFAFEWRDPGTGRTGQLTWTRLPQGFKNSPTIFNEALHRDLANFRIQHPQVTLLQYVDDLLLAGATKQDCLEGTKALLLELSDLGYRASAKKAQICRREVTYLGYSLRDGQRWLTEARKKTVVQIPAPTTAKQVREFLGTAGFCRLWIPGFATLAAPLYPLTKPKGEFSWAPEHQKAFDAIKKALLSAPALALPDVTKPFTLYVDERKGVARGVLTQTLGPWRRPVAYLSKKLDPVASGWPVCLKAIAAVAILVKDADKLTLGQNITVIAPHALENIVRQPPDRWMTNARMTHYQSLLLTERVTFAPPAALNPATLLPEETDEPVTHDCHQLLIEETGVRKDLTDIPLTGEVLTWFTDGSSYVVEGKRMAGAAVVDGTRTIWASSLPEGTSAQKAELMALTQALRLAEGKSINIYTDSRYAFATAHVHGAIYKQRGWLTSAGREIKNKEEILSLLEALHLPKRLAIIHCPGHQKAKDPISRGNQMADRVAKQAAQGVNLLAGKRTADGSEFEKRTADGSEFESPKKKAKVE

SEQ ID NO: 359 - protein, 2088 aa, synthetic construct; identical to SEQ ID NO: 175
  source 1..2088: note = Description of Artificial Sequence: Synthetic polypeptide

SEQ ID NO: 360 - protein, 2087 aa, synthetic construct
  source 1..2087: note = Description of Artificial Sequence: Synthetic polypeptide
MPAAKRVKLDGGDKKYSIGLDIGTNSVGWAVITDEYKVPSKKFKVLGNTDRHSIKKNLIGALLFDSGETAEATRLKRTARRRYTRRKNRICYLQEIFSNEMAKVDDSFFHRLEESFLVEEDKKHERHPIFGNIVDEVAYHEKYPTIYHLRKKLVDSTDKADLRLIYLALAHMIKFRGHFLIEGDLNPDNSDVDKLFIQLVQTYNQLFEENPINASGVDAKAILSARLSKSRRLENLIAQLPGEKKNGLFGNLIALSLGLTPNFKSNFDLAEDAKLQLSKDTYDDDLDNLLAQIGDQYADLFLAAKNLSDAILLSDILRVNTEITKAPLSASMIKRYDEHHQDLTLLKALVRQQLPEKYKEIFFDQSKNGYAGYIDGGASQEEFYKFIKPILEKMDGTEELLVKLNREDLLRKQRTFDNGSIPHQIHLGELHAILRRQEDFYPFLKDNREKIEKILTFRIPYYVGPLARGNSRFAWMTRKSEETITPWNFEEVVDKGASAQSFIERMTNFDKNLPNEKVLPKHSLLYEYFTVYNELTKVKYVTEGMRKPAFLSGEQKKAIVDLLFKTNRKVTVKQLKEDYFKKIECFDSVEISGVEDRFNASLGTYHDLLKIIKDKDFLDNEENEDILEDIVLTLTLFEDREMIEERLKTYAHLFDDKVMKQLKRRRYTGWGRLSRKLINGIRDKQSGKTILDFLKSDGFANRNFMQLIHDDSLTFKEDIQKAQVSGQGDSLHEHIANLAGSPAIKKGILQTVKVVDELVKVMGRHKPENIVIEMARENQTTQKGQKNSRERMKRIEEGIKELGSQILKEHPVENTQLQNEKLYLYYLQNGRDMYVDQELDINRLSDYDVDHIVPQSFLKDDSIDNKVLTRSDKARGKSDNVPSEEVVKKMKNYWRQLLNAKLITQRKFDNLTKAERGGLSELDKAGFIKRQLVETRQITKHVAQILDSRMNTKYDENDKLIREVKVITLKSKLVSDFRKDFQFYKVREINNYHHAHDAYLNAVVGTALIKKYPKLESEFVYGDYKVYDVRKMIAKSEQEIGKATAKYFFYSNIMNFFKTEITLANGEIRKRPLIETNGETGEIVWDKGRDFATVRKVLSMPQVNIVKKTEVQTGGFSKESILPKRNSDKLIARKKDWDPKKYGGFDSPTVAYSVLVVAKVEKGKSKKLKSVKELLGITIMERSSFEKNPIDFLEAKGYKEVKKDLIIKLPKYSLFELENGRKRMLASAGELQKGNELALPSKYVNFLYLASHYEKLKGSPEDNEQKQLFVEQHKHYLDEIIEQISEFSKRVILADANLDKVLSAYNKHRDKPIREQAENIIHLFTLTNLGAPAAFKYFDTTIDRKRYTSTKEVLDATLIHQSITGLYETRIDLSQLGGDGGEAAAKGSSGGTLQLDDEYRLYSPLVKPDQNIQFWLEQFPQAWAETAGMGLAKQVPPQVIQLKASATPVSVRQYPLSKEAQEGIRPHVQRLIQQGILVPVQSPWNTPLLPVRKPGTNDYRPVQDLREVNKRVQDIHPTVPNPYNLLCALPPQRSWYTVLDLKDAFFCLRLHPTSQPLFAFEWRDPGTGRTGQLTWTRLPQGFKNSPTIFNEALHRDLANFRIQHPQVTLLQYVDDLLLAGATKQDCLEGTKALLLELSDLGYRASAKKAQICRREVTYLGYSLRDGQRWLTEARKKTVVQIPAPTTAKQVREFLGTAGFCRLWIPGFATLAAPLYPLTKPKGEFSWAPEHQKAFDAIKKALLSAPALALPDVTKPFTLYVDERKGVARGVLTQTLGPWRRPVAYLSKKLDPVASGWPVCLKAIAAVAILVKDADKLTLGQNITVIAPHALENIVRQPPDRWMTNARMTHYQSLLLTERVTFAPPAALNPATLLPEETDEPVTHDCHQLLIEETGVRKDLTDIPLTGEVLTWFTDGSSYVVEGKRMAGAAVVDGTRTIWASSLPEGTSAQKAELMALTQALRLAEGKSINIYTDSRYAFATAHVHGAIYKQRGWLTSAGREIKNKEEILSLLEALHLPKRLAIIHCPGHQKAKDPISRGNQMADRVAKQAAQGVNLLAGKRTADGSEFEKRTADGSEFESPKKKAKVE

SEQ ID NO: 361 - protein, 2090 aa, synthetic construct
  source 1..2090: note = Description of Artificial Sequence: Synthetic polypeptide
MPAAKRVKLDGGDKKYSIGLDIGTNSVGWAVITDEYKVPSKKFKVLGNTDRHSIKKNLIGALLFDSGETAEATRLKRTARRRYTRRKNRICYLQEIFSNEMAKVDDSFFHRLEESFLVEEDKKHERHPIFGNIVDEVAYHEKYPTIYHLRKKLVDSTDKADLRLIYLALAHMIKFRGHFLIEGDLNPDNSDVDKLFIQLVQTYNQLFEENPINASGVDAKAILSARLSKSRRLENLIAQLPGEKKNGLFGNLIALSLGLTPNFKSNFDLAEDAKLQLSKDTYDDDLDNLLAQIGDQYADLFLAAKNLSDAILLSDILRVNTEITKAPLSASMIKRYDEHHQDLTLLKALVRQQLPEKYKEIFFDQSKNGYAGYIDGGASQEEFYKFIKPILEKMDGTEELLVKLNREDLLRKQRTFDNGSIPHQIHLGELHAILRRQEDFYPFLKDNREKIEKILTFRIPYYVGPLARGNSRFAWMTRKSEETITPWNFEEVVDKGASAQSFIERMTNFDKNLPNEKVLPKHSLLYEYFTVYNELTKVKYVTEGMRKPAFLSGEQKKAIVDLLFKTNRKVTVKQLKEDYFKKIECFDSVEISGVEDRFNASLGTYHDLLKIIKDKDFLDNEENEDILEDIVLTLTLFEDREMIEERLKTYAHLFDDKVMKQLKRRRYTGWGRLSRKLINGIRDKQSGKTILDFLKSDGFANRNFMQLIHDDSLTFKEDIQKAQVSGQGDSLHEHIANLAGSPAIKKGILQTVKVVDELVKVMGRHKPENIVIEMARENQTTQKGQKNSRERMKRIEEGIKELGSQILKEHPVENTQLQNEKLYLYYLQNGRDMYVDQELDINRLSDYDVDHIVPQSFLKDDSIDNKVLTRSDKARGKSDNVPSEEVVKKMKNYWRQLLNAKLITQRKFDNLTKAERGGLSELDKAGFIKRQLVETRQITKHVAQILDSRMNTKYDENDKLIREVKVITLKSKLVSDFRKDFQFYKVREINNYHHAHDAYLNAVVGTALIKKYPKLESEFVYGDYKVYDVRKMIAKSEQEIGKATAKYFFYSNIMNFFKTEITLANGEIRKRPLIETNGETGEIVWDKGRDFATVRKVLSMPQVNIVKKTEVQTGGFSKESILPKRNSDKLIARKKDWDPKKYGGFDSPTVAYSVLVVAKVEKGKSKKLKSVKELLGITIMERSSFEKNPIDFLEAKGYKEVKKDLIIKLPKYSLFELENGRKRMLASAGELQKGNELALPSKYVNFLYLASHYEKLKGSPEDNEQKQLFVEQHKHYLDEIIEQISEFSKRVILADANLDKVLSAYNKHRDKPIREQAENIIHLFTLTNLGAPAAFKYFDTTIDRKRYTSTKEVLDATLIHQSITGLYETRIDLSQLGGDGGGSSEAAAKGGSGGTLQLDDEYRLYSPLVKPDQNIQFWLEQFPQAWAETAGMGLAKQVPPQVIQLKASATPVSVRQYPLSKEAQEGIRPHVQRLIQQGILVPVQSPWNTPLLPVRKPGTNDYRPVQDLREVNKRVQDIHPTVPNPYNLLCALPPQRSWYTVLDLKDAFFCLRLHPTSQPLFAFEWRDPGTGRTGQLTWTRLPQGFKNSPTIFNEALHRDLANFRIQHPQVTLLQYVDDLLLAGATKQDCLEGTKALLLELSDLGYRASAKKAQICRREVTYLGYSLRDGQRWLTEARKKTVVQIPAPTTAKQVREFLGTAGFCRLWIPGFATLAAPLYPLTKPKGEFSWAPEHQKAFDAIKKALLSAPALALPDVTKPFTLYVDERKGVARGVLTQTLGPWRRPVAYLSKKLDPVASGWPVCLKAIAAVAILVKDADKLTLGQNITVIAPHALENIVRQPPDRWMTNARMTHYQSLLLTERVTFAPPAALNPATLLPEETDEPVTHDCHQLLIEETGVRKDLTDIPLTGEVLTWFTDGSSYVVEGKRMAGAAVVDGTRTIWASSLPEGTSAQKAELMALTQALRLAEGKSINIYTDSRYAFATAHVHGAIYKQRGWLTSAGREIKNKEEILSLLEALHLPKRLAIIHCPGHQKAKDPISRGNQMADRVAKQAAQGVNLLAGKRTADGSEFEKRTADGSEFESPKKKAKVE

SEQ ID NO: 362 - protein, 2087 aa, synthetic construct; identical to SEQ ID NO: 114
  source 1..2087: note = Description of Artificial Sequence: Synthetic polypeptide

SEQ ID NO: 363 - protein, 2090 aa, synthetic construct; identical to SEQ ID NO: 139
  source 1..2090: note = Description of Artificial Sequence: Synthetic polypeptide

SEQ ID NO: 364 - protein, 2088 aa, synthetic construct; identical to SEQ ID NO: 181
  source 1..2088: note = Description of Artificial Sequence: Synthetic polypeptide

SEQ ID NO: 365 - protein, 2090 aa, synthetic construct; identical to SEQ ID NO: 133
  source 1..2090: note = Description of Artificial Sequence: Synthetic polypeptide

SEQ ID NO: 366 - protein, 2084 aa, synthetic construct; identical to SEQ ID NO: 163
  source 1..2084: note = Description of Artificial Sequence: Synthetic polypeptide

SEQ ID NO: 367 - protein, 2084 aa, synthetic construct; identical to SEQ ID NO: 166
  source 1..2084: note = Description of Artificial Sequence: Synthetic polypeptide

SEQ ID NO: 368 - protein, 2090 aa, synthetic construct; identical to SEQ ID NO: 170
  source 1..2090: note = Description of Artificial Sequence: Synthetic polypeptide

SEQ ID NO: 369 - protein, 2085 aa, synthetic construct; identical to SEQ ID NO: 165
  source 1..2085: note = Description of Artificial Sequence: Synthetic polypeptide

SEQ ID NO: 370 - protein, 2091 aa, synthetic construct; identical to SEQ ID NO: 153
  source 1..2091: note = Description of Artificial Sequence: Synthetic polypeptide

SEQ ID NO: 371 - protein, 2088 aa, synthetic construct
  source 1..2088: note = Description of Artificial Sequence: Synthetic polypeptide
MPAAKRVKLDGGDKKYSIGLDIGTNSVGWAVITDEYKVPSKKFKVLGNTDRHSIKKNLIGALLFDSGETAEATRLKRTARRRYTRRKNRICYLQEIFSNEMAKVDDSFFHRLEESFLVEEDKKHERHPIFGNIVDEVAYHEKYPTIYHLRKKLVDSTDKADLRLIYLALAHMIKFRGHFLIEGDLNPDNSDVDKLFIQLVQTYNQLFEENPINASGVDAKAILSARLSKSRRLENLIAQLPGEKKNGLFGNLIALSLGLTPNFKSNFDLAEDAKLQLSKDTYDDDLDNLLAQIGDQYADLFLAAKNLSDAILLSDILRVNTEITKAPLSASMIKRYDEHHQDLTLLKALVRQQLPEKYKEIFFDQSKNGYAGYIDGGASQEEFYKFIKPILEKMDGTEELLVKLNREDLLRKQRTFDNGSIPHQIHLGELHAILRRQEDFYPFLKDNREKIEKILTFRIPYYVGPLARGNSRFAWMTRKSEETITPWNFEEVVDKGASAQSFIERMTNFDKNLPNEKVLPKHSLLYEYFTVYNELTKVKYVTEGMRKPAFLSGEQKKAIVDLLFKTNRKVTVKQLKEDYFKKIECFDSVEISGVEDRFNASLGTYHDLLKIIKDKDFLDNEENEDILEDIVLTLTLFEDREMIEERLKTYAHLFDDKVMKQLKRRRYTGWGRLSRKLINGIRDKQSGKTILDFLKSDGFANRNFMQLIHDDSLTFKEDIQKAQVSGQGDSLHEHIANLAGSPAIKKGILQTVKVVDELVKVMGRHKPENIVIEMARENQTTQKGQKNSRERMKRIEEGIKELGSQILKEHPVENTQLQNEKLYLYYLQNGRDMYVDQELDINRLSDYDVDHIVPQSFLKDDSIDNKVLTRSDKARGKSDNVPSEEVVKKMKNYWRQLLNAKLITQRKFDNLTKAERGGLSELDKAGFIKRQLVETRQITKHVAQILDSRMNTKYDENDKLIREVKVITLKSKLVSDFRKDFQFYKVREINNYHHAHDAYLNAVVGTALIKKYPKLESEFVYGDYKVYDVRKMIAKSEQEIGKATAKYFFYSNIMNFFKTEITLANGEIRKRPLIETNGETGEIVWDKGRDFATVRKVLSMPQVNIVKKTEVQTGGFSKESILPKRNSDKLIARKKDWDPKKYGGFDSPTVAYSVLVVAKVEKGKSKKLKSVKELLGITIMERSSFEKNPIDFLEAKGYKEVKKDLIIKLPKYSLFELENGRKRMLASAGELQKGNELALPSKYVNFLYLASHYEKLKGSPEDNEQKQLFVEQHKHYLDEIIEQISEFSKRVILADANLDKVLSAYNKHRDKPIREQAENIIHLFTLTNLGAPAAFKYFDTTIDRKRYTSTKEVLDATLIHQSITGLYETRIDLSQLGGDGGPAPGGGGSSGGTLQLDDEYRLYSPLVKPDQNIQFWLEQFPQAWAETAGMGLAKQVPPQVIQLKASATPVSVRQYPLSKEAQEGIRPHVQRLIQQGILVPVQSPWNTPLLPVRKPGTNDYRPVQDLREVNKRVQDIHPTVPNPYNLLCALPPQRSWYTVLDLKDAFFCLRLHPTSQPLFAFEWRDPGTGRTGQLTWTRLPQGFKNSPTIFNEALHRDLANFRIQHPQVTLLQYVDDLLLAGATKQDCLEGTKALLLELSDLGYRASAKKAQICRREVTYLGYSLRDGQRWLTEARKKTVVQIPAPTTAKQVREFLGTAGFCRLWIPGFATLAAPLYPLTKPKGEFSWAPEHQKAFDAIKKALLSAPALALPDVTKPFTLYVDERKGVARGVLTQTLGPWRRPVAYLSKKLDPVASGWPVCLKAIAAVAILVKDADKLTLGQNITVIAPHALENIVRQPPDRWMTNARMTHYQSLLLTERVTFAPPAALNPATLLPEETDEPVTHDCHQLLIEETGVRKDLTDIPLTGEVLTWFTDGSSYVVEGKRMAGAAVVDGTRTIWASSLPEGTSAQKAELMALTQALRLAEGKSINIYTDSRYAFATAHVHGAIYKQRGWLTSAGREIKNKEEILSLLEALHLPKRLAIIHCPGHQKAKDPISRGNQMADRVAKQAAQGVNLLAGKRTADGSEFEKRTADGSEFESPKKKAKVE

SEQ ID NO: 372 - protein, 2090 aa, synthetic construct; identical to SEQ ID NO: 172
  source 1..2090: note = Description of Artificial Sequence: Synthetic polypeptide

SEQ ID NO: 373 - protein, 2088 aa, synthetic construct
  source 1..2088: note = Description of Artificial Sequence: Synthetic polypeptide
MPAAKRVKLDGGDKKYSIGLDIGTNSVGWAVITDEYKVPSKKFKVLGNTDRHSIKKNLIGALLFDSGETAEATRLKRTARRRYTRRKNRICYLQEIFSNEMAKVDDSFFHRLEESFLVEEDKKHERHPIFGNIVDEVAYHEKYPTIYHLRKKLVDSTDKADLRLIYLALAHMIKFRGHFLIEGDLNPDNSDVDKLFIQLVQTYNQLFEENPINASGVDAKAILSARLSKSRRLENLIAQLPGEKKNGLFGNLIALSLGLTPNFKSNFDLAEDAKLQLSKDTYDDDLDNLLAQIGDQYADLFLAAKNLSDAILLSDILRVNTEITKAPLSASMIKRYDEHHQDLTLLKALVRQQLPEKYKEIFFDQSKNGYAGYIDGGASQEEFYKFIKPILEKMDGTEELLVKLNREDLLRKQRTFDNGSIPHQIHLGELHAILRRQEDFYPFLKDNREKIEKILTFRIPYYVGPLARGNSRFAWMTRKSEETITPWNFEEVVDKGASAQSFIERMTNFDKNLPNEKVLPKHSLLYEYFTVYNELTKVKYVTEGMRKPAFLSGEQKKAIVDLLFKTNRKVTVKQLKEDYFKKIECFDSVEISGVEDRFNASLGTYHDLLKIIKDKDFLDNEENEDILEDIVLTLTLFEDREMIEERLKTYAHLFDDKVMKQLKRRRYTGWGRLSRKLINGIRDKQSGKTILDFLKSDGFANRNFMQLIHDDSLTFKEDIQKAQVSGQGDSLHEHIANLAGSPAIKKGILQTVKVVDELVKVMGRHKPENIVIEMARENQTTQKGQKNSRERMKRIEEGIKELGSQILKEHPVENTQLQNEKLYLYYLQNGRDMYVDQELDINRLSDYDVDHIVPQSFLKDDSIDNKVLTRSDKARGKSDNVPSEEVVKKMKNYWRQLLNAKLITQRKFDNLTKAERGGLSELDKAGFIKRQLVETRQITKHVAQILDSRMNTKYDENDKLIREVKVITLKSKLVSDFRKDFQFYKVREINNYHHAHDAYLNAVVGTALIKKYPKLESEFVYGDYKVYDVRKMIAKSEQEIGKATAKYFFYSNIMNFFKTEITLANGEIRKRPLIETNGETGEIVWDKGRDFATVRKVLSMPQVNIVKKTEVQTGGFSKESILPKRNSDKLIARKKDWDPKKYGGFDSPTVAYSVLVVAKVEKGKSKKLKSVKELLGITIMERSSFEKNPIDFLEAKGYKEVKKDLIIKLPKYSLFELENGRKRMLASAGELQKGNELALPSKYVNFLYLASHYEKLKGSPEDNEQKQLFVEQHKHYLDEIIEQISEFSKRVILADANLDKVLSAYNKHRDKPIREQAENIIHLFTLTNLGAPAAFKYFDTTIDRKRYTSTKEVLDATLIHQSITGLYETRIDLSQLGGDGGGGSGGGPAPGGTLQLDDEYRLYSPLVKPDQNIQFWLEQFPQAWAETAGMGLAKQVPPQVIQLKASATPVSVRQYPLSKEAQEGIRPHVQRLIQQGILVPVQSPWNTPLLPVRKPGTNDYRPVQDLREVNKRVQDIHPTVPNPYNLLCALPPQRSWYTVLDLKDAFFCLRLHPTSQPLFAFEWRDPGTGRTGQLTWTRLPQGFKNSPTIFNEALHRDLANFRIQHPQVTLLQYVDDLLLAGATKQDCLEGTKALLLELSDLGYRASAKKAQICRREVTYLGYSLRDGQRWLTEARKKTVVQIPAPTTAKQVREFLGTAGFCRLWIPGFATLAAPLYPLTKPKGEFSWAPEHQKAFDAIKKALLSAPALALPDVTKPFTLYVDERKGVARGVLTQTLGPWRRPVAYLSKKLDPVASGWPVCLKAIAAVAILVKDADKLTLGQNITVIAPHALENIVRQPPDRWMTNARMTHYQSLLLTERVTFAPPAALNPATLLPEETDEPVTHDCHQLLIEETGVRKDLTDIPLTGEVLTWFTDGSSYVVEGKRMAGAAVVDGTRTIWASSLPEGTSAQKAELMALTQALRLAEGKSINIYTDSRYAFATAHVHGAIYKQRGWLTSAGREIKNKEEILSLLEALHLPKRLAIIHCPGHQKAKDPISRGNQMADRVAKQAAQGVNLLAGKRTADGSEFEKRTADGSEFESPKKKAKVE

SEQ ID NO: 374 - protein, 2094 aa, synthetic construct; identical to SEQ ID NO: 118
  source 1..2094: note = Description of Artificial Sequence: Synthetic polypeptide

SEQ ID NO: 375 - protein, 2087 aa, synthetic construct
  source 1..2087: note = Description of Artificial Sequence: Synthetic polypeptide
MPAAKRVKLDGGDKKYSIGLDIGTNSVGWAVITDEYKVPSKKFKVLGNTDRHSIKKNLIGALLFDSGETAEATRLKRTARRRYTRRKNRICYLQEIFSNEMAKVDDSFFHRLEESFLVEEDKKHERHPIFGNIVDEVAYHEKYPTIYHLRKKLVDSTDKADLRLIYLALAHMIKFRGHFLIEGDLNPDNSDVDKLFIQLVQTYNQLFEENPINASGVDAKAILSARLSKSRRLENLIAQLPGEKKNGLFGNLIALSLGLTPNFKSNFDLAEDAKLQLSKDTYDDDLDNLLAQIGDQYADLFLAAKNLSDAILLSDILRVNTEITKAPLSASMIKRYDEHHQDLTLLKALVRQQLPEKYKEIFFDQSKNGYAGYIDGGASQEEFYKFIKPILEKMDGTEELLVKLNREDLLRKQRTFDNGSIPHQIHLGELHAILRRQEDFYPFLKDNREKIEKILTFRIPYYVGPLARGNSRFAWMTRKSEETITPWNFEEVVDKGASAQSFIERMTNFDKNLPNEKVLPKHSLLYEYFTVYNELTKVKYVTEGMRKPAFLSGEQKKAIVDLLFKTNRKVTVKQLKEDYFKKIECFDSVEISGVEDRFNASLGTYHDLLKIIKDKDFLDNEENEDILEDIVLTLTLFEDREMIEERLKTYAHLFDDKVMKQLKRRRYTGWGRLSRKLINGIRDKQSGKTILDFLKSDGFANRNFMQLIHDDSLTFKEDIQKAQVSGQGDSLHEHIANLAGSPAIKKGILQTVKVVDELVKVMGRHKPENIVIEMARENQTTQKGQKNSRERMKRIEEGIKELGSQILKEHPVENTQLQNEKLYLYYLQNGRDMYVDQELDINRLSDYDVDHIVPQSFLKDDSIDNKVLTRSDKARGKSDNVPSEEVVKKMKNYWRQLLNAKLITQRKFDNLTKAERGGLSELDKAGFIKRQLVETRQITKHVAQILDSRMNTKYDENDKLIREVKVITLKSKLVSDFRKDFQFYKVREINNYHHAHDAYLNAVVGTALIKKYPKLESEFVYGDYKVYDVRKMIAKSEQEIGKATAKYFFYSNIMNFFKTEITLANGEIRKRPLIETNGETGEIVWDKGRDFATVRKVLSMPQVNIVKKTEVQTGGFSKESILPKRNSDKLIARKKDWDPKKYGGFDSPTVAYSVLVVAKVEKGKSKKLKSVKELLGITIMERSSFEKNPIDFLEAKGYKEVKKDLIIKLPKYSLFELENGRKRMLASAGELQKGNELALPSKYVNFLYLASHYEKLKGSPEDNEQKQLFVEQHKHYLDEIIEQISEFSKRVILADANLDKVLSAYNKHRDKPIREQAENIIHLFTLTNLGAPAAFKYFDTTIDRKRYTSTKEVLDATLIHQSITGLYETRIDLSQLGGDGGPAPEAAAKGGTLQLDDEYRLYSPLVKPDQNIQFWLEQFPQAWAETAGMGLAKQVPPQVIQLKASATPVSVRQYPLSKEAQEGIRPHVQRLIQQGILVPVQSPWNTPLLPVRKPGTNDYRPVQDLREVNKRVQDIHPTVPNPYNLLCALPPQRSWYTVLDLKDAFFCLRLHPTSQPLFAFEWRDPGTGRTGQLTWTRLPQGFKNSPTIFNEALHRDLANFRIQHPQVTLLQYVDDLLLAGATKQDCLEGTKALLLELSDLGYRASAKKAQICRREVTYLGYSLRDGQRWLTEARKKTVVQIPAPTTAKQVREFLGTAGFCRLWIPGFATLAAPLYPLTKPKGEFSWAPEHQKAFDAIKKALLSAPALALPDVTKPFTLYVDERKGVARGVLTQTLGPWRRPVAYLSKKLDPVASGWPVCLKAIAAVAILVKDADKLTLGQNITVIAPHALENIVRQPPDRWMTNARMTHYQSLLLTERVTFAPPAALNPATLLPEETDEPVTHDCHQLLIEETGVRKDLTDIPLTGEVLTWFTDGSSYVVEGKRMAGAAVVDGTRTIWASSLPEGTSAQKAELMALTQALRLAEGKSINIYTDSRYAFATAHVHGAIYKQRGWLTSAGREIKNKEEILSLLEALHLPKRLAIIHCPGHQKAKDPISRGNQMADRVAKQAAQGVNLLAGKRTADGSEFEKRTADGSEFESPKKKAKVE

SEQ ID NO: 376 - protein, 2090 aa, synthetic construct; identical to SEQ ID NO: 154
  source 1..2090: note = Description of Artificial Sequence: Synthetic polypeptide

SEQ ID NO: 377 - protein, 2091 aa, synthetic construct; identical to SEQ ID NO: 145
  source 1..2091: note = Description of Artificial Sequence: Synthetic polypeptide

SEQ ID NO: 378 - protein, 2089 aa, synthetic construct
  source 1..2089: note = Description of Artificial Sequence: Synthetic polypeptide
MPAAKRVKLDGGDKKYSIGLDIGTNSVGWAVITDEYKVPSKKFKVLGNTDRHSIKKNLIGALLFDSGETAEATRLKRTARRRYTRRKNRICYLQEIFSNEMAKVDDSFFHRLEESFLVEEDKKHERHPIFGNIVDEVAYHEKYPTIYHLRKKLVDSTDKADLRLIYLALAHMIKFRGHFLIEGDLNPDNSDVDKLFIQLVQTYNQLFEENPINASGVDAKAILSARLSKSRRLENLIAQLPGEKKNGLFGNLIALSLGLTPNFKSNFDLAEDAKLQLSKDTYDDDLDNLLAQIGDQYADLFLAAKNLSDAILLSDILRVNTEITKAPLSASMIKRYDEHHQDLTLLKALVRQQLPEKYKEIFFDQSKNGYAGYIDGGASQEEFYKFIKPILEKMDGTEELLVKLNREDLLRKQRTFDNGSIPHQIHLGELHAILRRQEDFYPFLKDNREKIEKILTFRIPYYVGPLARGNSRFAWMTRKSEETITPWNFEEVVDKGASAQSFIERMTNFDKNLPNEKVLPKHSLLYEYFTVYNELTKVKYVTEGMRKPAFLSGEQKKAIVDLLFKTNRKVTVKQLKEDYFKKIECFDSVEISGVEDRFNASLGTYHDLLKIIKDKDFLDNEENEDILEDIVLTLTLFEDREMIEERLKTYAHLFDDKVMKQLKRRRYTGWGRLSRKLINGIRDKQSGKTILDFLKSDGFANRNFMQLIHDDSLTFKEDIQKAQVSGQGDSLHEHIANLAGSPAIKKGILQTVKVVDELVKVMGRHKPENIVIEMARENQTTQKGQKNSRERMKRIEEGIKELGSQILKEHPVENTQLQNEKLYLYYLQNGRDMYVDQELDINRLSDYDVDHIVPQSFLKDDSIDNKVLTRSDKARGKSDNVPSEEVVKKMKNYWRQLLNAKLITQRKFDNLTKAERGGLSELDKAGFIKRQLVETRQITKHVAQILDSRMNTKYDENDKLIREVKVITLKSKLVSDFRKDFQFYKVREINNYHHAHDAYLNAVVGTALIKKYPKLESEFVYGDYKVYDVRKMIAKSEQEIGKATAKYFFYSNIMNFFKTEITLANGEIRKRPLIETNGETGEIVWDKGRDFATVRKVLSMPQVNIVKKTEVQTGGFSKESILPKRNSDKLIARKKDWDPKKYGGFDSPTVAYSVLVVAKVEKGKSKKLKSVKELLGITIMERSSFEKNPIDFLEAKGYKEVKKDLIIKLPKYSLFELENGRKRMLASAGELQKGNELALPSKYVNFLYLASHYEKLKGSPEDNEQKQLFVEQHKHYLDEIIEQISEFSKRVILADANLDKVLSAYNKHRDKPIREQAENIIHLFTLTNLGAPAAFKYFDTTIDRKRYTSTKEVLDATLIHQSITGLYETRIDLSQLGGDGGGGGGSGGGGSGGTLQLDDEYRLYSPLVKPDQNIQFWLEQFPQAWAETAGMGLAKQVPPQVIQLKASATPVSVRQYPLSKEAQEGIRPHVQRLIQQGILVPVQSPWNTPLLPVRKPGTNDYRPVQDLREVNKRVQDIHPTVPNPYNLLCALPPQRSWYTVLDLKDAFFCLRLHPTSQPLFAFEWRDPGTGRTGQLTWTRLPQGFKNSPTIFNEALHRDLANFRIQHPQVTLLQYVDDLLLAGATKQDCLEGTKALLLELSDLGYRASAKKAQICRREVTYLGYSLRDGQRWLTEARKKTVVQIPAPTTAKQVREFLGTAGFCRLWIPGFATLAAPLYPLTKPKGEFSWAPEHQKAFDAIKKALLSAPALALPDVTKPFTLYVDERKGVARGVLTQTLGPWRRPVAYLSKKLDPVASGWPVCLKAIAAVAILVKDADKLTLGQNITVIAPHALENIVRQPPDRWMTNARMTHYQSLLLTERVTFAPPAALNPATLLPEETDEPVTHDCHQLLIEETGVRKDLTDIPLTGEVLTWFTDGSSYVVEGKRMAGAAVVDGTRTIWASSLPEGTSAQKAELMALTQALRLAEGKSINIYTDSRYAFATAHVHGAIYKQRGWLTSAGREIKNKEEILSLLEALHLPKRLAIIHCPGHQKAKDPISRGNQMADRVAKQAAQGVNLLAGKRTADGSEFEKRTADGSEFESPKKKAKVE

SEQ ID NO: 379 - protein, 2088 aa, synthetic construct
  source 1..2088: note = Description of Artificial Sequence: Synthetic polypeptide
MPAAKRVKLDGGDKKYSIGLDIGTNSVGWAVITDEYKVPSKKFKVLGNTDRHSIKKNLIGALLFDSGETAEATRLKRTARRRYTRRKNRICYLQEIFSNEMAKVDDSFFHRLEESFLVEEDKKHERHPIFGNIVDEVAYHEKYPTIYHLRKKLVDSTDKADLRLIYLALAHMIKFRGHFLIEGDLNPDNSDVDKLFIQLVQTYNQLFEENPINASGVDAKAILSARLSKSRRLENLIAQLPGEKKNGLFGNLIALSLGLTPNFKSNFDLAEDAKLQLSKDTYDDDLDNLLAQIGDQYADLFLAAKNLSDAILLSDILRVNTEITKAPLSASMIKRYDEHHQDLTLLKALVRQQLPEKYKEIFFDQSKNGYAGYIDGGASQEEFYKFIKPILEKMDGTEELLVKLNREDLLRKQRTFDNGSIPHQIHLGELHAILRRQEDFYPFLKDNREKIEKILTFRIPYYVGPLARGNSRFAWMTRKSEETITPWNFEEVVDKGASAQSFIERMTNFDKNLPNEKVLPKHSLLYEYFTVYNELTKVKYVTEGMRKPAFLSGEQKKAIVDLLFKTNRKVTVKQLKEDYFKKIECFDSVEISGVEDRFNASLGTYHDLLKIIKDKDFLDNEENEDILEDIVLTLTLFEDREMIEERLKTYAHLFDDKVMKQLKRRRYTGWGRLSRKLINGIRDKQSGKTILDFLKSDGFANRNFMQLIHDDSLTFKEDIQKAQVSGQGDSLHEHIANLAGSPAIKKGILQTVKVVDELVKVMGRHKPENIVIEMARENQTTQKGQKNSRERMKRIEEGIKELGSQILKEHPVENTQLQNEKLYLYYLQNGRDMYVDQELDINRLSDYDVDHIVPQSFLKDDSIDNKVLTRSDKARGKSDNVPSEEVVKKMKNYWRQLLNAKLITQRKFDNLTKAERGGLSELDKAGFIKRQLVETRQITKHVAQILDSRMNTKYDENDKLIREVKVITLKSKLVSDFRKDFQFYKVREINNYHHAHDAYLNAVVGTALIKKYPKLESEFVYGDYKVYDVRKMIAKSEQEIGKATAKYFFYSNIMNFFKTEITLANGEIRKRPLIETNGETGEIVWDKGRDFATVRKVLSMPQVNIVKKTEVQTGGFSKESILPKRNSDKLIARKKDWDPKKYGGFDSPTVAYSVLVVAKVEKGKSKKLKSVKELLGITIMERSSFEKNPIDFLEAKGYKEVKKDLIIKLPKYSLFELENGRKRMLASAGELQKGNELALPSKYVNFLYLASHYEKLKGSPEDNEQKQLFVEQHKHYLDEIIEQISEFSKRVILADANLDKVLSAYNKHRDKPIREQAENIIHLFTLTNLGAPAAFKYFDTTIDRKRYTSTKEVLDATLIHQSITGLYETRIDLSQLGGDGGGSSPAPGGGGGTLQLDDEYRLYSPLVKPDQNIQFWLEQFPQAWAETAGMGLAKQVPPQVIQLKASATPVSVRQYPLSKEAQEGIRPHVQRLIQQGILVPVQSPWNTPLLPVRKPGTNDYRPVQDLREVNKRVQDIHPTVPNPYNLLCALPPQRSWYTVLDLKDAFFCLRLHPTSQPLFAFEWRDPGTGRTGQLTWTRLPQGFKNSPTIFNEALHRDLANFRIQHPQVTLLQYVDDLLLAGATKQDCLEGTKALLLELSDLGYRASAKKAQICRREVTYLGYSLRDGQRWLTEARKKTVVQIPAPTTAKQVREFLGTAGFCRLWIPGFATLAAPLYPLTKPKGEFSWAPEHQKAFDAIKKALLSAPALALPDVTKPFTLYVDERKGVARGVLTQTLGPWRRPVAYLSKKLDPVASGWPVCLKAIAAVAILVKDADKLTLGQNITVIAPHALENIVRQPPDRWMTNARMTHYQSLLLTERVTFAPPAALNPATLLPEETDEPVTHDCHQLLIEETGVRKDLTDIPLTGEVLTWFTDGSSYVVEGKRMAGAAVVDGTRTIWASSLPEGTSAQKAELMALTQALRLAEGKSINIYTDSRYAFATAHVHGAIYKQRGWLTSAGREIKNKEEILSLLEALHLPKRLAIIHCPGHQKAKDPISRGNQMADRVAKQAAQGVNLLAGKRTADGSEFEKRTADGSEFESPKKKAKVE

SEQ ID NO: 380 - protein, 2087 aa, synthetic construct; identical to SEQ ID NO: 185
  source 1..2087: note = Description of Artificial Sequence: Synthetic polypeptide

SEQ ID NO: 381 - protein, 2086 aa, synthetic construct; identical to SEQ ID NO: 152
  source 1..2086: note = Description of Artificial Sequence: Synthetic polypeptide

SEQ ID NO: 382 - protein, 2088 aa, synthetic construct
  source 1..2088: note = Description of Artificial Sequence: Synthetic polypeptide
MPAAKRVKLDGGDKKYSIGLDIGTNSVGWAVITDEYKVPSKKFKVLGNTDRHSIKKNLIGALLFDSGETAEATRLKRTARRRYTRRKNRICYLQEIFSNEMAKVDDSFFHRLEESFLVEEDKKHERHPIFGNIVDEVAYHEKYPTIYHLRKKLVDSTDKADLRLIYLALAHMIKFRGHFLIEGDLNPDNSDVDKLFIQLVQTYNQLFEENPINASGVDAKAILSARLSKSRRLENLIAQLPGEKKNGLFGNLIALSLGLTPNFKSNFDLAEDAKLQLSKDTYDDDLDNLLAQIGDQYADLFLAAKNLSDAILLSDILRVNTEITKAPLSASMIKRYDEHHQDLTLLKALVRQQLPEKYKEIFFDQSKNGYAGYIDGGASQEEFYKFIKPILEKMDGTEELLVKLNREDLLRKQRTFDNGSIPHQIHLGELHAILRRQEDFYPFLKDNREKIEKILTFRIPYYVGPLARGNSRFAWMTRKSEETITPWNFEEVVDKGASAQSFIERMTNFDKNLPNEKVLPKHSLLYEYFTVYNELTKVKYVTEGMRKPAFLSGEQKKAIVDLLFKTNRKVTVKQLKEDYFKKIECFDSVEISGVEDRFNASLGTYHDLLKIIKDKDFLDNEENEDILEDIVLTLTLFEDREMIEERLKTYAHLFDDKVMKQLKRRRYTGWGRLSRKLINGIRDKQSGKTILDFLKSDGFANRNFMQLIHDDSLTFKEDIQKAQVSGQGDSLHEHIANLAGSPAIKKGILQTVKVVDELVKVMGRHKPENIVIEMARENQTTQKGQKNSRERMKRIEEGIKELGSQILKEHPVENTQLQNEKLYLYYLQNGRDMYVDQELDINRLSDYDVDHIVPQSFLKDDSIDNKVLTRSDKARGKSDNVPSEEVVKKMKNYWRQLLNAKLITQRKFDNLTKAERGGLSELDKAGFIKRQLVETRQITKHVAQILDSRMNTKYDENDKLIREVKVITLKSKLVSDFRKDFQFYKVREINNYHHAHDAYLNAVVGTALIKKYPKLESEFVYGDYKVYDVRKMIAKSEQEIGKATAKYFFYSNIMNFFKTEITLANGEIRKRPLIETNGETGEIVWDKGRDFATVRKVLSMPQVNIVKKTEVQTGGFSKESILPKRNSDKLIARKKDWDPKKYGGFDSPTVAYSVLVVAKVEKGKSKKLKSVKELLGITIMERSSFEKNPIDFLEAKGYKEVKKDLIIKLPKYSLFELENGRKRMLASAGELQKGNELALPSKYVNFLYLASHYEKLKGSPEDNEQKQLFVEQHKHYLDEIIEQISEFSKRVILADANLDKVLSAYNKHRDKPIREQAENIIHLFTLTNLGAPAAFKYFDTTIDRKRYTSTKEVLDATLIHQSITGLYETRIDLSQLGGDGGPAPAPAPAPGGTLQLDDEYRLYSPLVKPDQNIQFWLEQFPQAWAETAGMGLAKQVPPQVIQLKASATPVSVRQYPLSKEAQEGIRPHVQRLIQQGILVPVQSPWNTPLLPVRKPGTNDYRPVQDLREVNKRVQDIHPTVPNPYNLLCALPPQRSWYTVLDLKDAFFCLRLHPTSQPLFAFEWRDPGTGRTGQLTWTRLPQGFKNSPTIFNEALHRDLANFRIQHPQVTLLQYVDDLLLAGATKQDCLEGTKALLLELSDLGYRASAKKAQICRREVTYLGYSLRDGQRWLTEARKKTVVQIPAPTTAKQVREFLGTAGFCRLWIPGFATLAAPLYPLTKPKGEFSWAPEHQKAFDAIKKALLSAPALALPDVTKPFTLYVDERKGVARGVLTQTLGPWRRPVAYLSKKLDPVASGWPVCLKAIAAVAILVKDADKLTLGQNITVIAPHALENIVRQPPDRWMTNARMTHYQSLLLTERVTFAPPAALNPATLLPEETDEPVTHDCHQLLIEETGVRKDLTDIPLTGEVLTWFTDGSSYVVEGKRMAGAAVVDGTRTIWASSLPEGTSAQKAELMALTQALRLAEGKSINIYTDSRYAFATAHVHGAIYKQRGWLTSAGREIKNKEEILSLLEALHLPKRLAIIHCPGHQKAKDPISRGNQMADRVAKQAAQGVNLLAGKRTADGSEFEKRTADGSEFESPKKKAKVE

SEQ ID NO: 383 - protein, 2085 aa, synthetic construct; identical to SEQ ID NO: 178
  source 1..2085: note = Description of Artificial Sequence: Synthetic polypeptide

SEQ ID NO: 384 - protein, 2088 aa, synthetic construct; identical to SEQ ID NO: 144
  source 1..2088: note = Description of Artificial Sequence: Synthetic polypeptide

SEQ ID NO: 385 - protein, 2090 aa, synthetic construct
  source 1..2090: note = Description of Artificial Sequence: Synthetic polypeptide
MPAAKRVKLDGGDKKYSIGLDIGTNSVGWAVITDEYKVPSKKFKVLGNTDRHSIKKNLIGALLFDSGETAEATRLKRTARRRYTRRKNRICYLQEIFSNEMAKVDDSFFHRLEESFLVEEDKKHERHPIFGNIVDEVAYHEKYPTIYHLRKKLVDSTDKADLRLIYLALAHMIKFRGHFLIEGDLNPDNSDVDKLFIQLVQTYNQLFEENPINASGVDAKAILSARLSKSRRLENLIAQLPGEKKNGLFGNLIALSLGLTPNFKSNFDLAEDAKLQLSKDTYDDDLDNLLAQIGDQYADLFLAAKNLSDAILLSDILRVNTEITKAPLSASMIKRYDEHHQDLTLLKALVRQQLPEKYKEIFFDQSKNGYAGYIDGGASQEEFYKFIKPILEKMDGTEELLVKLNREDLLRKQRTFDNGSIPHQIHLGELHAILRRQEDFYPFLKDNREKIEKILTFRIPYYVGPLARGNSRFAWMTRKSEETITPWNFEEVVDKGASAQSFIERMTNFDKNLPNEKVLPKHSLLYEYFTVYNELTKVKYVTEGMRKPAFLSGEQKKAIVDLLFKTNRKVTVKQLKEDYFKKIECFDSVEISGVEDRFNASLGTYHDLLKIIKDKDFLDNEENEDILEDIVLTLTLFEDREMIEERLKTYAHLFDDKVMKQLKRRRYTGWGRLSRKLINGIRDKQSGKTILDFLKSDGFANRNFMQLIHDDSLTFKEDIQKAQVSGQGDSLHEHIANLAGSPAIKKGILQTVKVVDELVKVMGRHKPENIVIEMARENQTTQKGQKNSRERMKRIEEGIKELGSQILKEHPVENTQLQNEKLYLYYLQNGRDMYVDQELDINRLSDYDVDHIVPQSFLKDDSIDNKVLTRSDKARGKSDNVPSEEVVKKMKNYWRQLLNAKLITQRKFDNLTKAERGGLSELDKAGFIKRQLVETRQITKHVAQILDSRMNTKYDENDKLIREVKVITLKSKLVSDFRKDFQFYKVREINNYHHAHDAYLNAVVGTALIKKYPKLESEFVYGDYKVYDVRKMIAKSEQEIGKATAKYFFYSNIMNFFKTEITLANGEIRKRPLIETNGETGEIVWDKGRDFATVRKVLSMPQVNIVKKTEVQTGGFSKESILPKRNSDKLIARKKDWDPKKYGGFDSPTVAYSVLVVAKVEKGKSKKLKSVKELLGITIMERSSFEKNPIDFLEAKGYKEVKKDLIIKLPKYSLFELENGRKRMLASAGELQKGNELALPSKYVNFLYLASHYEKLKGSPEDNEQKQLFVEQHKHYLDEIIEQISEFSKRVILADANLDKVLSAYNKHRDKPIREQAENIIHLFTLTNLGAPAAFKYFDTTIDRKRYTSTKEVLDATLIHQSITGLYETRIDLSQLGGDGGPAPGSSEAAAKGGTLQLDDEYRLYSPLVKPDQNIQFWLEQFPQAWAETAGMGLAKQVPPQVIQLKASATPVSVRQYPLSKEAQEGIRPHVQRLIQQGILVPVQSPWNTPLLPVRKPGTNDYRPVQDLREVNKRVQDIHPTVPNPYNLLCALPPQRSWYTVLDLKDAFFCLRLHPTSQPLFAFEWRDPGTGRTGQLTWTRLPQGFKNSPTIFNEALHRDLANFRIQHPQVTLLQYVDDLLLAGATKQDCLEGTKALLLELSDLGYRASAKKAQICRREVTYLGYSLRDGQRWLTEARKKTVVQIPAPTTAKQVREFLGTAGFCRLWIPGFATLAAPLYPLTKPKGEFSWAPEHQKAFDAIKKALLSAPALALPDVTKPFTLYVDERKGVARGVLTQTLGPWRRPVAYLSKKLDPVASGWPVCLKAIAAVAILVKDADKLTLGQNITVIAPHALENIVRQPPDRWMTNARMTHYQSLLLTERVTFAPPAALNPATLLPEETDEPVTHDCHQLLIEETGVRKDLTDIPLTGEVLTWFTDGSSYVVEGKRMAGAAVVDGTRTIWASSLPEGTSAQKAELMALTQALRLAEGKSINIYTDSRYAFATAHVHGAIYKQRGWLTSAGREIKNKEEILSLLEALHLPKRLAIIHCPGHQKAKDPISRGNQMADRVAKQAAQGVNLLAGKRTADGSEFEKRTADGSEFESPKKKAKVE

SEQ ID NO: 386 - protein, 2085 aa, synthetic construct; identical to SEQ ID NO: 123
  source 1..2085: note = Description of Artificial Sequence: Synthetic polypeptide

SEQ ID NO: 387 - protein, 2088 aa, synthetic construct; identical to SEQ ID NO: 155
  source 1..2088: note = Description of Artificial Sequence: Synthetic polypeptide

SEQ ID NO: 388 - protein, 2088 aa, synthetic construct; identical to SEQ ID NO: 134
  source 1..2088: note = Description of Artificial Sequence: Synthetic polypeptide

SEQ ID NO: 389 - protein, 2088 aa, synthetic construct; identical to SEQ ID NO: 171
  source 1..2088: note = Description of Artificial Sequence: Synthetic polypeptide

SEQ ID NO: 390 - protein, 2090 aa, synthetic construct
  source 1..2090: note = Description of Artificial Sequence: Synthetic polypeptide
MPAAKRVKLDGGDKKYSIGLDIGTNSVGWAVITDEYKVPSKKFKVLGNTDRHSIKKNLIGALLFDSGETAEATRLKRTARRRYTRRKNRICYLQEIFSNEMAKVDDSFFHRLEESFLVEEDKKHERHPIFGNIVDEVAYHEKYPTIYHLRKKLVDSTDKADLRLIYLALAHMIKFRGHFLIEGDLNPDNSDVDKLFIQLVQTYNQLFEENPINASGVDAKAILSARLSKSRRLENLIAQLPGEKKNGLFGNLIALSLGLTPNFKSNFDLAEDAKLQLSKDTYDDDLDNLLAQIGDQYADLFLAAKNLSDAILLSDILRVNTEITKAPLSASMIKRYDEHHQDLTLLKALVRQQLPEKYKEIFFDQSKNGYAGYIDGGASQEEFYKFIKPILEKMDGTEELLVKLNREDLLRKQRTFDNGSIPHQIHLGELHAILRRQEDFYPFLKDNREKIEKILTFRIPYYVGPLARGNSRFAWMTRKSEETITPWNFEEVVDKGASAQSFIERMTNFDKNLPNEKVLPKHSLLYEYFTVYNELTKVKYVTEGMRKPAFLSGEQKKAIVDLLFKTNRKVTVKQLKEDYFKKIECFDSVEISGVEDRFNASLGTYHDLLKIIKDKDFLDNEENEDILEDIVLTLTLFEDREMIEERLKTYAHLFDDKVMKQLKRRRYTGWGRLSRKLINGIRDKQSGKTILDFLKSDGFANRNFMQLIHDDSLTFKEDIQKAQVSGQGDSLHEHIANLAGSPAIKKGILQTVKVVDELVKVMGRHKPENIVIEMARENQTTQKGQKNSRERMKRIEEGIKELGSQILKEHPVENTQLQNEKLYLYYLQNGRDMYVDQELDINRLSDYDVDHIVPQSFLKDDSIDNKVLTRSDKARGKSDNVPSEEVVKKMKNYWRQLLNAKLITQRKFDNLTKAERGGLSELDKAGFIKRQLVETRQITKHVAQILDSRMNTKYDENDKLIREVKVITLKSKLVSDFRKDFQFYKVREINNYHHAHDAYLNAVVGTALIKKYPKLESEFVYGDYKVYDVRKMIAKSEQEIGKATAKYFFYSNIMNFFKTEITLANGEIRKRPLIETNGETGEIVWDKGRDFATVRKVLSMPQVNIVKKTEVQTGGFSKESILPKRNSDKLIARKKDWDPKKYGGFDSPTVAYSVLVVAKVEKGKSKKLKSVKELLGITIMERSSFEKNPIDFLEAKGYKEVKKDLIIKLPKYSLFELENGRKRMLASAGELQKGNELALPSKYVNFLYLASHYEKLKGSPEDNEQKQLFVEQHKHYLDEIIEQISEFSKRVILADANLDKVLSAYNKHRDKPIREQAENIIHLFTLTNLGAPAAFKYFDTTIDRKRYTSTKEVLDATLIHQSITGLYETRIDLSQLGGDGGEAAAKGSSPAPGGTLQLDDEYRLYSPLVKPDQNIQFWLEQFPQAWAETAGMGLAKQVPPQVIQLKASATPVSVRQYPLSKEAQEGIRPHVQRLIQQGILVPVQSPWNTPLLPVRKPGTNDYRPVQDLREVNKRVQDIHPTVPNPYNLLCALPPQRSWYTVLDLKDAFFCLRLHPTSQPLFAFEWRDPGTGRTGQLTWTRLPQGFKNSPTIFNEALHRDLANFRIQHPQVTLLQYVDDLLLAGATKQDCLEGTKALLLELSDLGYRASAKKAQICRREVTYLGYSLRDGQRWLTEARKKTVVQIPAPTTAKQVREFLGTAGFCRLWIPGFATLAAPLYPLTKPKGEFSWAPEHQKAFDAIKKALLSAPALALPDVTKPFTLYVDERKGVARGVLTQTLGPWRRPVAYLSKKLDPVASGWPVCLKAIAAVAILVKDADKLTLGQNITVIAPHALENIVRQPPDRWMTNARMTHYQSLLLTERVTFAPPAALNPATLLPEETDEPVTHDCHQLLIEETGVRKDLTDIPLTGEVLTWFTDGSSYVVEGKRMAGAAVVDGTRTIWASSLPEGTSAQKAELMALTQALRLAEGKSINIYTDSRYAFATAHVHGAIYKQRGWLTSAGREIKNKEEILSLLEALHLPKRLAIIHCPGHQKAKDPISRGNQMADRVAKQAAQGVNLLAGKRTADGSEFEKRTADGSEFESPKKKAKVE

SEQ ID NO: 391 - protein, 2094 aa, synthetic construct; identical to SEQ ID NO: 159
  source 1..2094: note = Description of Artificial Sequence: Synthetic polypeptide

SEQ ID NO: 392 - protein, 2084 aa, synthetic construct; identical to SEQ ID NO: 147
  source 1..2084: note = Description of Artificial Sequence: Synthetic polypeptide

SEQ ID NO: 393 - protein, 2085 aa, synthetic construct; identical to SEQ ID NO: 174
  source 1..2085: note = Description of Artificial Sequence: Synthetic polypeptide

SEQ ID NO: 394 - protein, 2087 aa, synthetic construct
  source 1..2087: note = Description of Artificial Sequence: Synthetic polypeptide
MPAAKRVKLDGGDKKYSIGLDIGTNSVGWAVITDEYKVPSKKFKVLGNTDRHSIKKNLIGALLFDSGETAEATRLKRTARRRYTRRKNRICYLQEIFSNEMAKVDDSFFHRLEESFLVEEDKKHERHPIFGNIVDEVAYHEKYPTIYHLRKKLVDSTDKADLRLIYLALAHMIKFRGHFLIEGDLNPDNSDVDKLFIQLVQTYNQLFEENPINASGVDAKAILSARLSKSRRLENLIAQLPGEKKNGLFGNLIALSLGLTPNFKSNFDLAEDAKLQLSKDTYDDDLDNLLAQIGDQYADLFLAAKNLSDAILLSDILRVNTEITKAPLSASMIKRYDEHHQDLTLLKALVRQQLPEKYKEIFFDQSKNGYAGYIDGGASQEEFYKFIKPILEKMDGTEELLVKLNREDLLRKQRTFDNGSIPHQIHLGELHAILRRQEDFYPFLKDNREKIEKILTFRIPYYVGPLARGNSRFAWMTRKSEETITPWNFEEVVDKGASAQSFIERMTNFDKNLPNEKVLPKHSLLYEYFTVYNELTKVKYVTEGMRKPAFLSGEQKKAIVDLLFKTNRKVTVKQLKEDYFKKIECFDSVEISGVEDRFNASLGTYHDLLKIIKDKDFLDNEENEDILEDIVLTLTLFEDREMIEERLKTYAHLFDDKVMKQLKRRRYTGWGRLSRKLINGIRDKQSGKTILDFLKSDGFANRNFMQLIHDDSLTFKEDIQKAQVSGQGDSLHEHIANLAGSPAIKKGILQTVKVVDELVKVMGRHKPENIVIEMARENQTTQKGQKNSRERMKRIEEGIKELGSQILKEHPVENTQLQNEKLYLYYLQNGRDMYVDQELDINRLSDYDVDHIVPQSFLKDDSIDNKVLTRSDKARGKSDNVPSEEVVKKMKNYWRQLLNAKLITQRKFDNLTKAERGGLSELDKAGFIKRQLVETRQITKHVAQILDSRMNTKYDENDKLIREVKVITLKSKLVSDFRKDFQFYKVREINNYHHAHDAYLNAVVGTALIKKYPKLESEFVYGDYKVYDVRKMIAKSEQEIGKATAKYFFYSNIMNFFKTEITLANGEIRKRPLIETNGETGEIVWDKGRDFATVRKVLSMPQVNIVKKTEVQTGGFSKESILPKRNSDKLIARKKDWDPKKYGGFDSPTVAYSVLVVAKVEKGKSKKLKSVKELLGITIMERSSFEKNPIDFLEAKGYKEVKKDLIIKLPKYSLFELENGRKRMLASAGELQKGNELALPSKYVNFLYLASHYEKLKGSPEDNEQKQLFVEQHKHYLDEIIEQISEFSKRVILADANLDKVLSAYNKHRDKPIREQAENIIHLFTLTNLGAPAAFKYFDTTIDRKRYTSTKEVLDATLIHQSITGLYETRIDLSQLGGDGGGGSEAAAKGGTLQLDDEYRLYSPLVKPDQNIQFWLEQFPQAWAETAGMGLAKQVPPQVIQLKASATPVSVRQYPLSKEAQEGIRPHVQRLIQQGILVPVQSPWNTPLLPVRKPGTNDYRPVQDLREVNKRVQDIHPTVPNPYNLLCALPPQRSWYTVLDLKDAFFCLRLHPTSQPLFAFEWRDPGTGRTGQLTWTRLPQGFKNSPTIFNEALHRDLANFRIQHPQVTLLQYVDDLLLAGATKQDCLEGTKALLLELSDLGYRASAKKAQICRREVTYLGYSLRDGQRWLTEARKKTVVQIPAPTTAKQVREFLGTAGFCRLWIPGFATLAAPLYPLTKPKGEFSWAPEHQKAFDAIKKALLSAPALALPDVTKPFTLYVDERKGVARGVLTQTLGPWRRPVAYLSKKLDPVASGWPVCLKAIAAVAILVKDADKLTLGQNITVIAPHALENIVRQPPDRWMTNARMTHYQSLLLTERVTFAPPAALNPATLLPEETDEPVTHDCHQLLIEETGVRKDLTDIPLTGEVLTWFTDGSSYVVEGKRMAGAAVVDGTRTIWASSLPEGTSAQKAELMALTQALRLAEGKSINIYTDSRYAFATAHVHGAIYKQRGWLTSAGREIKNKEEILSLLEALHLPKRLAIIHCPGHQKAKDPISRGNQMADRVAKQAAQGVNLLAGKRTADGSEFEKRTADGSEFESPKKKAKVE

SEQ ID NO: 395 - protein, 2088 aa, synthetic construct; identical to SEQ ID NO: 180
  source 1..2088: note = Description of Artificial Sequence: Synthetic polypeptide

SEQ ID NO: 396 - protein, 2097 aa, synthetic construct; identical to SEQ ID NO: 113
  source 1..2097: note = Description of Artificial Sequence: Synthetic polypeptide

SEQ ID NO: 397 - protein, 2085 aa, synthetic construct; identical to SEQ ID NO: 184
  source 1..2085: note = Description of Artificial Sequence: Synthetic polypeptide

SEQ ID NO: 398 - protein, 2090 aa, synthetic construct; identical to SEQ ID NO: 119
  source 1..2090: note = Description of Artificial Sequence: Synthetic polypeptide

SEQ ID NO: 399 - protein, 2089 aa, synthetic construct
  source 1..2089: note = Description of Artificial Sequence: Synthetic polypeptide
MPAAKRVKLDGGDKKYSIGLDIGTNSVGWAVITDEYKVPSKKFKVLGNTDRHSIKKNLIGALLFDSGETAEATRLKRTARRRYTRRKNRICYLQEIFSNEMAKVDDSFFHRLEESFLVEEDKKHERHPIFGNIVDEVAYHEKYPTIYHLRKKLVDSTDKADLRLIYLALAHMIKFRGHFLIEGDLNPDNSDVDKLFIQLVQTYNQLFEENPINASGVDAKAILSARLSKSRRLENLIAQLPGEKKNGLFGNLIALSLGLTPNFKSNFDLAEDAKLQLSKDTYDDDLDNLLAQIGDQYADLFLAAKNLSDAILLSDILRVNTEITKAPLSASMIKRYDEHHQDLTLLKALVRQQLPEKYKEIFFDQSKNGYAGYIDGGASQEEFYKFIKPILEKMDGTEELLVKLNREDLLRKQRTFDNGSIPHQIHLGELHAILRRQEDFYPFLKDNREKIEKILTFRIPYYVGPLARGNSRFAWMTRKSEETITPWNFEEVVDKGASAQSFIERMTNFDKNLPNEKVLPKHSLLYEYFTVYNELTKVKYVTEGMRKPAFLSGEQKKAIVDLLFKTNRKVTVKQLKEDYFKKIECFDSVEISGVEDRFNASLGTYHDLLKIIKDKDFLDNEENEDILEDIVLTLTLFEDREMIEERLKTYAHLFDDKVMKQLKRRRYTGWGRLSRKLINGIRDKQSGKTILDFLKSDGFANRNFMQLIHDDSLTFKEDIQKAQVSGQGDSLHEHIANLAGSPAIKKGILQTVKVVDELVKVMGRHKPENIVIEMARENQTTQKGQKNSRERMKRIEEGIKELGSQILKEHPVENTQLQNEKLYLYYLQNGRDMYVDQELDINRLSDYDVDHIVPQSFLKDDSIDNKVLTRSDKARGKSDNVPSEEVVKKMKNYWRQLLNAKLITQRKFDNLTKAERGGLSELDKAGFIKRQLVETRQITKHVAQILDSRMNTKYDENDKLIREVKVITLKSKLVSDFRKDFQFYKVREINNYHHAHDAYLNAVVGTALIKKYPKLESEFVYGDYKVYDVRKMIAKSEQEIGKATAKYFFYSNIMNFFKTEITLANGEIRKRPLIETNGETGEIVWDKGRDFATVRKVLSMPQVNIVKKTEVQTGGFSKESILPKRNSDKLIARKKDWDPKKYGGFDSPTVAYSVLVVAKVEKGKSKKLKSVKELLGITIMERSSFEKNPIDFLEAKGYKEVKKDLIIKLPKYSLFELENGRKRMLASAGELQKGNELALPSKYVNFLYLASHYEKLKGSPEDNEQKQLFVEQHKHYLDEIIEQISEFSKRVILADANLDKVLSAYNKHRDKPIREQAENIIHLFTLTNLGAPAAFKYFDTTIDRKRYTSTKEVLDATLIHQSITGLYETRIDLSQLGGDGGEAAAKEAAAKGGTLQLDDEYRLYSPLVKPDQNIQFWLEQFPQAWAETAGMGLAKQVPPQVIQLKASATPVSVRQYPLSKEAQEGIRPHVQRLIQQGILVPVQSPWNTPLLPVRKPGTNDYRPVQDLREVNKRVQDIHPTVPNPYNLLCALPPQRSWYTVLDLKDAFFCLRLHPTSQPLFAFEWRDPGTGRTGQLTWTRLPQGFKNSPTIFNEALHRDLANFRIQHPQVTLLQYVDDLLLAGATKQDCLEGTKALLLELSDLGYRASAKKAQICRREVTYLGYSLRDGQRWLTEARKKTVVQIPAPTTAKQVREFLGTAGFCRLWIPGFATLAAPLYPLTKPKGEFSWAPEHQKAFDAIKKALLSAPALALPDVTKPFTLYVDERKGVARGVLTQTLGPWRRPVAYLSKKLDPVASGWPVCLKAIAAVAILVKDADKLTLGQNITVIAPHALENIVRQPPDRWMTNARMTHYQSLLLTERVTFAPPAALNPATLLPEETDEPVTHDCHQLLIEETGVRKDLTDIPLTGEVLTWFTDGSSYVVEGKRMAGAAVVDGTRTIWASSLPEGTSAQKAELMALTQALRLAEGKSINIYTDSRYAFATAHVHGAIYKQRGWLTSAGREIKNKEEILSLLEALHLPKRLAIIHCPGHQKAKDPISRGNQMADRVAKQAAQGVNLLAGKRTADGSEFEKRTADGSEFESPKKKAKVE

SEQ ID NO: 400 - protein, 2088 aa, synthetic construct; identical to SEQ ID NO: 129
  source 1..2088: note = Description of Artificial Sequence: Synthetic polypeptide

SEQ ID NO: 401 - protein, 2088 aa, synthetic construct
  source 1..2088: note = Description of Artificial Sequence: Synthetic polypeptide
MPAAKRVKLDGGDKKYSIGLDIGTNSVGWAVITDEYKVPSKKFKVLGNTDRHSIKKNLIGALLFDSGETAEATRLKRTARRRYTRRKNRICYLQEIFSNEMAKVDDSFFHRLEESFLVEEDKKHERHPIFGNIVDEVAYHEKYPTIYHLRKKLVDSTDKADLRLIYLALAHMIKFRGHFLIEGDLNPDNSDVDKLFIQLVQTYNQLFEENPINASGVDAKAILSARLSKSRRLENLIAQLPGEKKNGLFGNLIALSLGLTPNFKSNFDLAEDAKLQLSKDTYDDDLDNLLAQIGDQYADLFLAAKNLSDAILLSDILRVNTEITKAPLSASMIKRYDEHHQDLTLLKALVRQQLPEKYKEIFFDQSKNGYAGYIDGGASQEEFYKFIKPILEKMDGTEELLVKLNREDLLRKQRTFDNGSIPHQIHLGELHAILRRQEDFYPFLKDNREKIEKILTFRIPYYVGPLARGNSRFAWMTRKSEETITPWNFEEVVDKGASAQSFIERMTNFDKNLPNEKVLPKHSLLYEYFTVYNELTKVKYVTEGMRKPAFLSGEQKKAIVDLLFKTNRKVTVKQLKEDYFKKIECFDSVEISGVEDRFNASLGTYHDLLKIIKDKDFLDNEENEDILEDIVLTLTLFEDREMIEERLKTYAHLFDDKVMKQLKRRRYTGWGRLSRKLINGIRDKQSGKTILDFLKSDGFANRNFMQLIHDDSLTFKEDIQKAQVSGQGDSLHEHIANLAGSPAIKKGILQTVKVVDELVKVMGRHKPENIVIEMARENQTTQKGQKNSRERMKRIEEGIKELGSQILKEHPVENTQLQNEKLYLYYLQNGRDMYVDQELDINRLSDYDVDHIVPQSFLKDDSIDNKVLTRSDKARGKSDNVPSEEVVKKMKNYWRQLLNAKLITQRKFDNLTKAERGGLSELDKAGFIKRQLVETRQITKHVAQILDSRMNTKYDENDKLIREVKVITLKSKLVSDFRKDFQFYKVREINNYHHAHDAYLNAVVGTALIKKYPKLESEFVYGDYKVYDVRKMIAKSEQEIGKATAKYFFYSNIMNFFKTEITLANGEIRKRPLIETNGETGEIVWDKGRDFATVRKVLSMPQVNIVKKTEVQTGGFSKESILPKRNSDKLIARKKDWDPKKYGGFDSPTVAYSVLVVAKVEKGKSKKLKSVKELLGITIMERSSFEKNPIDFLEAKGYKEVKKDLIIKLPKYSLFELENGRKRMLASAGELQKGNELALPSKYVNFLYLASHYEKLKGSPEDNEQKQLFVEQHKHYLDEIIEQISEFSKRVILADANLDKVLSAYNKHRDKPIREQAENIIHLFTLTNLGAPAAFKYFDTTIDRKRYTSTKEVLDATLIHQSITGLYETRIDLSQLGGDGGGSSGGSPAPGGTLQLDDEYRLYSPLVKPDQNIQFWLEQFPQAWAETAGMGLAKQVPPQVIQLKASATPVSVRQYPLSKEAQEGIRPHVQRLIQQGILVPVQSPWNTPLLPVRKPGTNDYRPVQDLREVNKRVQDIHPTVPNPYNLLCALPPQRSWYTVLDLKDAFFCLRLHPTSQPLFAFEWRDPGTGRTGQLTWTRLPQGFKNSPTIFNEALHRDLANFRIQHPQVTLLQYVDDLLLAGATKQDCLEGTKALLLELSDLGYRASAKKAQICRREVTYLGYSLRDGQRWLTEARKKTVVQIPAPTTAKQVREFLGTAGFCRLWIPGFATLAAPLYPLTKPKGEFSWAPEHQKAFDAIKKALLSAPALALPDVTKPFTLYVDERKGVARGVLTQTLGPWRRPVAYLSKKLDPVASGWPVCLKAIAAVAILVKDADKLTLGQNITVIAPHALENIVRQPPDRWMTNARMTHYQSLLLTERVTFAPPAALNPATLLPEETDEPVTHDCHQLLIEETGVRKDLTDIPLTGEVLTWFTDGSSYVVEGKRMAGAAVVDGTRTIWASSLPEGTSAQKAELMALTQALRLAEGKSINIYTDSRYAFATAHVHGAIYKQRGWLTSAGREIKNKEEILSLLEALHLPKRLAIIHCPGHQKAKDPISRGNQMADRVAKQAAQGVNLLAGKRTADGSEFEKRTADGSEFESPKKKAKVE

SEQ ID NO: 402 - protein, 2088 aa, synthetic construct
  source 1..2088: note = Description of Artificial Sequence: Synthetic polypeptide
MPAAKRVKLDGGDKKYSIGLDIGTNSVGWAVITDEYKVPSKKFKVLGNTDRHSIKKNLIGALLFDSGETAEATRLKRTARRRYTRRKNRICYLQEIFSNEMAKVDDSFFHRLEESFLVEEDKKHERHPIFGNIVDEVAYHEKYPTIYHLRKKLVDSTDKADLRLIYLALAHMIKFRGHFLIEGDLNPDNSDVDKLFIQLVQTYNQLFEENPINASGVDAKAILSARLSKSRRLENLIAQLPGEKKNGLFGNLIALSLGLTPNFKSNFDLAEDAKLQLSKDTYDDDLDNLLAQIGDQYADLFLAAKNLSDAILLSDILRVNTEITKAPLSASMIKRYDEHHQDLTLLKALVRQQLPEKYKEIFFDQSKNGYAGYIDGGASQEEFYKFIKPILEKMDGTEELLVKLNREDLLRKQRTFDNGSIPHQIHLGELHAILRRQEDFYPFLKDNREKIEKILTFRIPYYVGPLARGNSRFAWMTRKSEETITPWNFEEVVDKGASAQSFIERMTNFDKNLPNEKVLPKHSLLYEYFTVYNELTKVKYVTEGMRKPAFLSGEQKKAIVDLLFKTNRKVTVKQLKEDYFKKIECFDSVEISGVEDRFNASLGTYHDLLKIIKDKDFLDNEENEDILEDIVLTLTLFEDREMIEERLKTYAHLFDDKVMKQLKRRRYTGWGRLSRKLINGIRDKQSGKTILDFLKSDGFANRNFMQLIHDDSLTFKEDIQKAQVSGQGDSLHEHIANLAGSPAIKKGILQTVKVVDELVKVMGRHKPENIVIEMARENQTTQKGQKNSRERMKRIEEGIKELGSQILKEHPVENTQLQNEKLYLYYLQNGRDMYVDQELDINRLSDYDVDHIVPQSFLKDDSIDNKVLTRSDKARGKSDNVPSEEVVKKMKNYWRQLLNAKLITQRKFDNLTKAERGGLSELDKAGFIKRQLVETRQITKHVAQILDSRMNTKYDENDKLIREVKVITLKSKLVSDFRKDFQFYKVREINNYHHAHDAYLNAVVGTALIKKYPKLESEFVYGDYKVYDVRKMIAKSEQEIGKATAKYFFYSNIMNFFKTEITLANGEIRKRPLIETNGETGEIVWDKGRDFATVRKVLSMPQVNIVKKTEVQTGGFSKESILPKRNSDKLIARKKDWDPKKYGGFDSPTVAYSVLVVAKVEKGKSKKLKSVKELLGITIMERSSFEKNPIDFLEAKGYKEVKKDLIIKLPKYSLFELENGRKRMLASAGELQKGNELALPSKYVNFLYLASHYEKLKGSPEDNEQKQLFVEQHKHYLDEIIEQISEFSKRVILADANLDKVLSAYNKHRDKPIREQAENIIHLFTLTNLGAPAAFKYFDTTIDRKRYTSTKEVLDATLIHQSITGLYETRIDLSQLGGDGGGGGGGSPAPGGTLQLDDEYRLYSPLVKPDQNIQFWLEQFPQAWAETAGMGLAKQVPPQVIQLKASATPVSVRQYPLSKEAQEGIRPHVQRLIQQGILVPVQSPWNTPLLPVRKPGTNDYRPVQDLREVNKRVQDIHPTVPNPYNLLCALPPQRSWYTVLDLKDAFFCLRLHPTSQPLFAFEWRDPGTGRTGQLTWTRLPQGFKNSPTIFNEALHRDLANFRIQHPQVTLLQYVDDLLLAGATKQDCLEGTKALLLELSDLGYRASAKKAQICRREVTYLGYSLRDGQRWLTEARKKTVVQIPAPTTAKQVREFLGTAGFCRLWIPGFATLAAPLYPLTKPKGEFSWAPEHQKAFDAIKKALLSAPALALPDVTKPFTLYVDERKGVARGVLTQTLGPWRRPVAYLSKKLDPVASGWPVCLKAIAAVAILVKDADKLTLGQNITVIAPHALENIVRQPPDRWMTNARMTHYQSLLLTERVTFAPPAALNPATLLPEETDEPVTHDCHQLLIEETGVRKDLTDIPLTGEVLTWFTDGSSYVVEGKRMAGAAVVDGTRTIWASSLPEGTSAQKAELMALTQALRLAEGKSINIYTDSRYAFATAHVHGAIYKQRGWLTSAGREIKNKEEILSLLEALHLPKRLAIIHCPGHQKAKDPISRGNQMADRVAKQAAQGVNLLAGKRTADGSEFEKRTADGSEFESPKKKAKVE

SEQ ID NO: 403 - protein, 2088 aa, synthetic construct; identical to SEQ ID NO: 130
  source 1..2088: note = Description of Artificial Sequence: Synthetic polypeptide

SEQ ID NO: 404 - protein, 2094 aa, synthetic construct; identical to SEQ ID NO: 161
  source 1..2094: note = Description of Artificial Sequence: Synthetic polypeptide

SEQ ID NO: 405 - protein, 2085 aa, synthetic construct
  source 1..2085: note = Description of Artificial Sequence: Synthetic polypeptide
MPAAKRVKLDGGDKKYSIGLDIGTNSVGWAVITDEYKVPSKKFKVLGNTDRHSIKKNLIGALLFDSGETAEATRLKRTARRRYTRRKNRICYLQEIFSNEMAKVDDSFFHRLEESFLVEEDKKHERHPIFGNIVDEVAYHEKYPTIYHLRKKLVDSTDKADLRLIYLALAHMIKFRGHFLIEGDLNPDNSDVDKLFIQLVQTYNQLFEENPINASGVDAKAILSARLSKSRRLENLIAQLPGEKKNGLFGNLIALSLGLTPNFKSNFDLAEDAKLQLSKDTYDDDLDNLLAQIGDQYADLFLAAKNLSDAILLSDILRVNTEITKAPLSASMIKRYDEHHQDLTLLKALVRQQLPEKYKEIFFDQSKNGYAGYIDGGASQEEFYKFIKPILEKMDGTEELLVKLNREDLLRKQRTFDNGSIPHQIHLGELHAILRRQEDFYPFLKDNREKIEKILTFRIPYYVGPLARGNSRFAWMTRKSEETITPWNFEEVVDKGASAQSFIERMTNFDKNLPNEKVLPKHSLLYEYFTVYNELTKVKYVTEGMRKPAFLSGEQKKAIVDLLFKTNRKVTVKQLKEDYFKKIECFDSVEISGVEDRFNASLGTYHDLLKIIKDKDFLDNEENEDILEDIVLTLTLFEDREMIEERLKTYAHLFDDKVMKQLKRRRYTGWGRLSRKLINGIRDKQSGKTILDFLKSDGFANRNFMQLIHDDSLTFKEDIQKAQVSGQGDSLHEHIANLAGSPAIKKGILQTVKVVDELVKVMGRHKPENIVIEMARENQTTQKGQKNSRERMKRIEEGIKELGSQILKEHPVENTQLQNEKLYLYYLQNGRDMYVDQELDINRLSDYDVDHIVPQSFLKDDSIDNKVLTRSDKARGKSDNVPSEEVVKKMKNYWRQLLNAKLITQRKFDNLTKAERGGLSELDKAGFIKRQLVETRQITKHVAQILDSRMNTKYDENDKLIREVKVITLKSKLVSDFRKDFQFYKVREINNYHHAHDAYLNAVVGTALIKKYPKLESEFVYGDYKVYDVRKMIAKSEQEIGKATAKYFFYSNIMNFFKTEITLANGEIRKRPLIETNGETGEIVWDKGRDFATVRKVLSMPQVNIVKKTEVQTGGFSKESILPKRNSDKLIARKKDWDPKKYGGFDSPTVAYSVLVVAKVEKGKSKKLKSVKELLGITIMERSSFEKNPIDFLEAKGYKEVKKDLIIKLPKYSLFELENGRKRMLASAGELQKGNELALPSKYVNFLYLASHYEKLKGSPEDNEQKQLFVEQHKHYLDEIIEQISEFSKRVILADANLDKVLSAYNKHRDKPIREQAENIIHLFTLTNLGAPAAFKYFDTTIDRKRYTSTKEVLDATLIHQSITGLYETRIDLSQLGGDGGGGGGSSGGTLQLDDEYRLYSPLVKPDQNIQFWLEQFPQAWAETAGMGLAKQVPPQVIQLKASATPVSVRQYPLSKEAQEGIRPHVQRLIQQGILVPVQSPWNTPLLPVRKPGTNDYRPVQDLREVNKRVQDIHPTVPNPYNLLCALPPQRSWYTVLDLKDAFFCLRLHPTSQPLFAFEWRDPGTGRTGQLTWTRLPQGFKNSPTIFNEALHRDLANFRIQHPQVTLLQYVDDLLLAGATKQDCLEGTKALLLELSDLGYRASAKKAQICRREVTYLGYSLRDGQRWLTEARKKTVVQIPAPTTAKQVREFLGTAGFCRLWIPGFATLAAPLYPLTKPKGEFSWAPEHQKAFDAIKKALLSAPALALPDVTKPFTLYVDERKGVARGVLTQTLGPWRRPVAYLSKKLDPVASGWPVCLKAIAAVAILVKDADKLTLGQNITVIAPHALENIVRQPPDRWMTNARMTHYQSLLLTERVTFAPPAALNPATLLPEETDEPVTHDCHQLLIEETGVRKDLTDIPLTGEVLTWFTDGSSYVVEGKRMAGAAVVDGTRTIWASSLPEGTSAQKAELMALTQALRLAEGKSINIYTDSRYAFATAHVHGAIYKQRGWLTSAGREIKNKEEILSLLEALHLPKRLAIIHCPGHQKAKDPISRGNQMADRVAKQAAQGVNLLAGKRTADGSEFEKRTADGSEFESPKKKAKVE

SEQ ID NO: 406 - protein, 2088 aa, synthetic construct; identical to SEQ ID NO: 182
  source 1..2088: note = Description of Artificial Sequence: Synthetic polypeptide

SEQ ID NO: 407 - protein, 2211 aa, synthetic construct
  source 1..2211: note = Description of Artificial Sequence: Synthetic polypeptide
MPAAKRVKLDGGDKKYSIGLDIGTNSVGWAVITDEYKVPSKKFKVLGNTDRHSIKKNLIGALLFDSGETAEATRLKRTARRRYTRRKNRICYLQEIFSNEMAKVDDSFFHRLEESFLVEEDKKHERHPIFGNIVDEVAYHEKYPTIYHLRKKLVDSTDKADLRLIYLALAHMIKFRGHFLIEGDLNPDNSDVDKLFIQLVQTYNQLFEENPINASGVDAKAILSARLSKSRRLENLIAQLPGEKKNGLFGNLIALSLGLTPNFKSNFDLAEDAKLQLSKDTYDDDLDNLLAQIGDQYADLFLAAKNLSDAILLSDILRVNTEITKAPLSASMIKRYDEHHQDLTLLKALVRQQLPEKYKEIFFDQSKNGYAGYIDGGASQEEFYKFIKPILEKMDGTEELLVKLNREDLLRKQRTFDNGSIPHQIHLGELHAILRRQEDFYPFLKDNREKIEKILTFRIPYYVGPLARGNSRFAWMTRKSEETITPWNFEEVVDKGASAQSFIERMTNFDKNLPNEKVLPKHSLLYEYFTVYNELTKVKYVTEGMRKPAFLSGEQKKAIVDLLFKTNRKVTVKQLKEDYFKKIECFDSVEISGVEDRFNASLGTYHDLLKIIKDKDFLDNEENEDILEDIVLTLTLFEDREMIEERLKTYAHLFDDKVMKQLKRRRYTGWGRLSRKLINGIRDKQSGKTILDFLKSDGFANRNFMQLIHDDSLTFKEDIQKAQVSGQGDSLHEHIANLAGSPAIKKGILQTVKVVDELVKVMGRHKPENIVIEMARENQTTQKGQKNSRERMKRIEEGIKELGSQILKEHPVENTQLQNEKLYLYYLQNGRDMYVDQELDINRLSDYDVDHIVPQSFLKDDSIDNKVLTRSDKARGKSDNVPSEEVVKKMKNYWRQLLNAKLITQRKFDNLTKAERGGLSELDKAGFIKRQLVETRQITKHVAQILDSRMNTKYDENDKLIREVKVITLKSKLVSDFRKDFQFYKVREINNYHHAHDAYLNAVVGTALIKKYPKLESEFVYGDYKVYDVRKMIAKSEQEIGKATAKYFFYSNIMNFFKTEITLANGEIRKRPLIETNGETGEIVWDKGRDFATVRKVLSMPQVNIVKKTEVQTGGFSKESILPKRNSDKLIARKKDWDPKKYGGFDSPTVAYSVLVVAKVEKGKSKKLKSVKELLGITIMERSSFEKNPIDFLEAKGYKEVKKDLIIKLPKYSLFELENGRKRMLASAGELQKGNELALPSKYVNFLYLASHYEKLKGSPEDNEQKQLFVEQHKHYLDEIIEQISEFSKRVILADANLDKVLSAYNKHRDKPIREQAENIIHLFTLTNLGAPAAFKYFDTTIDRKRYTSTKEVLDATLIHQSITGLYETRIDLSQLGGDGGAEAAAKEAAAKEAAAKEAAAKALEAEAAAKEAAAKEAAAKEAAAKAGGMDPLQLLQPLEAEIKGTKLKAHWNSGATITCVPEAFLEDERPIQTMLIKTIHGEKQQDVYYLTFKVQGRKVEAEVLASPYDYILLNPSDVPWLMKKPLQLTVLVPLHEYQERLLQQTALPKEQKELLQKLFLKYDALWQHWENQVGHRRIKPHNIATGTLAPRPQKQYPINPKAKPSIQIVIDDLLKQGVLIQQNSTMNTPVYPVPKPDGKWRMVLDYREVNKTIPLIAAQNQHSAGILSSIYRGKYKTTLDLTNGFWAHPITPESYWLTAFTWQGKQYCWTRLPQGFLNSPALFTADVVDLLKEIPNVQAYVDDIYISHDDPQEHLEQLEKIFSILLNAGYVVSLKKSEIAQREVEFLGFNITKEGRGLTDTFKQKLLNITPPKDLKQLQSILGLLNFARNFIPNYSELVKPLYTIVANANGKFISWTEDNSNQLQHIISVLNQADNLEERNPETRLIIKVNSSPSAGYIRYYNEGSKRPIMYVNYIFSKAEAKFTQTEKLLTTMHKGLIKAMDLAMGQEILVYSPIVSMTKIQRTPLPERKALPVRWITWMTYLEDPRIQFHYDKSLPELQQIPNVTEDVIAKTKHPSEFAMVFYTDGSAIKHPDVNKSHSAGMGIAQVQFIPEYKIVHQWSIPLGDHTAQLAEIAAVEFACKKALKISGPVLIVTDSFYVAESANKELPYWKSNGFLNNKKKPLRHVSKWKSIAECLQLKPDIIIMHEKGHQQPMTTLHTEGNNLADKLATQGSYVVHAGKRTADGSEFEKRTADGSEFESPKKKAKVE

SEQ ID NO: 408 - protein, 2198 aa, synthetic construct
  source 1..2198: note = Description of Artificial Sequence: Synthetic polypeptide
MPAAKRVKLDGGDKKYSIGLDIGTNSVGWAVITDEYKVPSKKFKVLGNTDRHSIKKNLIGALLFDSGETAEATRLKRTARRRYTRRKNRICYLQEIFSNEMAKVDDSFFHRLEESFLVEEDKKHERHPIFGNIVDEVAYHEKYPTIYHLRKKLVDSTDKADLRLIYLALAHMIKFRGHFLIEGDLNPDNSDVDKLFIQLVQTYNQLFEENPINASGVDAKAILSARLSKSRRLENLIAQLPGEKKNGLFGNLIALSLGLTPNFKSNFDLAEDAKLQLSKDTYDDDLDNLLAQIGDQYADLFLAAKNLSDAILLSDILRVNTEITKAPLSASMIKRYDEHHQDLTLLKALVRQQLPEKYKEIFFDQSKNGYAGYIDGGASQEEFYKFIKPILEKMDGTEELLVKLNREDLLRKQRTFDNGSIPHQIHLGELHAILRRQEDFYPFLKDNREKIEKILTFRIPYYVGPLARGNSRFAWMTRKSEETITPWNFEEVVDKGASAQSFIERMTNFDKNLPNEKVLPKHSLLYEYFTVYNELTKVKYVTEGMRKPAFLSGEQKKAIVDLLFKTNRKVTVKQLKEDYFKKIECFDSVEISGVEDRFNASLGTYHDLLKIIKDKDFLDNEENEDILEDIVLTLTLFEDREMIEERLKTYAHLFDDKVMKQLKRRRYTGWGRLSRKLINGIRDKQSGKTILDFLKSDGFANRNFMQLIHDDSLTFKEDIQKAQVSGQGDSLHEHIANLAGSPAIKKGILQTVKVVDELVKVMGRHKPENIVIEMARENQTTQKGQKNSRERMKRIEEGIKELGSQILKEHPVENTQLQNEKLYLYYLQNGRDMYVDQELDINRLSDYDVDHIVPQSFLKDDSIDNKVLTRSDKARGKSDNVPSEEVVKKMKNYWRQLLNAKLITQRKFDNLTKAERGGLSELDKAGFIKRQLVETRQITKHVAQILDSRMNTKYDENDKLIREVKVITLKSKLVSDFRKDFQFYKVREINNYHHAHDAYLNAVVGTALIKKYPKLESEFVYGDYKVYDVRKMIAKSEQEIGKATAKYFFYSNIMNFFKTEITLANGEIRKRPLIETNGETGEIVWDKGRDFATVRKVLSMPQVNIVKKTEVQTGGFSKESILPKRNSDKLIARKKDWDPKKYGGFDSPTVAYSVLVVAKVEKGKSKKLKSVKELLGITIMERSSFEKNPIDFLEAKGYKEVKKDLIIKLPKYSLFELENGRKRMLASAGELQKGNELALPSKYVNFLYLASHYEKLKGSPEDNEQKQLFVEQHKHYLDEIIEQISEFSKRVILADANLDKVLSAYNKHRDKPIREQAENIIHLFTLTNLGAPAAFKYFDTTIDRKRYTSTKEVLDATLIHQSITGLYETRIDLSQLGGDGGSGGSSGGSSGSETPGTSESATPESSGGSSGGSSGGMDPLQLLQPLEAEIKGTKLKAHWNSGATITCVPEAFLEDERPIQTMLIKTIHGEKQQDVYYLTFKVQGRKVEAEVLASPYDYILLNPSDVPWLMKKPLQLTVLVPLHEYQERLLQQTALPKEQKELLQKLFLKYDALWQHWENQVGHRRIKPHNIATGTLAPRPQKQYPINPKAKPSIQIVIDDLLKQGVLIQQNSTMNTPVYPVPKPDGKWRMVLDYREVNKTIPLIAAQNQHSAGILSSIYRGKYKTTLDLTNGFWAHPITPESYWLTAFTWQGKQYCWTRLPQGFLNSPALFTADVVDLLKEIPNVQAYVDDIYISHDDPQEHLEQLEKIFSILLNAGYVVSLKKSEIAQREVEFLGFNITKEGRGLTDTFKQKLLNITPPKDLKQLQSILGLLNFARNFIPNYSELVKPLYTIVANANGKFISWTEDNSNQLQHIISVLNQADNLEERNPETRLIIKVNSSPSAGYIRYYNEGSKRPIMYVNYIFSKAEAKFTQTEKLLTTMHKGLIKAMDLAMGQEILVYSPIVSMTKIQRTPLPERKALPVRWITWMTYLEDPRIQFHYDKSLPELQQIPNVTEDVIAKTKHPSEFAMVFYTDGSAIKHPDVNKSHSAGMGIAQVQFIPEYKIVHQWSIPLGDHTAQLAEIAAVEFACKKALKISGPVLIVTDSFYVAESANKELPYWKSNGFLNNKKKPLRHVSKWKSIAECLQLKPDIIIMHEKGHQQPMTTLHTEGNNLADKLATQGSYVVHAGKRTADGSEFEKRTADGSEFESPKKKAKVE

SEQ ID NO: 409 - protein, 2176 aa, synthetic construct
  source 1..2176: note = Description of Artificial Sequence: Synthetic polypeptide
MPAAKRVKLDGGDKKYSIGLDIGTNSVGWAVITDEYKVPSKKFKVLGNTDRHSIKKNLIGALLFDSGETAEATRLKRTARRRYTRRKNRICYLQEIFSNEMAKVDDSFFHRLEESFLVEEDKKHERHPIFGNIVDEVAYHEKYPTIYHLRKKLVDSTDKADLRLIYLALAHMIKFRGHFLIEGDLNPDNSDVDKLFIQLVQTYNQLFEENPINASGVDAKAILSARLSKSRRLENLIAQLPGEKKNGLFGNLIALSLGLTPNFKSNFDLAEDAKLQLSKDTYDDDLDNLLAQIGDQYADLFLAAKNLSDAILLSDILRVNTEITKAPLSASMIKRYDEHHQDLTLLKALVRQQLPEKYKEIFFDQSKNGYAGYIDGGASQEEFYKFIKPILEKMDGTEELLVKLNREDLLRKQRTFDNGSIPHQIHLGELHAILRRQEDFYPFLKDNREKIEKILTFRIPYYVGPLARGNSRFAWMTRKSEETITPWNFEEVVDKGASAQSFIERMTNFDKNLPNEKVLPKHSLLYEYFTVYNELTKVKYVTEGMRKPAFLSGEQKKAIVDLLFKTNRKVTVKQLKEDYFKKIECFDSVEISGVEDRFNASLGTYHDLLKIIKDKDFLDNEENEDILEDIVLTLTLFEDREMIEERLKTYAHLFDDKVMKQLKRRRYTGWGRLSRKLINGIRDKQSGKTILDFLKSDGFANRNFMQLIHDDSLTFKEDIQKAQVSGQGDSLHEHIANLAGSPAIKKGILQTVKVVDELVKVMGRHKPENIVIEMARENQTTQKGQKNSRERMKRIEEGIKELGSQILKEHPVENTQLQNEKLYLYYLQNGRDMYVDQELDINRLSDYDVDHIVPQSFLKDDSIDNKVLTRSDKARGKSDNVPSEEVVKKMKNYWRQLLNAKLITQRKFDNLTKAERGGLSELDKAGFIKRQLVETRQITKHVAQILDSRMNTKYDENDKLIREVKVITLKSKLVSDFRKDFQFYKVREINNYHHAHDAYLNAVVGTALIKKYPKLESEFVYGDYKVYDVRKMIAKSEQEIGKATAKYFFYSNIMNFFKTEITLANGEIRKRPLIETNGETGEIVWDKGRDFATVRKVLSMPQVNIVKKTEVQTGGFSKESILPKRNSDKLIARKKDWDPKKYGGFDSPTVAYSVLVVAKVEKGKSKKLKSVKELLGITIMERSSFEKNPIDFLEAKGYKEVKKDLIIKLPKYSLFELENGRKRMLASAGELQKGNELALPSKYVNFLYLASHYEKLKGSPEDNEQKQLFVEQHKHYLDEIIEQISEFSKRVILADANLDKVLSAYNKHRDKPIREQAENIIHLFTLTNLGAPAAFKYFDTTIDRKRYTSTKEVLDATLIHQSITGLYETRIDLSQLGGDGGGSSEAAAKPAPGGMDPLQLLQPLEAEIKGTKLKAHWNSGATITCVPEAFLEDERPIQTMLIKTIHGEKQQDVYYLTFKVQGRKVEAEVLASPYDYILLNPSDVPWLMKKPLQLTVLVPLHEYQERLLQQTALPKEQKELLQKLFLKYDALWQHWENQVGHRRIKPHNIATGTLAPRPQKQYPINPKAKPSIQIVIDDLLKQGVLIQQNSTMNTPVYPVPKPDGKWRMVLDYREVNKTIPLIAAQNQHSAGILSSIYRGKYKTTLDLTNGFWAHPITPESYWLTAFTWQGKQYCWTRLPQGFLNSPALFTADVVDLLKEIPNVQAYVDDIYISHDDPQEHLEQLEKIFSILLNAGYVVSLKKSEIAQREVEFLGFNITKEGRGLTDTFKQKLLNITPPKDLKQLQSILGLLNFARNFIPNYSELVKPLYTIVANANGKFISWTEDNSNQLQHIISVLNQADNLEERNPETRLIIKVNSSPSAGYIRYYNEGSKRPIMYVNYIFSKAEAKFTQTEKLLTTMHKGLIKAMDLAMGQEILVYSPIVSMTKIQRTPLPERKALPVRWITWMTYLEDPRIQFHYDKSLPELQQIPNVTEDVIAKTKHPSEFAMVFYTDGSAIKHPDVNKSHSAGMGIAQVQFIPEYKIVHQWSIPLGDHTAQLAEIAAVEFACKKALKISGPVLIVTDSFYVAESANKELPYWKSNGFLNNKKKPLRHVSKWKSIAECLQLKPDIIIMHEKGHQQPMTTLHTEGNNLADKLATQGSYVVHAGKRTADGSEFEKRTADGSEFESPKKKAKVE

SEQ ID NO: 410 - protein, 2181 aa, synthetic construct
  source 1..2181: note = Description of Artificial Sequence: Synthetic polypeptide
MPAAKRVKLDGGDKKYSIGLDIGTNSVGWAVITDEYKVPSKKFKVLGNTDRHSIKKNLIGALLFDSGETAEATRLKRTARRRYTRRKNRICYLQEIFSNEMAKVDDSFFHRLEESFLVEEDKKHERHPIFGNIVDEVAYHEKYPTIYHLRKKLVDSTDKADLRLIYLALAHMIKFRGHFLIEGDLNPDNSDVDKLFIQLVQTYNQLFEENPINASGVDAKAILSARLSKSRRLENLIAQLPGEKKNGLFGNLIALSLGLTPNFKSNFDLAEDAKLQLSKDTYDDDLDNLLAQIGDQYADLFLAAKNLSDAILLSDILRVNTEITKAPLSASMIKRYDEHHQDLTLLKALVRQQLPEKYKEIFFDQSKNGYAGYIDGGASQEEFYKFIKPILEKMDGTEELLVKLNREDLLRKQRTFDNGSIPHQIHLGELHAILRRQEDFYPFLKDNREKIEKILTFRIPYYVGPLARGNSRFAWMTRKSEETITPWNFEEVVDKGASAQSFIERMTNFDKNLPNEKVLPKHSLLYEYFTVYNELTKVKYVTEGMRKPAFLSGEQKKAIVDLLFKTNRKVTVKQLKEDYFKKIECFDSVEISGVEDRFNASLGTYHDLLKIIKDKDFLDNEENEDILEDIVLTLTLFEDREMIEERLKTYAHLFDDKVMKQLKRRRYTGWGRLSRKLINGIRDKQSGKTILDFLKSDGFANRNFMQLIHDDSLTFKEDIQKAQVSGQGDSLHEHIANLAGSPAIKKGILQTVKVVDELVKVMGRHKPENIVIEMARENQTTQKGQKNSRERMKRIEEGIKELGSQILKEHPVENTQLQNEKLYLYYLQNGRDMYVDQELDINRLSDYDVDHIVPQSFLKDDSIDNKVLTRSDKARGKSDNVPSEEVVKKMKNYWRQLLNAKLITQRKFDNLTKAERGGLSELDKAGFIKRQLVETRQITKHVAQILDSRMNTKYDENDKLIREVKVITLKSKLVSDFRKDFQFYKVREINNYHHAHDAYLNAVVGTALIKKYPKLESEFVYGDYKVYDVRKMIAKSEQEIGKATAKYFFYSNIMNFFKTEITLANGEIRKRPLIETNGETGEIVWDKGRDFATVRKVLSMPQVNIVKKTEVQTGGFSKESILPKRNSDKLIARKKDWDPKKYGGFDSPTVAYSVLVVAKVEKGKSKKLKSVKELLGITIMERSSFEKNPIDFLEAKGYKEVKKDLIIKLPKYSLFELENGRKRMLASAGELQKGNELALPSKYVNFLYLASHYEKLKGSPEDNEQKQLFVEQHKHYLDEIIEQISEFSKRVILADANLDKVLSAYNKHRDKPIREQAENIIHLFTLTNLGAPAAFKYFDTTIDRKRYTSTKEVLDATLIHQSITGLYETRIDLSQLGGDGGSGSETPGTSESATPESGGMDPLQLLQPLEAEIKGTKLKAHWNSGATITCVPEAFLEDERPIQTMLIKTIHGEKQQDVYYLTFKVQGRKVEAEVLASPYDYILLNPSDVPWLMKKPLQLTVLVPLHEYQERLLQQTALPKEQKELLQKLFLKYDALWQHWENQVGHRRIKPHNIATGTLAPRPQKQYPINPKAKPSIQIVIDDLLKQGVLIQQNSTMNTPVYPVPKPDGKWRMVLDYREVNKTIPLIAAQNQHSAGILSSIYRGKYKTTLDLTNGFWAHPITPESYWLTAFTWQGKQYCWTRLPQGFLNSPALFTADVVDLLKEIPNVQAYVDDIYISHDDPQEHLEQLEKIFSILLNAGYVVSLKKSEIAQREVEFLGFNITKEGRGLTDTFKQKLLNITPPKDLKQLQSILGLLNFARNFIPNYSELVKPLYTIVANANGKFISWTEDNSNQLQHIISVLNQADNLEERNPETRLIIKVNSSPSAGYIRYYNEGSKRPIMYVNYIFSKAEAKFTQTEKLLTTMHKGLIKAMDLAMGQEILVYSPIVSMTKIQRTPLPERKALPVRWITWMTYLEDPRIQFHYDKSLPELQQIPNVTEDVIAKTKHPSEFAMVFYTDGSAIKHPDVNKSHSAGMGIAQVQFIPEYKIVHQWSIPLGDHTAQLAEIAAVEFACKKALKISGPVLIVTDSFYVAESANKELPYWKSNGFLNNKKKPLRHVSKWKSIAECLQLKPDIIIMHEKGHQQPMTTLHTEGNNLADKLATQGSYVVHAGKRTADGSEFEKRTADGSEFESPKKKAKVE

SEQ ID NO: 411 - protein, 2178 aa, synthetic construct
  source 1..2178: note = Description of Artificial Sequence: Synthetic polypeptide
MPAAKRVKLDGGDKKYSIGLDIGTNSVGWAVITDEYKVPSKKFKVLGNTDRHSIKKNLIGALLFDSGETAEATRLKRTARRRYTRRKNRICYLQEIFSNEMAKVDDSFFHRLEESFLVEEDKKHERHPIFGNIVDEVAYHEKYPTIYHLRKKLVDSTDKADLRLIYLALAHMIKFRGHFLIEGDLNPDNSDVDKLFIQLVQTYNQLFEENPINASGVDAKAILSARLSKSRRLENLIAQLPGEKKNGLFGNLIALSLGLTPNFKSNFDLAEDAKLQLSKDTYDDDLDNLLAQIGDQYADLFLAAKNLSDAILLSDILRVNTEITKAPLSASMIKRYDEHHQDLTLLKALVRQQLPEKYKEIFFDQSKNGYAGYIDGGASQEEFYKFIKPILEKMDGTEELLVKLNREDLLRKQRTFDNGSIPHQIHLGELHAILRRQEDFYPFLKDNREKIEKILTFRIPYYVGPLARGNSRFAWMTRKSEETITPWNFEEVVDKGASAQSFIERMTNFDKNLPNEKVLPKHSLLYEYFTVYNELTKVKYVTEGMRKPAFLSGEQKKAIVDLLFKTNRKVTVKQLKEDYFKKIECFDSVEISGVEDRFNASLGTYHDLLKIIKDKDFLDNEENEDILEDIVLTLTLFEDREMIEERLKTYAHLFDDKVMKQLKRRRYTGWGRLSRKLINGIRDKQSGKTILDFLKSDGFANRNFMQLIHDDSLTFKEDIQKAQVSGQGDSLHEHIANLAGSPAIKKGILQTVKVVDELVKVMGRHKPENIVIEMARENQTTQKGQKNSRERMKRIEEGIKELGSQILKEHPVENTQLQNEKLYLYYLQNGRDMYVDQELDINRLSDYDVDHIVPQSFLKDDSIDNKVLTRSDKARGKSDNVPSEEVVKKMKNYWRQLLNAKLITQRKFDNLTKAERGGLSELDKAGFIKRQLVETRQITKHVAQILDSRMNTKYDENDKLIREVKVITLKSKLVSDFRKDFQFYKVREINNYHHAHDAYLNAVVGTALIKKYPKLESEFVYGDYKVYDVRKMIAKSEQEIGKATAKYFFYSNIMNFFKTEITLANGEIRKRPLIETNGETGEIVWDKGRDFATVRKVLSMPQVNIVKKTEVQTGGFSKESILPKRNSDKLIARKKDWDPKKYGGFDSPTVAYSVLVVAKVEKGKSKKLKSVKELLGITIMERSSFEKNPIDFLEAKGYKEVKKDLIIKLPKYSLFELENGRKRMLASAGELQKGNELALPSKYVNFLYLASHYEKLKGSPEDNEQKQLFVEQHKHYLDEIIEQISEFSKRVILADANLDKVLSAYNKHRDKPIREQAENIIHLFTLTNLGAPAAFKYFDTTIDRKRYTSTKEVLDATLIHQSITGLYETRIDLSQLGGDGGPAPAPAPAPAPAPGGMDPLQLLQPLEAEIKGTKLKAHWNSGATITCVPEAFLEDERPIQTMLIKTIHGEKQQDVYYLTFKVQGRKVEAEVLASPYDYILLNPSDVPWLMKKPLQLTVLVPLHEYQERLLQQTALPKEQKELLQKLFLKYDALWQHWENQVGHRRIKPHNIATGTLAPRPQKQYPINPKAKPSIQIVIDDLLKQGVLIQQNSTMNTPVYPVPKPDGKWRMVLDYREVNKTIPLIAAQNQHSAGILSSIYRGKYKTTLDLTNGFWAHPITPESYWLTAFTWQGKQYCWTRLPQGFLNSPALFTADVVDLLKEIPNVQAYVDDIYISHDDPQEHLEQLEKIFSILLNAGYVVSLKKSEIAQREVEFLGFNITKEGRGLTDTFKQKLLNITPPKDLKQLQSILGLLNFARNFIPNYSELVKPLYTIVANANGKFISWTEDNSNQLQHIISVLNQADNLEERNPETRLIIKVNSSPSAGYIRYYNEGSKRPIMYVNYIFSKAEAKFTQTEKLLTTMHKGLIKAMDLAMGQEILVYSPIVSMTKIQRTPLPERKALPVRWITWMTYLEDPRIQFHYDKSLPELQQIPNVTEDVIAKTKHPSEFAMVFYTDGSAIKHPDVNKSHSAGMGIAQVQFIPEYKIVHQWSIPLGDHTAQLAEIAAVEFACKKALKISGPVLIVTDSFYVAESANKELPYWKSNGFLNNKKKPLRHVSKWKSIAECLQLKPDIIIMHEKGHQQPMTTLHTEGNNLADKLATQGSYVVHAGKRTADGSEFEKRTADGSEFESPKKKAKVE

SEQ ID NO: 412 - protein, 2176 aa, synthetic construct
  source 1..2176: note = Description of Artificial Sequence: Synthetic polypeptide
MPAAKRVKLDGGDKKYSIGLDIGTNSVGWAVITDEYKVPSKKFKVLGNTDRHSIKKNLIGALLFDSGETAEATRLKRTARRRYTRRKNRICYLQEIFSNEMAKVDDSFFHRLEESFLVEEDKKHERHPIFGNIVDEVAYHEKYPTIYHLRKKLVDSTDKADLRLIYLALAHMIKFRGHFLIEGDLNPDNSDVDKLFIQLVQTYNQLFEENPINASGVDAKAILSARLSKSRRLENLIAQLPGEKKNGLFGNLIALSLGLTPNFKSNFDLAEDAKLQLSKDTYDDDLDNLLAQIGDQYADLFLAAKNLSDAILLSDILRVNTEITKAPLSASMIKRYDEHHQDLTLLKALVRQQLPEKYKEIFFDQSKNGYAGYIDGGASQEEFYKFIKPILEKMDGTEELLVKLNREDLLRKQRTFDNGSIPHQIHLGELHAILRRQEDFYPFLKDNREKIEKILTFRIPYYVGPLARGNSRFAWMTRKSEETITPWNFEEVVDKGASAQSFIERMTNFDKNLPNEKVLPKHSLLYEYFTVYNELTKVKYVTEGMRKPAFLSGEQKKAIVDLLFKTNRKVTVKQLKEDYFKKIECFDSVEISGVEDRFNASLGTYHDLLKIIKDKDFLDNEENEDILEDIVLTLTLFEDREMIEERLKTYAHLFDDKVMKQLKRRRYTGWGRLSRKLINGIRDKQSGKTILDFLKSDGFANRNFMQLIHDDSLTFKEDIQKAQVSGQGDSLHEHIANLAGSPAIKKGILQTVKVVDELVKVMGRHKPENIVIEMARENQTTQKGQKNSRERMKRIEEGIKELGSQILKEHPVENTQLQNEKLYLYYLQNGRDMYVDQELDINRLSDYDVDHIVPQSFLKDDSIDNKVLTRSDKARGKSDNVPSEEVVKKMKNYWRQLLNAKLITQRKFDNLTKAERGGLSELDKAGFIKRQLVETRQITKHVAQILDSRMNTKYDENDKLIREVKVITLKSKLVSDFRKDFQFYKVREINNYHHAHDAYLNAVVGTALIKKYPKLESEFVYGDYKVYDVRKMIAKSEQEIGKATAKYFFYSNIMNFFKTEITLANGEIRKRPLIETNGETGEIVWDKGRDFATVRKVLSMPQVNIVKKTEVQTGGFSKESILPKRNSDKLIARKKDWDPKKYGGFDSPTVAYSVLVVAKVEKGKSKKLKSVKELLGITIMERSSFEKNPIDFLEAKGYKEVKKDLIIKLPKYSLFELENGRKRMLASAGELQKGNELALPSKYVNFLYLASHYEKLKGSPEDNEQKQLFVEQHKHYLDEIIEQISEFSKRVILADANLDKVLSAYNKHRDKPIREQAENIIHLFTLTNLGAPAAFKYFDTTIDRKRYTSTKEVLDATLIHQSITGLYETRIDLSQLGGDGGPAPEAAAKGSSGGMDPLQLLQPLEAEIKGTKLKAHWNSGATITCVPEAFLEDERPIQTMLIKTIHGEKQQDVYYLTFKVQGRKVEAEVLASPYDYILLNPSDVPWLMKKPLQLTVLVPLHEYQERLLQQTALPKEQKELLQKLFLKYDALWQHWENQVGHRRIKPHNIATGTLAPRPQKQYPINPKAKPSIQIVIDDLLKQGVLIQQNSTMNTPVYPVPKPDGKWRMVLDYREVNKTIPLIAAQNQHSAGILSSIYRGKYKTTLDLTNGFWAHPITPESYWLTAFTWQGKQYCWTRLPQGFLNSPALFTADVVDLLKEIPNVQAYVDDIYISHDDPQEHLEQLEKIFSILLNAGYVVSLKKSEIAQREVEFLGFNITKEGRGLTDTFKQKLLNITPPKDLKQLQSILGLLNFARNFIPNYSELVKPLYTIVANANGKFISWTEDNSNQLQHIISVLNQADNLEERNPETRLIIKVNSSPSAGYIRYYNEGSKRPIMYVNYIFSKAEAKFTQTEKLLTTMHKGLIKAMDLAMGQEILVYSPIVSMTKIQRTPLPERKALPVRWITWMTYLEDPRIQFHYDKSLPELQQIPNVTEDVIAKTKHPSEFAMVFYTDGSAIKHPDVNKSHSAGMGIAQVQFIPEYKIVHQWSIPLGDHTAQLAEIAAVEFACKKALKISGPVLIVTDSFYVAESANKELPYWKSNGFLNNKKKPLRHVSKWKSIAECLQLKPDIIIMHEKGHQQPMTTLHTEGNNLADKLATQGSYVVHAGKRTADGSEFEKRTADGSEFESPKKKAKVE

SEQ ID NO: 413 - protein, 2180 aa, synthetic construct
  source 1..2180: note = Description of Artificial Sequence: Synthetic polypeptide
MPAAKRVKLDGGDKKYSIGLDIGTNSVGWAVITDEYKVPSKKFKVLGNTDRHSIKKNLIGALLFDSGETAEATRLKRTARRRYTRRKNRICYLQEIFSNEMAKVDDSFFHRLEESFLVEEDKKHERHPIFGNIVDEVAYHEKYPTIYHLRKKLVDSTDKADLRLIYLALAHMIKFRGHFLIEGDLNPDNSDVDKLFIQLVQTYNQLFEENPINASGVDAKAILSARLSKSRRLENLIAQLPGEKKNGLFGNLIALSLGLTPNFKSNFDLAEDAKLQLSKDTYDDDLDNLLAQIGDQYADLFLAAKNLSDAILLSDILRVNTEITKAPLSASMIKRYDEHHQDLTLLKALVRQQLPEKYKEIFFDQSKNGYAGYIDGGASQEEFYKFIKPILEKMDGTEELLVKLNREDLLRKQRTFDNGSIPHQIHLGELHAILRRQEDFYPFLKDNREKIEKILTFRIPYYVGPLARGNSRFAWMTRKSEETITPWNFEEVVDKGASAQSFIERMTNFDKNLPNEKVLPKHSLLYEYFTVYNELTKVKYVTEGMRKPAFLSGEQKKAIVDLLFKTNRKVTVKQLKEDYFKKIECFDSVEISGVEDRFNASLGTYHDLLKIIKDKDFLDNEENEDILEDIVLTLTLFEDREMIEERLKTYAHLFDDKVMKQLKRRRYTGWGRLSRKLINGIRDKQSGKTILDFLKSDGFANRNFMQLIHDDSLTFKEDIQKAQVSGQGDSLHEHIANLAGSPAIKKGILQTVKVVDELVKVMGRHKPENIVIEMARENQTTQKGQKNSRERMKRIEEGIKELGSQILKEHPVENTQLQNEKLYLYYLQNGRDMYVDQELDINRLSDYDVDHIVPQSFLKDDSIDNKVLTRSDKARGKSDNVPSEEVVKKMKNYWRQLLNAKLITQRKFDNLTKAERGGLSELDKAGFIKRQLVETRQITKHVAQILDSRMNTKYDENDKLIREVKVITLKSKLVSDFRKDFQFYKVREINNYHHAHDAYLNAVVGTALIKKYPKLESEFVYGDYKVYDVRKMIAKSEQEIGKATAKYFFYSNIMNFFKTEITLANGEIRKRPLIETNGETGEIVWDKGRDFATVRKVLSMPQVNIVKKTEVQTGGFSKESILPKRNSDKLIARKKDWDPKKYGGFDSPTVAYSVLVVAKVEKGKSKKLKSVKELLGITIMERSSFEKNPIDFLEAKGYKEVKKDLIIKLPKYSLFELENGRKRMLASAGELQKGNELALPSKYVNFLYLASHYEKLKGSPEDNEQKQLFVEQHKHYLDEIIEQISEFSKRVILADANLDKVLSAYNKHRDKPIREQAENIIHLFTLTNLGAPAAFKYFDTTIDRKRYTSTKEVLDATLIHQSITGLYETRIDLSQLGGDGGEAAAKEAAAKEAAAKGGMDPLQLLQPLEAEIKGTKLKAHWNSGATITCVPEAFLEDERPIQTMLIKTIHGEKQQDVYYLTFKVQGRKVEAEVLASPYDYILLNPSDVPWLMKKPLQLTVLVPLHEYQERLLQQTALPKEQKELLQKLFLKYDALWQHWENQVGHRRIKPHNIATGTLAPRPQKQYPINPKAKPSIQIVIDDLLKQGVLIQQNSTMNTPVYPVPKPDGKWRMVLDYREVNKTIPLIAAQNQHSAGILSSIYRGKYKTTLDLTNGFWAHPITPESYWLTAFTWQGKQYCWTRLPQGFLNSPALFTADVVDLLKEIPNVQAYVDDIYISHDDPQEHLEQLEKIFSILLNAGYVVSLKKSEIAQREVEFLGFNITKEGRGLTDTFKQKLLNITPPKDLKQLQSILGLLNFARNFIPNYSELVKPLYTIVANANGKFISWTEDNSNQLQHIISVLNQADNLEERNPETRLIIKVNSSPSAGYIRYYNEGSKRPIMYVNYIFSKAEAKFTQTEKLLTTMHKGLIKAMDLAMGQEILVYSPIVSMTKIQRTPLPERKALPVRWITWMTYLEDPRIQFHYDKSLPELQQIPNVTEDVIAKTKHPSEFAMVFYTDGSAIKHPDVNKSHSAGMGIAQVQFIPEYKIVHQWSIPLGDHTAQLAEIAAVEFACKKALKISGPVLIVTDSFYVAESANKELPYWKSNGFLNNKKKPLRHVSKWKSIAECLQLKPDIIIMHEKGHQQPMTTLHTEGNNLADKLATQGSYVVHAGKRTADGSEFEKRTADGSEFESPKKKAKVE

SEQ ID NO: 414 - protein, 2176 aa, synthetic construct
  source 1..2176: note = Description of Artificial Sequence: Synthetic polypeptide
MPAAKRVKLDGGDKKYSIGLDIGTNSVGWAVITDEYKVPSKKFKVLGNTDRHSIKKNLIGALLFDSGETAEATRLKRTARRRYTRRKNRICYLQEIFSNEMAKVDDSFFHRLEESFLVEEDKKHERHPIFGNIVDEVAYHEKYPTIYHLRKKLVDSTDKADLRLIYLALAHMIKFRGHFLIEGDLNPDNSDVDKLFIQLVQTYNQLFEENPINASGVDAKAILSARLSKSRRLENLIAQLPGEKKNGLFGNLIALSLGLTPNFKSNFDLAEDAKLQLSKDTYDDDLDNLLAQIGDQYADLFLAAKNLSDAILLSDILRVNTEITKAPLSASMIKRYDEHHQDLTLLKALVRQQLPEKYKEIFFDQSKNGYAGYIDGGASQEEFYKFIKPILEKMDGTEELLVKLNREDLLRKQRTFDNGSIPHQIHLGELHAILRRQEDFYPFLKDNREKIEKILTFRIPYYVGPLARGNSRFAWMTRKSEETITPWNFEEVVDKGASAQSFIERMTNFDKNLPNEKVLPKHSLLYEYFTVYNELTKVKYVTEGMRKPAFLSGEQKKAIVDLLFKTNRKVTVKQLKEDYFKKIECFDSVEISGVEDRFNASLGTYHDLLKIIKDKDFLDNEENEDILEDIVLTLTLFEDREMIEERLKTYAHLFDDKVMKQLKRRRYTGWGRLSRKLINGIRDKQSGKTILDFLKSDGFANRNFMQLIHDDSLTFKEDIQKAQVSGQGDSLHEHIANLAGSPAIKKGILQTVKVVDELVKVMGRHKPENIVIEMARENQTTQKGQKNSRERMKRIEEGIKELGSQILKEHPVENTQLQNEKLYLYYLQNGRDMYVDQELDINRLSDYDVDHIVPQSFLKDDSIDNKVLTRSDKARGKSDNVPSEEVVKKMKNYWRQLLNAKLITQRKFDNLTKAERGGLSELDKAGFIKRQLVETRQITKHVAQILDSRMNTKYDENDKLIREVKVITLKSKLVSDFRKDFQFYKVREINNYHHAHDAYLNAVVGTALIKKYPKLESEFVYGDYKVYDVRKMIAKSEQEIGKATAKYFFYSNIMNFFKTEITLANGEIRKRPLIETNGETGEIVWDKGRDFATVRKVLSMPQVNIVKKTEVQTGGFSKESILPKRNSDKLIARKKDWDPKKYGGFDSPTVAYSVLVVAKVEKGKSKKLKSVKELLGITIMERSSFEKNPIDFLEAKGYKEVKKDLIIKLPKYSLFELENGRKRMLASAGELQKGNELALPSKYVNFLYLASHYEKLKGSPEDNEQKQLFVEQHKHYLDEIIEQISEFSKRVILADANLDKVLSAYNKHRDKPIREQAENIIHLFTLTNLGAPAAFKYFDTTIDRKRYTSTKEVLDATLIHQSITGLYETRIDLSQLGGDGGEAAAKGSSPAPGGMDPLQLLQPLEAEIKGTKLKAHWNSGATITCVPEAFLEDERPIQTMLIKTIHGEKQQDVYYLTFKVQGRKVEAEVLASPYDYILLNPSDVPWLMKKPLQLTVLVPLHEYQERLLQQTALPKEQKELLQKLFLKYDALWQHWENQVGHRRIKPHNIATGTLAPRPQKQYPINPKAKPSIQIVIDDLLKQGVLIQQNSTMNTPVYPVPKPDGKWRMVLDYREVNKTIPLIAAQNQHSAGILSSIYRGKYKTTLDLTNGFWAHPITPESYWLTAFTWQGKQYCWTRLPQGFLNSPALFTADVVDLLKEIPNVQAYVDDIYISHDDPQEHLEQLEKIFSILLNAGYVVSLKKSEIAQREVEFLGFNITKEGRGLTDTFKQKLLNITPPKDLKQLQSILGLLNFARNFIPNYSELVKPLYTIVANANGKFISWTEDNSNQLQHIISVLNQADNLEERNPETRLIIKVNSSPSAGYIRYYNEGSKRPIMYVNYIFSKAEAKFTQTEKLLTTMHKGLIKAMDLAMGQEILVYSPIVSMTKIQRTPLPERKALPVRWITWMTYLEDPRIQFHYDKSLPELQQIPNVTEDVIAKTKHPSEFAMVFYTDGSAIKHPDVNKSHSAGMGIAQVQFIPEYKIVHQWSIPLGDHTAQLAEIAAVEFACKKALKISGPVLIVTDSFYVAESANKELPYWKSNGFLNNKKKPLRHVSKWKSIAECLQLKPDIIIMHEKGHQQPMTTLHTEGNNLADKLATQGSYVVHAGKRTADGSEFEKRTADGSEFESPKKKAKVE

SEQ ID NO: 415 - protein, 2174 aa, synthetic construct
  source 1..2174: note = Description of Artificial Sequence: Synthetic polypeptide
MPAAKRVKLDGGDKKYSIGLDIGTNSVGWAVITDEYKVPSKKFKVLGNTDRHSIKKNLIGALLFDSGETAEATRLKRTARRRYTRRKNRICYLQEIFSNEMAKVDDSFFHRLEESFLVEEDKKHERHPIFGNIVDEVAYHEKYPTIYHLRKKLVDSTDKADLRLIYLALAHMIKFRGHFLIEGDLNPDNSDVDKLFIQLVQTYNQLFEENPINASGVDAKAILSARLSKSRRLENLIAQLPGEKKNGLFGNLIALSLGLTPNFKSNFDLAEDAKLQLSKDTYDDDLDNLLAQIGDQYADLFLAAKNLSDAILLSDILRVNTEITKAPLSASMIKRYDEHHQDLTLLKALVRQQLPEKYKEIFFDQSKNGYAGYIDGGASQEEFYKFIKPILEKMDGTEELLVKLNREDLLRKQRTFDNGSIPHQIHLGELHAILRRQEDFYPFLKDNREKIEKILTFRIPYYVGPLARGNSRFAWMTRKSEETITPWNFEEVVDKGASAQSFIERMTNFDKNLPNEKVLPKHSLLYEYFTVYNELTKVKYVTEGMRKPAFLSGEQKKAIVDLLFKTNRKVTVKQLKEDYFKKIECFDSVEISGVEDRFNASLGTYHDLLKIIKDKDFLDNEENEDILEDIVLTLTLFEDREMIEERLKTYAHLFDDKVMKQLKRRRYTGWGRLSRKLINGIRDKQSGKTILDFLKSDGFANRNFMQLIHDDSLTFKEDIQKAQVSGQGDSLHEHIANLAGSPAIKKGILQTVKVVDELVKVMGRHKPENIVIEMARENQTTQKGQKNSRERMKRIEEGIKELGSQILKEHPVENTQLQNEKLYLYYLQNGRDMYVDQELDINRLSDYDVDHIVPQSFLKDDSIDNKVLTRSDKARGKSDNVPSEEVVKKMKNYWRQLLNAKLITQRKFDNLTKAERGGLSELDKAGFIKRQLVETRQITKHVAQILDSRMNTKYDENDKLIREVKVITLKSKLVSDFRKDFQFYKVREINNYHHAHDAYLNAVVGTALIKKYPKLESEFVYGDYKVYDVRKMIAKSEQEIGKATAKYFFYSNIMNFFKTEITLANGEIRKRPLIETNGETGEIVWDKGRDFATVRKVLSMPQVNIVKKTEVQTGGFSKESILPKRNSDKLIARKKDWDPKKYGGFDSPTVAYSVLVVAKVEKGKSKKLKSVKELLGITIMERSSFEKNPIDFLEAKGYKEVKKDLIIKLPKYSLFELENGRKRMLASAGELQKGNELALPSKYVNFLYLASHYEKLKGSPEDNEQKQLFVEQHKHYLDEIIEQISEFSKRVILADANLDKVLSAYNKHRDKPIREQAENIIHLFTLTNLGAPAAFKYFDTTIDRKRYTSTKEVLDATLIHQSITGLYETRIDLSQLGGDGGGGGPAPGSSGGMDPLQLLQPLEAEIKGTKLKAHWNSGATITCVPEAFLEDERPIQTMLIKTIHGEKQQDVYYLTFKVQGRKVEAEVLASPYDYILLNPSDVPWLMKKPLQLTVLVPLHEYQERLLQQTALPKEQKELLQKLFLKYDALWQHWENQVGHRRIKPHNIATGTLAPRPQKQYPINPKAKPSIQIVIDDLLKQGVLIQQNSTMNTPVYPVPKPDGKWRMVLDYREVNKTIPLIAAQNQHSAGILSSIYRGKYKTTLDLTNGFWAHPITPESYWLTAFTWQGKQYCWTRLPQGFLNSPALFTADVVDLLKEIPNVQAYVDDIYISHDDPQEHLEQLEKIFSILLNAGYVVSLKKSEIAQREVEFLGFNITKEGRGLTDTFKQKLLNITPPKDLKQLQSILGLLNFARNFIPNYSELVKPLYTIVANANGKFISWTEDNSNQLQHIISVLNQADNLEERNPETRLIIKVNSSPSAGYIRYYNEGSKRPIMYVNYIFSKAEAKFTQTEKLLTTMHKGLIKAMDLAMGQEILVYSPIVSMTKIQRTPLPERKALPVRWITWMTYLEDPRIQFHYDKSLPELQQIPNVTEDVIAKTKHPSEFAMVFYTDGSAIKHPDVNKSHSAGMGIAQVQFIPEYKIVHQWSIPLGDHTAQLAEIAAVEFACKKALKISGPVLIVTDSFYVAESANKELPYWKSNGFLNNKKKPLRHVSKWKSIAECLQLKPDIIIMHEKGHQQPMTTLHTEGNNLADKLATQGSYVVHAGKRTADGSEFEKRTADGSEFESPKKKAKVE

SEQ ID NO: 416 - protein, 2173 aa, synthetic construct
  source 1..2173: note = Description of Artificial Sequence: Synthetic polypeptide
MPAAKRVKLDGGDKKYSIGLDIGTNSVGWAVITDEYKVPSKKFKVLGNTDRHSIKKNLIGALLFDSGETAEATRLKRTARRRYTRRKNRICYLQEIFSNEMAKVDDSFFHRLEESFLVEEDKKHERHPIFGNIVDEVAYHEKYPTIYHLRKKLVDSTDKADLRLIYLALAHMIKFRGHFLIEGDLNPDNSDVDKLFIQLVQTYNQLFEENPINASGVDAKAILSARLSKSRRLENLIAQLPGEKKNGLFGNLIALSLGLTPNFKSNFDLAEDAKLQLSKDTYDDDLDNLLAQIGDQYADLFLAAKNLSDAILLSDILRVNTEITKAPLSASMIKRYDEHHQDLTLLKALVRQQLPEKYKEIFFDQSKNGYAGYIDGGASQEEFYKFIKPILEKMDGTEELLVKLNREDLLRKQRTFDNGSIPHQIHLGELHAILRRQEDFYPFLKDNREKIEKILTFRIPYYVGPLARGNSRFAWMTRKSEETITPWNFEEVVDKGASAQSFIERMTNFDKNLPNEKVLPKHSLLYEYFTVYNELTKVKYVTEGMRKPAFLSGEQKKAIVDLLFKTNRKVTVKQLKEDYFKKIECFDSVEISGVEDRFNASLGTYHDLLKIIKDKDFLDNEENEDILEDIVLTLTLFEDREMIEERLKTYAHLFDDKVMKQLKRRRYTGWGRLSRKLINGIRDKQSGKTILDFLKSDGFANRNFMQLIHDDSLTFKEDIQKAQVSGQGDSLHEHIANLAGSPAIKKGILQTVKVVDELVKVMGRHKPENIVIEMARENQTTQKGQKNSRERMKRIEEGIKELGSQILKEHPVENTQLQNEKLYLYYLQNGRDMYVDQELDINRLSDYDVDHIVPQSFLKDDSIDNKVLTRSDKARGKSDNVPSEEVVKKMKNYWRQLLNAKLITQRKFDNLTKAERGGLSELDKAGFIKRQLVETRQITKHVAQILDSRMNTKYDENDKLIREVKVITLKSKLVSDFRKDFQFYKVREINNYHHAHDAYLNAVVGTALIKKYPKLESEFVYGDYKVYDVRKMIAKSEQEIGKATAKYFFYSNIMNFFKTEITLANGEIRKRPLIETNGETGEIVWDKGRDFATVRKVLSMPQVNIVKKTEVQTGGFSKESILPKRNSDKLIARKKDWDPKKYGGFDSPTVAYSVLVVAKVEKGKSKKLKSVKELLGITIMERSSFEKNPIDFLEAKGYKEVKKDLIIKLPKYSLFELENGRKRMLASAGELQKGNELALPSKYVNFLYLASHYEKLKGSPEDNEQKQLFVEQHKHYLDEIIEQISEFSKRVILADANLDKVLSAYNKHRDKPIREQAENIIHLFTLTNLGAPAAFKYFDTTIDRKRYTSTKEVLDATLIHQSITGLYETRIDLSQLGGDGGGGGEAAAKGGMDPLQLLQPLEAEIKGTKLKAHWNSGATITCVPEAFLEDERPIQTMLIKTIHGEKQQDVYYLTFKVQGRKVEAEVLASPYDYILLNPSDVPWLMKKPLQLTVLVPLHEYQERLLQQTALPKEQKELLQKLFLKYDALWQHWENQVGHRRIKPHNIATGTLAPRPQKQYPINPKAKPSIQIVIDDLLKQGVLIQQNSTMNTPVYPVPKPDGKWRMVLDYREVNKTIPLIAAQNQHSAGILSSIYRGKYKTTLDLTNGFWAHPITPESYWLTAFTWQGKQYCWTRLPQGFLNSPALFTADVVDLLKEIPNVQAYVDDIYISHDDPQEHLEQLEKIFSILLNAGYVVSLKKSEIAQREVEFLGFNITKEGRGLTDTFKQKLLNITPPKDLKQLQSILGLLNFARNFIPNYSELVKPLYTIVANANGKFISWTEDNSNQLQHIISVLNQADNLEERNPETRLIIKVNSSPSAGYIRYYNEGSKRPIMYVNYIFSKAEAKFTQTEKLLTTMHKGLIKAMDLAMGQEILVYSPIVSMTKIQRTPLPERKALPVRWITWMTYLEDPRIQFHYDKSLPELQQIPNVTEDVIAKTKHPSEFAMVFYTDGSAIKHPDVNKSHSAGMGIAQVQFIPEYKIVHQWSIPLGDHTAQLAEIAAVEFACKKALKISGPVLIVTDSFYVAESANKELPYWKSNGFLNNKKKPLRHVSKWKSIAECLQLKPDIIIMHEKGHQQPMTTLHTEGNNLADKLATQGSYVVHAGKRTADGSEFEKRTADGSEFESPKKKAKVE

SEQ ID NO: 417 - protein, 2176 aa, synthetic construct
  source 1..2176: note = Description of Artificial Sequence: Synthetic polypeptide
MPAAKRVKLDGGDKKYSIGLDIGTNSVGWAVITDEYKVPSKKFKVLGNTDRHSIKKNLIGALLFDSGETAEATRLKRTARRRYTRRKNRICYLQEIFSNEMAKVDDSFFHRLEESFLVEEDKKHERHPIFGNIVDEVAYHEKYPTIYHLRKKLVDSTDKADLRLIYLALAHMIKFRGHFLIEGDLNPDNSDVDKLFIQLVQTYNQLFEENPINASGVDAKAILSARLSKSRRLENLIAQLPGEKKNGLFGNLIALSLGLTPNFKSNFDLAEDAKLQLSKDTYDDDLDNLLAQIGDQYADLFLAAKNLSDAILLSDILRVNTEITKAPLSASMIKRYDEHHQDLTLLKALVRQQLPEKYKEIFFDQSKNGYAGYIDGGASQEEFYKFIKPILEKMDGTEELLVKLNREDLLRKQRTFDNGSIPHQIHLGELHAILRRQEDFYPFLKDNREKIEKILTFRIPYYVGPLARGNSRFAWMTRKSEETITPWNFEEVVDKGASAQSFIERMTNFDKNLPNEKVLPKHSLLYEYFTVYNELTKVKYVTEGMRKPAFLSGEQKKAIVDLLFKTNRKVTVKQLKEDYFKKIECFDSVEISGVEDRFNASLGTYHDLLKIIKDKDFLDNEENEDILEDIVLTLTLFEDREMIEERLKTYAHLFDDKVMKQLKRRRYTGWGRLSRKLINGIRDKQSGKTILDFLKSDGFANRNFMQLIHDDSLTFKEDIQKAQVSGQGDSLHEHIANLAGSPAIKKGILQTVKVVDELVKVMGRHKPENIVIEMARENQTTQKGQKNSRERMKRIEEGIKELGSQILKEHPVENTQLQNEKLYLYYLQNGRDMYVDQELDINRLSDYDVDHIVPQSFLKDDSIDNKVLTRSDKARGKSDNVPSEEVVKKMKNYWRQLLNAKLITQRKFDNLTKAERGGLSELDKAGFIKRQLVETRQITKHVAQILDSRMNTKYDENDKLIREVKVITLKSKLVSDFRKDFQFYKVREINNYHHAHDAYLNAVVGTALIKKYPKLESEFVYGDYKVYDVRKMIAKSEQEIGKATAKYFFYSNIMNFFKTEITLANGEIRKRPLIETNGETGEIVWDKGRDFATVRKVLSMPQVNIVKKTEVQTGGFSKESILPKRNSDKLIARKKDWDPKKYGGFDSPTVAYSVLVVAKVEKGKSKKLKSVKELLGITIMERSSFEKNPIDFLEAKGYKEVKKDLIIKLPKYSLFELENGRKRMLASAGELQKGNELALPSKYVNFLYLASHYEKLKGSPEDNEQKQLFVEQHKHYLDEIIEQISEFSKRVILADANLDKVLSAYNKHRDKPIREQAENIIHLFTLTNLGAPAAFKYFDTTIDRKRYTSTKEVLDATLIHQSITGLYETRIDLSQLGGDGGGGSEAAAKPAPGGMDPLQLLQPLEAEIKGTKLKAHWNSGATITCVPEAFLEDERPIQTMLIKTIHGEKQQDVYYLTFKVQGRKVEAEVLASPYDYILLNPSDVPWLMKKPLQLTVLVPLHEYQERLLQQTALPKEQKELLQKLFLKYDALWQHWENQVGHRRIKPHNIATGTLAPRPQKQYPINPKAKPSIQIVIDDLLKQGVLIQQNSTMNTPVYPVPKPDGKWRMVLDYREVNKTIPLIAAQNQHSAGILSSIYRGKYKTTLDLTNGFWAHPITPESYWLTAFTWQGKQYCWTRLPQGFLNSPALFTADVVDLLKEIPNVQAYVDDIYISHDDPQEHLEQLEKIFSILLNAGYVVSLKKSEIAQREVEFLGFNITKEGRGLTDTFKQKLLNITPPKDLKQLQSILGLLNFARNFIPNYSELVKPLYTIVANANGKFISWTEDNSNQLQHIISVLNQADNLEERNPETRLIIKVNSSPSAGYIRYYNEGSKRPIMYVNYIFSKAEAKFTQTEKLLTTMHKGLIKAMDLAMGQEILVYSPIVSMTKIQRTPLPERKALPVRWITWMTYLEDPRIQFHYDKSLPELQQIPNVTEDVIAKTKHPSEFAMVFYTDGSAIKHPDVNKSHSAGMGIAQVQFIPEYKIVHQWSIPLGDHTAQLAEIAAVEFACKKALKISGPVLIVTDSFYVAESANKELPYWKSNGFLNNKKKPLRHVSKWKSIAECLQLKPDIIIMHEKGHQQPMTTLHTEGNNLADKLATQGSYVVHAGKRTADGSEFEKRTADGSEFESPKKKAKVE

SEQ ID NO: 418 - protein, 2177 aa, synthetic construct
  source 1..2177: note = Description of Artificial Sequence: Synthetic polypeptide
MPAAKRVKLDGGDKKYSIGLDIGTNSVGWAVITDEYKVPSKKFKVLGNTDRHSIKKNLIGALLFDSGETAEATRLKRTARRRYTRRKNRICYLQEIFSNEMAKVDDSFFHRLEESFLVEEDKKHERHPIFGNIVDEVAYHEKYPTIYHLRKKLVDSTDKADLRLIYLALAHMIKFRGHFLIEGDLNPDNSDVDKLFIQLVQTYNQLFEENPINASGVDAKAILSARLSKSRRLENLIAQLPGEKKNGLFGNLIALSLGLTPNFKSNFDLAEDAKLQLSKDTYDDDLDNLLAQIGDQYADLFLAAKNLSDAILLSDILRVNTEITKAPLSASMIKRYDEHHQDLTLLKALVRQQLPEKYKEIFFDQSKNGYAGYIDGGASQEEFYKFIKPILEKMDGTEELLVKLNREDLLRKQRTFDNGSIPHQIHLGELHAILRRQEDFYPFLKDNREKIEKILTFRIPYYVGPLARGNSRFAWMTRKSEETITPWNFEEVVDKGASAQSFIERMTNFDKNLPNEKVLPKHSLLYEYFTVYNELTKVKYVTEGMRKPAFLSGEQKKAIVDLLFKTNRKVTVKQLKEDYFKKIECFDSVEISGVEDRFNASLGTYHDLLKIIKDKDFLDNEENEDILEDIVLTLTLFEDREMIEERLKTYAHLFDDKVMKQLKRRRYTGWGRLSRKLINGIRDKQSGKTILDFLKSDGFANRNFMQLIHDDSLTFKEDIQKAQVSGQGDSLHEHIANLAGSPAIKKGILQTVKVVDELVKVMGRHKPENIVIEMARENQTTQKGQKNSRERMKRIEEGIKELGSQILKEHPVENTQLQNEKLYLYYLQNGRDMYVDQELDINRLSDYDVDHIVPQSFLKDDSIDNKVLTRSDKARGKSDNVPSEEVVKKMKNYWRQLLNAKLITQRKFDNLTKAERGGLSELDKAGFIKRQLVETRQITKHVAQILDSRMNTKYDENDKLIREVKVITLKSKLVSDFRKDFQFYKVREINNYHHAHDAYLNAVVGTALIKKYPKLESEFVYGDYKVYDVRKMIAKSEQEIGKATAKYFFYSNIMNFFKTEITLANGEIRKRPLIETNGETGEIVWDKGRDFATVRKVLSMPQVNIVKKTEVQTGGFSKESILPKRNSDKLIARKKDWDPKKYGGFDSPTVAYSVLVVAKVEKGKSKKLKSVKELLGITIMERSSFEKNPIDFLEAKGYKEVKKDLIIKLPKYSLFELENGRKRMLASAGELQKGNELALPSKYVNFLYLASHYEKLKGSPEDNEQKQLFVEQHKHYLDEIIEQISEFSKRVILADANLDKVLSAYNKHRDKPIREQAENIIHLFTLTNLGAPAAFKYFDTTIDRKRYTSTKEVLDATLIHQSITGLYETRIDLSQLGGDGGGSSGSSGSSGSSGGMDPLQLLQPLEAEIKGTKLKAHWNSGATITCVPEAFLEDERPIQTMLIKTIHGEKQQDVYYLTFKVQGRKVEAEVLASPYDYILLNPSDVPWLMKKPLQLTVLVPLHEYQERLLQQTALPKEQKELLQKLFLKYDALWQHWENQVGHRRIKPHNIATGTLAPRPQKQYPINPKAKPSIQIVIDDLLKQGVLIQQNSTMNTPVYPVPKPDGKWRMVLDYREVNKTIPLIAAQNQHSAGILSSIYRGKYKTTLDLTNGFWAHPITPESYWLTAFTWQGKQYCWTRLPQGFLNSPALFTADVVDLLKEIPNVQAYVDDIYISHDDPQEHLEQLEKIFSILLNAGYVVSLKKSEIAQREVEFLGFNITKEGRGLTDTFKQKLLNITPPKDLKQLQSILGLLNFARNFIPNYSELVKPLYTIVANANGKFISWTEDNSNQLQHIISVLNQADNLEERNPETRLIIKVNSSPSAGYIRYYNEGSKRPIMYVNYIFSKAEAKFTQTEKLLTTMHKGLIKAMDLAMGQEILVYSPIVSMTKIQRTPLPERKALPVRWITWMTYLEDPRIQFHYDKSLPELQQIPNVTEDVIAKTKHPSEFAMVFYTDGSAIKHPDVNKSHSAGMGIAQVQFIPEYKIVHQWSIPLGDHTAQLAEIAAVEFACKKALKISGPVLIVTDSFYVAESANKELPYWKSNGFLNNKKKPLRHVSKWKSIAECLQLKPDIIIMHEKGHQQPMTTLHTEGNNLADKLATQGSYVVHAGKRTADGSEFEKRTADGSEFESPKKKAKVE

SEQ ID NO: 419 - protein, 2174 aa, synthetic construct
  source 1..2174: note = Description of Artificial Sequence: Synthetic polypeptide
MPAAKRVKLDGGDKKYSIGLDIGTNSVGWAVITDEYKVPSKKFKVLGNTDRHSIKKNLIGALLFDSGETAEATRLKRTARRRYTRRKNRICYLQEIFSNEMAKVDDSFFHRLEESFLVEEDKKHERHPIFGNIVDEVAYHEKYPTIYHLRKKLVDSTDKADLRLIYLALAHMIKFRGHFLIEGDLNPDNSDVDKLFIQLVQTYNQLFEENPINASGVDAKAILSARLSKSRRLENLIAQLPGEKKNGLFGNLIALSLGLTPNFKSNFDLAEDAKLQLSKDTYDDDLDNLLAQIGDQYADLFLAAKNLSDAILLSDILRVNTEITKAPLSASMIKRYDEHHQDLTLLKALVRQQLPEKYKEIFFDQSKNGYAGYIDGGASQEEFYKFIKPILEKMDGTEELLVKLNREDLLRKQRTFDNGSIPHQIHLGELHAILRRQEDFYPFLKDNREKIEKILTFRIPYYVGPLARGNSRFAWMTRKSEETITPWNFEEVVDKGASAQSFIERMTNFDKNLPNEKVLPKHSLLYEYFTVYNELTKVKYVTEGMRKPAFLSGEQKKAIVDLLFKTNRKVTVKQLKEDYFKKIECFDSVEISGVEDRFNASLGTYHDLLKIIKDKDFLDNEENEDILEDIVLTLTLFEDREMIEERLKTYAHLFDDKVMKQLKRRRYTGWGRLSRKLINGIRDKQSGKTILDFLKSDGFANRNFMQLIHDDSLTFKEDIQKAQVSGQGDSLHEHIANLAGSPAIKKGILQTVKVVDELVKVMGRHKPENIVIEMARENQTTQKGQKNSRERMKRIEEGIKELGSQILKEHPVENTQLQNEKLYLYYLQNGRDMYVDQELDINRLSDYDVDHIVPQSFLKDDSIDNKVLTRSDKARGKSDNVPSEEVVKKMKNYWRQLLNAKLITQRKFDNLTKAERGGLSELDKAGFIKRQLVETRQITKHVAQILDSRMNTKYDENDKLIREVKVITLKSKLVSDFRKDFQFYKVREINNYHHAHDAYLNAVVGTALIKKYPKLESEFVYGDYKVYDVRKMIAKSEQEIGKATAKYFFYSNIMNFFKTEITLANGEIRKRPLIETNGETGEIVWDKGRDFATVRKVLSMPQVNIVKKTEVQTGGFSKESILPKRNSDKLIARKKDWDPKKYGGFDSPTVAYSVLVVAKVEKGKSKKLKSVKELLGITIMERSSFEKNPIDFLEAKGYKEVKKDLIIKLPKYSLFELENGRKRMLASAGELQKGNELALPSKYVNFLYLASHYEKLKGSPEDNEQKQLFVEQHKHYLDEIIEQISEFSKRVILADANLDKVLSAYNKHRDKPIREQAENIIHLFTLTNLGAPAAFKYFDTTIDRKRYTSTKEVLDATLIHQSITGLYETRIDLSQLGGDGGGGGGSSPAPGGMDPLQLLQPLEAEIKGTKLKAHWNSGATITCVPEAFLEDERPIQTMLIKTIHGEKQQDVYYLTFKVQGRKVEAEVLASPYDYILLNPSDVPWLMKKPLQLTVLVPLHEYQERLLQQTALPKEQKELLQKLFLKYDALWQHWENQVGHRRIKPHNIATGTLAPRPQKQYPINPKAKPSIQIVIDDLLKQGVLIQQNSTMNTPVYPVPKPDGKWRMVLDYREVNKTIPLIAAQNQHSAGILSSIYRGKYKTTLDLTNGFWAHPITPESYWLTAFTWQGKQYCWTRLPQGFLNSPALFTADVVDLLKEIPNVQAYVDDIYISHDDPQEHLEQLEKIFSILLNAGYVVSLKKSEIAQREVEFLGFNITKEGRGLTDTFKQKLLNITPPKDLKQLQSILGLLNFARNFIPNYSELVKPLYTIVANANGKFISWTEDNSNQLQHIISVLNQADNLEERNPETRLIIKVNSSPSAGYIRYYNEGSKRPIMYVNYIFSKAEAKFTQTEKLLTTMHKGLIKAMDLAMGQEILVYSPIVSMTKIQRTPLPERKALPVRWITWMTYLEDPRIQFHYDKSLPELQQIPNVTEDVIAKTKHPSEFAMVFYTDGSAIKHPDVNKSHSAGMGIAQVQFIPEYKIVHQWSIPLGDHTAQLAEIAAVEFACKKALKISGPVLIVTDSFYVAESANKELPYWKSNGFLNNKKKPLRHVSKWKSIAECLQLKPDIIIMHEKGHQQPMTTLHTEGNNLADKLATQGSYVVHAGKRTADGSEFEKRTADGSEFESPKKKAKVE

SEQ ID NO: 420 - protein, 2176 aa, synthetic construct
  source 1..2176: note = Description of Artificial Sequence: Synthetic polypeptide
MPAAKRVKLDGGDKKYSIGLDIGTNSVGWAVITDEYKVPSKKFKVLGNTDRHSIKKNLIGALLFDSGETAEATRLKRTARRRYTRRKNRICYLQEIFSNEMAKVDDSFFHRLEESFLVEEDKKHERHPIFGNIVDEVAYHEKYPTIYHLRKKLVDSTDKADLRLIYLALAHMIKFRGHFLIEGDLNPDNSDVDKLFIQLVQTYNQLFEENPINASGVDAKAILSARLSKSRRLENLIAQLPGEKKNGLFGNLIALSLGLTPNFKSNFDLAEDAKLQLSKDTYDDDLDNLLAQIGDQYADLFLAAKNLSDAILLSDILRVNTEITKAPLSASMIKRYDEHHQDLTLLKALVRQQLPEKYKEIFFDQSKNGYAGYIDGGASQEEFYKFIKPILEKMDGTEELLVKLNREDLLRKQRTFDNGSIPHQIHLGELHAILRRQEDFYPFLKDNREKIEKILTFRIPYYVGPLARGNSRFAWMTRKSEETITPWNFEEVVDKGASAQSFIERMTNFDKNLPNEKVLPKHSLLYEYFTVYNELTKVKYVTEGMRKPAFLSGEQKKAIVDLLFKTNRKVTVKQLKEDYFKKIECFDSVEISGVEDRFNASLGTYHDLLKIIKDKDFLDNEENEDILEDIVLTLTLFEDREMIEERLKTYAHLFDDKVMKQLKRRRYTGWGRLSRKLINGIRDKQSGKTILDFLKSDGFANRNFMQLIHDDSLTFKEDIQKAQVSGQGDSLHEHIANLAGSPAIKKGILQTVKVVDELVKVMGRHKPENIVIEMARENQTTQKGQKNSRERMKRIEEGIKELGSQILKEHPVENTQLQNEKLYLYYLQNGRDMYVDQELDINRLSDYDVDHIVPQSFLKDDSIDNKVLTRSDKARGKSDNVPSEEVVKKMKNYWRQLLNAKLITQRKFDNLTKAERGGLSELDKAGFIKRQLVETRQITKHVAQILDSRMNTKYDENDKLIREVKVITLKSKLVSDFRKDFQFYKVREINNYHHAHDAYLNAVVGTALIKKYPKLESEFVYGDYKVYDVRKMIAKSEQEIGKATAKYFFYSNIMNFFKTEITLANGEIRKRPLIETNGETGEIVWDKGRDFATVRKVLSMPQVNIVKKTEVQTGGFSKESILPKRNSDKLIARKKDWDPKKYGGFDSPTVAYSVLVVAKVEKGKSKKLKSVKELLGITIMERSSFEKNPIDFLEAKGYKEVKKDLIIKLPKYSLFELENGRKRMLASAGELQKGNELALPSKYVNFLYLASHYEKLKGSPEDNEQKQLFVEQHKHYLDEIIEQISEFSKRVILADANLDKVLSAYNKHRDKPIREQAENIIHLFTLTNLGAPAAFKYFDTTIDRKRYTSTKEVLDATLIHQSITGLYETRIDLSQLGGDGGGGGGSSEAAAKGGMDPLQLLQPLEAEIKGTKLKAHWNSGATITCVPEAFLEDERPIQTMLIKTIHGEKQQDVYYLTFKVQGRKVEAEVLASPYDYILLNPSDVPWLMKKPLQLTVLVPLHEYQERLLQQTALPKEQKELLQKLFLKYDALWQHWENQVGHRRIKPHNIATGTLAPRPQKQYPINPKAKPSIQIVIDDLLKQGVLIQQNSTMNTPVYPVPKPDGKWRMVLDYREVNKTIPLIAAQNQHSAGILSSIYRGKYKTTLDLTNGFWAHPITPESYWLTAFTWQGKQYCWTRLPQGFLNSPALFTADVVDLLKEIPNVQAYVDDIYISHDDPQEHLEQLEKIFSILLNAGYVVSLKKSEIAQREVEFLGFNITKEGRGLTDTFKQKLLNITPPKDLKQLQSILGLLNFARNFIPNYSELVKPLYTIVANANGKFISWTEDNSNQLQHIISVLNQADNLEERNPETRLIIKVNSSPSAGYIRYYNEGSKRPIMYVNYIFSKAEAKFTQTEKLLTTMHKGLIKAMDLAMGQEILVYSPIVSMTKIQRTPLPERKALPVRWITWMTYLEDPRIQFHYDKSLPELQQIPNVTEDVIAKTKHPSEFAMVFYTDGSAIKHPDVNKSHSAGMGIAQVQFIPEYKIVHQWSIPLGDHTAQLAEIAAVEFACKKALKISGPVLIVTDSFYVAESANKELPYWKSNGFLNNKKKPLRHVSKWKSIAECLQLKPDIIIMHEKGHQQPMTTLHTEGNNLADKLATQGSYVVHAGKRTADGSEFEKRTADGSEFESPKKKAKVE

SEQ ID NO: 421 - protein, 2180 aa, synthetic construct
  source 1..2180: note = Description of Artificial Sequence: Synthetic polypeptide
MPAAKRVKLDGGDKKYSIGLDIGTNSVGWAVITDEYKVPSKKFKVLGNTDRHSIKKNLIGALLFDSGETAEATRLKRTARRRYTRRKNRICYLQEIFSNEMAKVDDSFFHRLEESFLVEEDKKHERHPIFGNIVDEVAYHEKYPTIYHLRKKLVDSTDKADLRLIYLALAHMIKFRGHFLIEGDLNPDNSDVDKLFIQLVQTYNQLFEENPINASGVDAKAILSARLSKSRRLENLIAQLPGEKKNGLFGNLIALSLGLTPNFKSNFDLAEDAKLQLSKDTYDDDLDNLLAQIGDQYADLFLAAKNLSDAILLSDILRVNTEITKAPLSASMIKRYDEHHQDLTLLKALVRQQLPEKYKEIFFDQSKNGYAGYIDGGASQEEFYKFIKPILEKMDGTEELLVKLNREDLLRKQRTFDNGSIPHQIHLGELHAILRRQEDFYPFLKDNREKIEKILTFRIPYYVGPLARGNSRFAWMTRKSEETITPWNFEEVVDKGASAQSFIERMTNFDKNLPNEKVLPKHSLLYEYFTVYNELTKVKYVTEGMRKPAFLSGEQKKAIVDLLFKTNRKVTVKQLKEDYFKKIECFDSVEISGVEDRFNASLGTYHDLLKIIKDKDFLDNEENEDILEDIVLTLTLFEDREMIEERLKTYAHLFDDKVMKQLKRRRYTGWGRLSRKLINGIRDKQSGKTILDFLKSDGFANRNFMQLIHDDSLTFKEDIQKAQVSGQGDSLHEHIANLAGSPAIKKGILQTVKVVDELVKVMGRHKPENIVIEMARENQTTQKGQKNSRERMKRIEEGIKELGSQILKEHPVENTQLQNEKLYLYYLQNGRDMYVDQELDINRLSDYDVDHIVPQSFLKDDSIDNKVLTRSDKARGKSDNVPSEEVVKKMKNYWRQLLNAKLITQRKFDNLTKAERGGLSELDKAGFIKRQLVETRQITKHVAQILDSRMNTKYDENDKLIREVKVITLKSKLVSDFRKDFQFYKVREINNYHHAHDAYLNAVVGTALIKKYPKLESEFVYGDYKVYDVRKMIAKSEQEIGKATAKYFFYSNIMNFFKTEITLANGEIRKRPLIETNGETGEIVWDKGRDFATVRKVLSMPQVNIVKKTEVQTGGFSKESILPKRNSDKLIARKKDWDPKKYGGFDSPTVAYSVLVVAKVEKGKSKKLKSVKELLGITIMERSSFEKNPIDFLEAKGYKEVKKDLIIKLPKYSLFELENGRKRMLASAGELQKGNELALPSKYVNFLYLASHYEKLKGSPEDNEQKQLFVEQHKHYLDEIIEQISEFSKRVILADANLDKVLSAYNKHRDKPIREQAENIIHLFTLTNLGAPAAFKYFDTTIDRKRYTSTKEVLDATLIHQSITGLYETRIDLSQLGGDGGGGGGSEAAAKGGGGSGGMDPLQLLQPLEAEIKGTKLKAHWNSGATITCVPEAFLEDERPIQTMLIKTIHGEKQQDVYYLTFKVQGRKVEAEVLASPYDYILLNPSDVPWLMKKPLQLTVLVPLHEYQERLLQQTALPKEQKELLQKLFLKYDALWQHWENQVGHRRIKPHNIATGTLAPRPQKQYPINPKAKPSIQIVIDDLLKQGVLIQQNSTMNTPVYPVPKPDGKWRMVLDYREVNKTIPLIAAQNQHSAGILSSIYRGKYKTTLDLTNGFWAHPITPESYWLTAFTWQGKQYCWTRLPQGFLNSPALFTADVVDLLKEIPNVQAYVDDIYISHDDPQEHLEQLEKIFSILLNAGYVVSLKKSEIAQREVEFLGFNITKEGRGLTDTFKQKLLNITPPKDLKQLQSILGLLNFARNFIPNYSELVKPLYTIVANANGKFISWTEDNSNQLQHIISVLNQADNLEERNPETRLIIKVNSSPSAGYIRYYNEGSKRPIMYVNYIFSKAEAKFTQTEKLLTTMHKGLIKAMDLAMGQEILVYSPIVSMTKIQRTPLPERKALPVRWITWMTYLEDPRIQFHYDKSLPELQQIPNVTEDVIAKTKHPSEFAMVFYTDGSAIKHPDVNKSHSAGMGIAQVQFIPEYKIVHQWSIPLGDHTAQLAEIAAVEFACKKALKISGPVLIVTDSFYVAESANKELPYWKSNGFLNNKKKPLRHVSKWKSIAECLQLKPDIIIMHEKGHQQPMTTLHTEGNNLADKLATQGSYVVHAGKRTADGSEFEKRTADGSEFESPKKKAKVE

SEQ ID NO: 422 - protein, 2176 aa, synthetic construct
  source 1..2176: note = Description of Artificial Sequence: Synthetic polypeptide
MPAAKRVKLDGGDKKYSIGLDIGTNSVGWAVITDEYKVPSKKFKVLGNTDRHSIKKNLIGALLFDSGETAEATRLKRTARRRYTRRKNRICYLQEIFSNEMAKVDDSFFHRLEESFLVEEDKKHERHPIFGNIVDEVAYHEKYPTIYHLRKKLVDSTDKADLRLIYLALAHMIKFRGHFLIEGDLNPDNSDVDKLFIQLVQTYNQLFEENPINASGVDAKAILSARLSKSRRLENLIAQLPGEKKNGLFGNLIALSLGLTPNFKSNFDLAEDAKLQLSKDTYDDDLDNLLAQIGDQYADLFLAAKNLSDAILLSDILRVNTEITKAPLSASMIKRYDEHHQDLTLLKALVRQQLPEKYKEIFFDQSKNGYAGYIDGGASQEEFYKFIKPILEKMDGTEELLVKLNREDLLRKQRTFDNGSIPHQIHLGELHAILRRQEDFYPFLKDNREKIEKILTFRIPYYVGPLARGNSRFAWMTRKSEETITPWNFEEVVDKGASAQSFIERMTNFDKNLPNEKVLPKHSLLYEYFTVYNELTKVKYVTEGMRKPAFLSGEQKKAIVDLLFKTNRKVTVKQLKEDYFKKIECFDSVEISGVEDRFNASLGTYHDLLKIIKDKDFLDNEENEDILEDIVLTLTLFEDREMIEERLKTYAHLFDDKVMKQLKRRRYTGWGRLSRKLINGIRDKQSGKTILDFLKSDGFANRNFMQLIHDDSLTFKEDIQKAQVSGQGDSLHEHIANLAGSPAIKKGILQTVKVVDELVKVMGRHKPENIVIEMARENQTTQKGQKNSRERMKRIEEGIKELGSQILKEHPVENTQLQNEKLYLYYLQNGRDMYVDQELDINRLSDYDVDHIVPQSFLKDDSIDNKVLTRSDKARGKSDNVPSEEVVKKMKNYWRQLLNAKLITQRKFDNLTKAERGGLSELDKAGFIKRQLVETRQITKHVAQILDSRMNTKYDENDKLIREVKVITLKSKLVSDFRKDFQFYKVREINNYHHAHDAYLNAVVGTALIKKYPKLESEFVYGDYKVYDVRKMIAKSEQEIGKATAKYFFYSNIMNFFKTEITLANGEIRKRPLIETNGETGEIVWDKGRDFATVRKVLSMPQVNIVKKTEVQTGGFSKESILPKRNSDKLIARKKDWDPKKYGGFDSPTVAYSVLVVAKVEKGKSKKLKSVKELLGITIMERSSFEKNPIDFLEAKGYKEVKKDLIIKLPKYSLFELENGRKRMLASAGELQKGNELALPSKYVNFLYLASHYEKLKGSPEDNEQKQLFVEQHKHYLDEIIEQISEFSKRVILADANLDKVLSAYNKHRDKPIREQAENIIHLFTLTNLGAPAAFKYFDTTIDRKRYTSTKEVLDATLIHQSITGLYETRIDLSQLGGDGGGGGEAAAKGGSGGMDPLQLLQPLEAEIKGTKLKAHWNSGATITCVPEAFLEDERPIQTMLIKTIHGEKQQDVYYLTFKVQGRKVEAEVLASPYDYILLNPSDVPWLMKKPLQLTVLVPLHEYQERLLQQTALPKEQKELLQKLFLKYDALWQHWENQVGHRRIKPHNIATGTLAPRPQKQYPINPKAKPSIQIVIDDLLKQGVLIQQNSTMNTPVYPVPKPDGKWRMVLDYREVNKTIPLIAAQNQHSAGILSSIYRGKYKTTLDLTNGFWAHPITPESYWLTAFTWQGKQYCWTRLPQGFLNSPALFTADVVDLLKEIPNVQAYVDDIYISHDDPQEHLEQLEKIFSILLNAGYVVSLKKSEIAQREVEFLGFNITKEGRGLTDTFKQKLLNITPPKDLKQLQSILGLLNFARNFIPNYSELVKPLYTIVANANGKFISWTEDNSNQLQHIISVLNQADNLEERNPETRLIIKVNSSPSAGYIRYYNEGSKRPIMYVNYIFSKAEAKFTQTEKLLTTMHKGLIKAMDLAMGQEILVYSPIVSMTKIQRTPLPERKALPVRWITWMTYLEDPRIQFHYDKSLPELQQIPNVTEDVIAKTKHPSEFAMVFYTDGSAIKHPDVNKSHSAGMGIAQVQFIPEYKIVHQWSIPLGDHTAQLAEIAAVEFACKKALKISGPVLIVTDSFYVAESANKELPYWKSNGFLNNKKKPLRHVSKWKSIAECLQLKPDIIIMHEKGHQQPMTTLHTEGNNLADKLATQGSYVVHAGKRTADGSEFEKRTADGSEFESPKKKAKVE

SEQ ID NO: 423 - protein, 2171 aa, synthetic construct
  source 1..2171: note = Description of Artificial Sequence: Synthetic polypeptide
MPAAKRVKLDGGDKKYSIGLDIGTNSVGWAVITDEYKVPSKKFKVLGNTDRHSIKKNLIGALLFDSGETAEATRLKRTARRRYTRRKNRICYLQEIFSNEMAKVDDSFFHRLEESFLVEEDKKHERHPIFGNIVDEVAYHEKYPTIYHLRKKLVDSTDKADLRLIYLALAHMIKFRGHFLIEGDLNPDNSDVDKLFIQLVQTYNQLFEENPINASGVDAKAILSARLSKSRRLENLIAQLPGEKKNGLFGNLIALSLGLTPNFKSNFDLAEDAKLQLSKDTYDDDLDNLLAQIGDQYADLFLAAKNLSDAILLSDILRVNTEITKAPLSASMIKRYDEHHQDLTLLKALVRQQLPEKYKEIFFDQSKNGYAGYIDGGASQEEFYKFIKPILEKMDGTEELLVKLNREDLLRKQRTFDNGSIPHQIHLGELHAILRRQEDFYPFLKDNREKIEKILTFRIPYYVGPLARGNSRFAWMTRKSEETITPWNFEEVVDKGASAQSFIERMTNFDKNLPNEKVLPKHSLLYEYFTVYNELTKVKYVTEGMRKPAFLSGEQKKAIVDLLFKTNRKVTVKQLKEDYFKKIECFDSVEISGVEDRFNASLGTYHDLLKIIKDKDFLDNEENEDILEDIVLTLTLFEDREMIEERLKTYAHLFDDKVMKQLKRRRYTGWGRLSRKLINGIRDKQSGKTILDFLKSDGFANRNFMQLIHDDSLTFKEDIQKAQVSGQGDSLHEHIANLAGSPAIKKGILQTVKVVDELVKVMGRHKPENIVIEMARENQTTQKGQKNSRERMKRIEEGIKELGSQILKEHPVENTQLQNEKLYLYYLQNGRDMYVDQELDINRLSDYDVDHIVPQSFLKDDSIDNKVLTRSDKARGKSDNVPSEEVVKKMKNYWRQLLNAKLITQRKFDNLTKAERGGLSELDKAGFIKRQLVETRQITKHVAQILDSRMNTKYDENDKLIREVKVITLKSKLVSDFRKDFQFYKVREINNYHHAHDAYLNAVVGTALIKKYPKLESEFVYGDYKVYDVRKMIAKSEQEIGKATAKYFFYSNIMNFFKTEITLANGEIRKRPLIETNGETGEIVWDKGRDFATVRKVLSMPQVNIVKKTEVQTGGFSKESILPKRNSDKLIARKKDWDPKKYGGFDSPTVAYSVLVVAKVEKGKSKKLKSVKELLGITIMERSSFEKNPIDFLEAKGYKEVKKDLIIKLPKYSLFELENGRKRMLASAGELQKGNELALPSKYVNFLYLASHYEKLKGSPEDNEQKQLFVEQHKHYLDEIIEQISEFSKRVILADANLDKVLSAYNKHRDKPIREQAENIIHLFTLTNLGAPAAFKYFDTTIDRKRYTSTKEVLDATLIHQSITGLYETRIDLSQLGGDGGGSSGSSGGMDPLQLLQPLEAEIKGTKLKAHWNSGATITCVPEAFLEDERPIQTMLIKTIHGEKQQDVYYLTFKVQGRKVEAEVLASPYDYILLNPSDVPWLMKKPLQLTVLVPLHEYQERLLQQTALPKEQKELLQKLFLKYDALWQHWENQVGHRRIKPHNIATGTLAPRPQKQYPINPKAKPSIQIVIDDLLKQGVLIQQNSTMNTPVYPVPKPDGKWRMVLDYREVNKTIPLIAAQNQHSAGILSSIYRGKYKTTLDLTNGFWAHPITPESYWLTAFTWQGKQYCWTRLPQGFLNSPALFTADVVDLLKEIPNVQAYVDDIYISHDDPQEHLEQLEKIFSILLNAGYVVSLKKSEIAQREVEFLGFNITKEGRGLTDTFKQKLLNITPPKDLKQLQSILGLLNFARNFIPNYSELVKPLYTIVANANGKFISWTEDNSNQLQHIISVLNQADNLEERNPETRLIIKVNSSPSAGYIRYYNEGSKRPIMYVNYIFSKAEAKFTQTEKLLTTMHKGLIKAMDLAMGQEILVYSPIVSMTKIQRTPLPERKALPVRWITWMTYLEDPRIQFHYDKSLPELQQIPNVTEDVIAKTKHPSEFAMVFYTDGSAIKHPDVNKSHSAGMGIAQVQFIPEYKIVHQWSIPLGDHTAQLAEIAAVEFACKKALKISGPVLIVTDSFYVAESANKELPYWKSNGFLNNKKKPLRHVSKWKSIAECLQLKPDIIIMHEKGHQQPMTTLHTEGNNLADKLATQGSYVVHAGKRTADGSEFEKRTADGSEFESPKKKAKVE

SEQ ID NO: 424 - protein, 2176 aa, synthetic construct
  source 1..2176: note = Description of Artificial Sequence: Synthetic polypeptide
MPAAKRVKLDGGDKKYSIGLDIGTNSVGWAVITDEYKVPSKKFKVLGNTDRHSIKKNLIGALLFDSGETAEATRLKRTARRRYTRRKNRICYLQEIFSNEMAKVDDSFFHRLEESFLVEEDKKHERHPIFGNIVDEVAYHEKYPTIYHLRKKLVDSTDKADLRLIYLALAHMIKFRGHFLIEGDLNPDNSDVDKLFIQLVQTYNQLFEENPINASGVDAKAILSARLSKSRRLENLIAQLPGEKKNGLFGNLIALSLGLTPNFKSNFDLAEDAKLQLSKDTYDDDLDNLLAQIGDQYADLFLAAKNLSDAILLSDILRVNTEITKAPLSASMIKRYDEHHQDLTLLKALVRQQLPEKYKEIFFDQSKNGYAGYIDGGASQEEFYKFIKPILEKMDGTEELLVKLNREDLLRKQRTFDNGSIPHQIHLGELHAILRRQEDFYPFLKDNREKIEKILTFRIPYYVGPLARGNSRFAWMTRKSEETITPWNFEEVVDKGASAQSFIERMTNFDKNLPNEKVLPKHSLLYEYFTVYNELTKVKYVTEGMRKPAFLSGEQKKAIVDLLFKTNRKVTVKQLKEDYFKKIECFDSVEISGVEDRFNASLGTYHDLLKIIKDKDFLDNEENEDILEDIVLTLTLFEDREMIEERLKTYAHLFDDKVMKQLKRRRYTGWGRLSRKLINGIRDKQSGKTILDFLKSDGFANRNFMQLIHDDSLTFKEDIQKAQVSGQGDSLHEHIANLAGSPAIKKGILQTVKVVDELVKVMGRHKPENIVIEMARENQTTQKGQKNSRERMKRIEEGIKELGSQILKEHPVENTQLQNEKLYLYYLQNGRDMYVDQELDINRLSDYDVDHIVPQSFLKDDSIDNKVLTRSDKARGKSDNVPSEEVVKKMKNYWRQLLNAKLITQRKFDNLTKAERGGLSELDKAGFIKRQLVETRQITKHVAQILDSRMNTKYDENDKLIREVKVITLKSKLVSDFRKDFQFYKVREINNYHHAHDAYLNAVVGTALIKKYPKLESEFVYGDYKVYDVRKMIAKSEQEIGKATAKYFFYSNIMNFFKTEITLANGEIRKRPLIETNGETGEIVWDKGRDFATVRKVLSMPQVNIVKKTEVQTGGFSKESILPKRNSDKLIARKKDWDPKKYGGFDSPTVAYSVLVVAKVEKGKSKKLKSVKELLGITIMERSSFEKNPIDFLEAKGYKEVKKDLIIKLPKYSLFELENGRKRMLASAGELQKGNELALPSKYVNFLYLASHYEKLKGSPEDNEQKQLFVEQHKHYLDEIIEQISEFSKRVILADANLDKVLSAYNKHRDKPIREQAENIIHLFTLTNLGAPAAFKYFDTTIDRKRYTSTKEVLDATLIHQSITGLYETRIDLSQLGGDGGPAPGGGEAAAKGGMDPLQLLQPLEAEIKGTKLKAHWNSGATITCVPEAFLEDERPIQTMLIKTIHGEKQQDVYYLTFKVQGRKVEAEVLASPYDYILLNPSDVPWLMKKPLQLTVLVPLHEYQERLLQQTALPKEQKELLQKLFLKYDALWQHWENQVGHRRIKPHNIATGTLAPRPQKQYPINPKAKPSIQIVIDDLLKQGVLIQQNSTMNTPVYPVPKPDGKWRMVLDYREVNKTIPLIAAQNQHSAGILSSIYRGKYKTTLDLTNGFWAHPITPESYWLTAFTWQGKQYCWTRLPQGFLNSPALFTADVVDLLKEIPNVQAYVDDIYISHDDPQEHLEQLEKIFSILLNAGYVVSLKKSEIAQREVEFLGFNITKEGRGLTDTFKQKLLNITPPKDLKQLQSILGLLNFARNFIPNYSELVKPLYTIVANANGKFISWTEDNSNQLQHIISVLNQADNLEERNPETRLIIKVNSSPSAGYIRYYNEGSKRPIMYVNYIFSKAEAKFTQTEKLLTTMHKGLIKAMDLAMGQEILVYSPIVSMTKIQRTPLPERKALPVRWITWMTYLEDPRIQFHYDKSLPELQQIPNVTEDVIAKTKHPSEFAMVFYTDGSAIKHPDVNKSHSAGMGIAQVQFIPEYKIVHQWSIPLGDHTAQLAEIAAVEFACKKALKISGPVLIVTDSFYVAESANKELPYWKSNGFLNNKKKPLRHVSKWKSIAECLQLKPDIIIMHEKGHQQPMTTLHTEGNNLADKLATQGSYVVHAGKRTADGSEFEKRTADGSEFESPKKKAKVE

SEQ ID NO: 425 - protein, 2174 aa, synthetic construct
  source 1..2174: note = Description of Artificial Sequence: Synthetic polypeptide
MPAAKRVKLDGGDKKYSIGLDIGTNSVGWAVITDEYKVPSKKFKVLGNTDRHSIKKNLIGALLFDSGETAEATRLKRTARRRYTRRKNRICYLQEIFSNEMAKVDDSFFHRLEESFLVEEDKKHERHPIFGNIVDEVAYHEKYPTIYHLRKKLVDSTDKADLRLIYLALAHMIKFRGHFLIEGDLNPDNSDVDKLFIQLVQTYNQLFEENPINASGVDAKAILSARLSKSRRLENLIAQLPGEKKNGLFGNLIALSLGLTPNFKSNFDLAEDAKLQLSKDTYDDDLDNLLAQIGDQYADLFLAAKNLSDAILLSDILRVNTEITKAPLSASMIKRYDEHHQDLTLLKALVRQQLPEKYKEIFFDQSKNGYAGYIDGGASQEEFYKFIKPILEKMDGTEELLVKLNREDLLRKQRTFDNGSIPHQIHLGELHAILRRQEDFYPFLKDNREKIEKILTFRIPYYVGPLARGNSRFAWMTRKSEETITPWNFEEVVDKGASAQSFIERMTNFDKNLPNEKVLPKHSLLYEYFTVYNELTKVKYVTEGMRKPAFLSGEQKKAIVDLLFKTNRKVTVKQLKEDYFKKIECFDSVEISGVEDRFNASLGTYHDLLKIIKDKDFLDNEENEDILEDIVLTLTLFEDREMIEERLKTYAHLFDDKVMKQLKRRRYTGWGRLSRKLINGIRDKQSGKTILDFLKSDGFANRNFMQLIHDDSLTFKEDIQKAQVSGQGDSLHEHIANLAGSPAIKKGILQTVKVVDELVKVMGRHKPENIVIEMARENQTTQKGQKNSRERMKRIEEGIKELGSQILKEHPVENTQLQNEKLYLYYLQNGRDMYVDQELDINRLSDYDVDHIVPQSFLKDDSIDNKVLTRSDKARGKSDNVPSEEVVKKMKNYWRQLLNAKLITQRKFDNLTKAERGGLSELDKAGFIKRQLVETRQITKHVAQILDSRMNTKYDENDKLIREVKVITLKSKLVSDFRKDFQFYKVREINNYHHAHDAYLNAVVGTALIKKYPKLESEFVYGDYKVYDVRKMIAKSEQEIGKATAKYFFYSNIMNFFKTEITLANGEIRKRPLIETNGETGEIVWDKGRDFATVRKVLSMPQVNIVKKTEVQTGGFSKESILPKRNSDKLIARKKDWDPKKYGGFDSPTVAYSVLVVAKVEKGKSKKLKSVKELLGITIMERSSFEKNPIDFLEAKGYKEVKKDLIIKLPKYSLFELENGRKRMLASAGELQKGNELALPSKYVNFLYLASHYEKLKGSPEDNEQKQLFVEQHKHYLDEIIEQISEFSKRVILADANLDKVLSAYNKHRDKPIREQAENIIHLFTLTNLGAPAAFKYFDTTIDRKRYTSTKEVLDATLIHQSITGLYETRIDLSQLGGDGGGGSGGSGGSGGMDPLQLLQPLEAEIKGTKLKAHWNSGATITCVPEAFLEDERPIQTMLIKTIHGEKQQDVYYLTFKVQGRKVEAEVLASPYDYILLNPSDVPWLMKKPLQLTVLVPLHEYQERLLQQTALPKEQKELLQKLFLKYDALWQHWENQVGHRRIKPHNIATGTLAPRPQKQYPINPKAKPSIQIVIDDLLKQGVLIQQNSTMNTPVYPVPKPDGKWRMVLDYREVNKTIPLIAAQNQHSAGILSSIYRGKYKTTLDLTNGFWAHPITPESYWLTAFTWQGKQYCWTRLPQGFLNSPALFTADVVDLLKEIPNVQAYVDDIYISHDDPQEHLEQLEKIFSILLNAGYVVSLKKSEIAQREVEFLGFNITKEGRGLTDTFKQKLLNITPPKDLKQLQSILGLLNFARNFIPNYSELVKPLYTIVANANGKFISWTEDNSNQLQHIISVLNQADNLEERNPETRLIIKVNSSPSAGYIRYYNEGSKRPIMYVNYIFSKAEAKFTQTEKLLTTMHKGLIKAMDLAMGQEILVYSPIVSMTKIQRTPLPERKALPVRWITWMTYLEDPRIQFHYDKSLPELQQIPNVTEDVIAKTKHPSEFAMVFYTDGSAIKHPDVNKSHSAGMGIAQVQFIPEYKIVHQWSIPLGDHTAQLAEIAAVEFACKKALKISGPVLIVTDSFYVAESANKELPYWKSNGFLNNKKKPLRHVSKWKSIAECLQLKPDIIIMHEKGHQQPMTTLHTEGNNLADKLATQGSYVVHAGKRTADGSEFEKRTADGSEFESPKKKAKVE

SEQ ID NO: 426 - protein, 2094 aa, synthetic construct
  source 1..2094: note = Description of Artificial Sequence: Synthetic polypeptide
MPAAKRVKLDGGDKKYSIGLDIGTNSVGWAVITDEYKVPSKKFKVLGNTDRHSIKKNLIGALLFDSGETAEATRLKRTARRRYTRRKNRICYLQEIFSNEMAKVDDSFFHRLEESFLVEEDKKHERHPIFGNIVDEVAYHEKYPTIYHLRKKLVDSTDKADLRLIYLALAHMIKFRGHFLIEGDLNPDNSDVDKLFIQLVQTYNQLFEENPINASGVDAKAILSARLSKSRRLENLIAQLPGEKKNGLFGNLIALSLGLTPNFKSNFDLAEDAKLQLSKDTYDDDLDNLLAQIGDQYADLFLAAKNLSDAILLSDILRVNTEITKAPLSASMIKRYDEHHQDLTLLKALVRQQLPEKYKEIFFDQSKNGYAGYIDGGASQEEFYKFIKPILEKMDGTEELLVKLNREDLLRKQRTFDNGSIPHQIHLGELHAILRRQEDFYPFLKDNREKIEKILTFRIPYYVGPLARGNSRFAWMTRKSEETITPWNFEEVVDKGASAQSFIERMTNFDKNLPNEKVLPKHSLLYEYFTVYNELTKVKYVTEGMRKPAFLSGEQKKAIVDLLFKTNRKVTVKQLKEDYFKKIECFDSVEISGVEDRFNASLGTYHDLLKIIKDKDFLDNEENEDILEDIVLTLTLFEDREMIEERLKTYAHLFDDKVMKQLKRRRYTGWGRLSRKLINGIRDKQSGKTILDFLKSDGFANRNFMQLIHDDSLTFKEDIQKAQVSGQGDSLHEHIANLAGSPAIKKGILQTVKVVDELVKVMGRHKPENIVIEMARENQTTQKGQKNSRERMKRIEEGIKELGSQILKEHPVENTQLQNEKLYLYYLQNGRDMYVDQELDINRLSDYDVDHIVPQSFLKDDSIDNKVLTRSDKARGKSDNVPSEEVVKKMKNYWRQLLNAKLITQRKFDNLTKAERGGLSELDKAGFIKRQLVETRQITKHVAQILDSRMNTKYDENDKLIREVKVITLKSKLVSDFRKDFQFYKVREINNYHHAHDAYLNAVVGTALIKKYPKLESEFVYGDYKVYDVRKMIAKSEQEIGKATAKYFFYSNIMNFFKTEITLANGEIRKRPLIETNGETGEIVWDKGRDFATVRKVLSMPQVNIVKKTEVQTGGFSKESILPKRNSDKLIARKKDWDPKKYGGFDSPTVAYSVLVVAKVEKGKSKKLKSVKELLGITIMERSSFEKNPIDFLEAKGYKEVKKDLIIKLPKYSLFELENGRKRMLASAGELQKGNELALPSKYVNFLYLASHYEKLKGSPEDNEQKQLFVEQHKHYLDEIIEQISEFSKRVILADANLDKVLSAYNKHRDKPIREQAENIIHLFTLTNLGAPAAFKYFDTTIDRKRYTSTKEVLDATLIHQSITGLYETRIDLSQLGGDGGGSSGSSGSSGSSGSSGSSGGVPWLMKKPLQLTVLVPLHEYQERLLQQTALPKEQKELLQKLFLKYDALWQHWENQVGHRRIKPHNIATGTLAPRPQKQYPINPKAKPSIQIVIDDLLKQGVLIQQNSTMNTPVYPVPKPDGKWRMVLDYREVNKTIPLIAAQNQHSAGILSSIYRGKYKTTLDLTNGFWAHPITPESYWLTAFTWQGKQYCWTRLPQGFLNSPALFTADVVDLLKEIPNVQAYVDDIYISHDDPQEHLEQLEKIFSILLNAGYVVSLKKSEIAQREVEFLGFNITKEGRGLTDTFKQKLLNITPPKDLKQLQSILGLLNFARNFIPNYSELVKPLYTIVANANGKFISWTEDNSNQLQHIISVLNQADNLEERNPETRLIIKVNSSPSAGYIRYYNEGSKRPIMYVNYIFSKAEAKFTQTEKLLTTMHKGLIKAMDLAMGQEILVYSPIVSMTKIQRTPLPERKALPVRWITWMTYLEDPRIQFHYDKSLPELQQIPNVTEDVIAKTKHPSEFAMVFYTDGSAIKHPDVNKSHSAGMGIAQVQFIPEYKIVHQWSIPLGDHTAQLAEIAAVEFACKKALKISGPVLIVTDSFYVAESANKELPYWKSNGFLNNKKKPLRHVSKWKSIAECLQLKPDIIIMHEKGHQQPMTTLHTEGNNLADKLATQGSYVVHAGKRTADGSEFEKRTADGSEFESPKKKAKVE

SEQ ID NO: 427 - protein, 2087 aa, synthetic construct
  source 1..2087: note = Description of Artificial Sequence: Synthetic polypeptide
MPAAKRVKLDGGDKKYSIGLDIGTNSVGWAVITDEYKVPSKKFKVLGNTDRHSIKKNLIGALLFDSGETAEATRLKRTARRRYTRRKNRICYLQEIFSNEMAKVDDSFFHRLEESFLVEEDKKHERHPIFGNIVDEVAYHEKYPTIYHLRKKLVDSTDKADLRLIYLALAHMIKFRGHFLIEGDLNPDNSDVDKLFIQLVQTYNQLFEENPINASGVDAKAILSARLSKSRRLENLIAQLPGEKKNGLFGNLIALSLGLTPNFKSNFDLAEDAKLQLSKDTYDDDLDNLLAQIGDQYADLFLAAKNLSDAILLSDILRVNTEITKAPLSASMIKRYDEHHQDLTLLKALVRQQLPEKYKEIFFDQSKNGYAGYIDGGASQEEFYKFIKPILEKMDGTEELLVKLNREDLLRKQRTFDNGSIPHQIHLGELHAILRRQEDFYPFLKDNREKIEKILTFRIPYYVGPLARGNSRFAWMTRKSEETITPWNFEEVVDKGASAQSFIERMTNFDKNLPNEKVLPKHSLLYEYFTVYNELTKVKYVTEGMRKPAFLSGEQKKAIVDLLFKTNRKVTVKQLKEDYFKKIECFDSVEISGVEDRFNASLGTYHDLLKIIKDKDFLDNEENEDILEDIVLTLTLFEDREMIEERLKTYAHLFDDKVMKQLKRRRYTGWGRLSRKLINGIRDKQSGKTILDFLKSDGFANRNFMQLIHDDSLTFKEDIQKAQVSGQGDSLHEHIANLAGSPAIKKGILQTVKVVDELVKVMGRHKPENIVIEMARENQTTQKGQKNSRERMKRIEEGIKELGSQILKEHPVENTQLQNEKLYLYYLQNGRDMYVDQELDINRLSDYDVDHIVPQSFLKDDSIDNKVLTRSDKARGKSDNVPSEEVVKKMKNYWRQLLNAKLITQRKFDNLTKAERGGLSELDKAGFIKRQLVETRQITKHVAQILDSRMNTKYDENDKLIREVKVITLKSKLVSDFRKDFQFYKVREINNYHHAHDAYLNAVVGTALIKKYPKLESEFVYGDYKVYDVRKMIAKSEQEIGKATAKYFFYSNIMNFFKTEITLANGEIRKRPLIETNGETGEIVWDKGRDFATVRKVLSMPQVNIVKKTEVQTGGFSKESILPKRNSDKLIARKKDWDPKKYGGFDSPTVAYSVLVVAKVEKGKSKKLKSVKELLGITIMERSSFEKNPIDFLEAKGYKEVKKDLIIKLPKYSLFELENGRKRMLASAGELQKGNELALPSKYVNFLYLASHYEKLKGSPEDNEQKQLFVEQHKHYLDEIIEQISEFSKRVILADANLDKVLSAYNKHRDKPIREQAENIIHLFTLTNLGAPAAFKYFDTTIDRKRYTSTKEVLDATLIHQSITGLYETRIDLSQLGGDGGPAPEAAAKGSSGGVPWLMKKPLQLTVLVPLHEYQERLLQQTALPKEQKELLQKLFLKYDALWQHWENQVGHRRIKPHNIATGTLAPRPQKQYPINPKAKPSIQIVIDDLLKQGVLIQQNSTMNTPVYPVPKPDGKWRMVLDYREVNKTIPLIAAQNQHSAGILSSIYRGKYKTTLDLTNGFWAHPITPESYWLTAFTWQGKQYCWTRLPQGFLNSPALFTADVVDLLKEIPNVQAYVDDIYISHDDPQEHLEQLEKIFSILLNAGYVVSLKKSEIAQREVEFLGFNITKEGRGLTDTFKQKLLNITPPKDLKQLQSILGLLNFARNFIPNYSELVKPLYTIVANANGKFISWTEDNSNQLQHIISVLNQADNLEERNPETRLIIKVNSSPSAGYIRYYNEGSKRPIMYVNYIFSKAEAKFTQTEKLLTTMHKGLIKAMDLAMGQEILVYSPIVSMTKIQRTPLPERKALPVRWITWMTYLEDPRIQFHYDKSLPELQQIPNVTEDVIAKTKHPSEFAMVFYTDGSAIKHPDVNKSHSAGMGIAQVQFIPEYKIVHQWSIPLGDHTAQLAEIAAVEFACKKALKISGPVLIVTDSFYVAESANKELPYWKSNGFLNNKKKPLRHVSKWKSIAECLQLKPDIIIMHEKGHQQPMTTLHTEGNNLADKLATQGSYVVHAGKRTADGSEFEKRTADGSEFESPKKKAKVE

SEQ ID NO: 428 - protein, 2091 aa, synthetic construct
  source 1..2091: note = Description of Artificial Sequence: Synthetic polypeptide
MPAAKRVKLDGGDKKYSIGLDIGTNSVGWAVITDEYKVPSKKFKVLGNTDRHSIKKNLIGALLFDSGETAEATRLKRTARRRYTRRKNRICYLQEIFSNEMAKVDDSFFHRLEESFLVEEDKKHERHPIFGNIVDEVAYHEKYPTIYHLRKKLVDSTDKADLRLIYLALAHMIKFRGHFLIEGDLNPDNSDVDKLFIQLVQTYNQLFEENPINASGVDAKAILSARLSKSRRLENLIAQLPGEKKNGLFGNLIALSLGLTPNFKSNFDLAEDAKLQLSKDTYDDDLDNLLAQIGDQYADLFLAAKNLSDAILLSDILRVNTEITKAPLSASMIKRYDEHHQDLTLLKALVRQQLPEKYKEIFFDQSKNGYAGYIDGGASQEEFYKFIKPILEKMDGTEELLVKLNREDLLRKQRTFDNGSIPHQIHLGELHAILRRQEDFYPFLKDNREKIEKILTFRIPYYVGPLARGNSRFAWMTRKSEETITPWNFEEVVDKGASAQSFIERMTNFDKNLPNEKVLPKHSLLYEYFTVYNELTKVKYVTEGMRKPAFLSGEQKKAIVDLLFKTNRKVTVKQLKEDYFKKIECFDSVEISGVEDRFNASLGTYHDLLKIIKDKDFLDNEENEDILEDIVLTLTLFEDREMIEERLKTYAHLFDDKVMKQLKRRRYTGWGRLSRKLINGIRDKQSGKTILDFLKSDGFANRNFMQLIHDDSLTFKEDIQKAQVSGQGDSLHEHIANLAGSPAIKKGILQTVKVVDELVKVMGRHKPENIVIEMARENQTTQKGQKNSRERMKRIEEGIKELGSQILKEHPVENTQLQNEKLYLYYLQNGRDMYVDQELDINRLSDYDVDHIVPQSFLKDDSIDNKVLTRSDKARGKSDNVPSEEVVKKMKNYWRQLLNAKLITQRKFDNLTKAERGGLSELDKAGFIKRQLVETRQITKHVAQILDSRMNTKYDENDKLIREVKVITLKSKLVSDFRKDFQFYKVREINNYHHAHDAYLNAVVGTALIKKYPKLESEFVYGDYKVYDVRKMIAKSEQEIGKATAKYFFYSNIMNFFKTEITLANGEIRKRPLIETNGETGEIVWDKGRDFATVRKVLSMPQVNIVKKTEVQTGGFSKESILPKRNSDKLIARKKDWDPKKYGGFDSPTVAYSVLVVAKVEKGKSKKLKSVKELLGITIMERSSFEKNPIDFLEAKGYKEVKKDLIIKLPKYSLFELENGRKRMLASAGELQKGNELALPSKYVNFLYLASHYEKLKGSPEDNEQKQLFVEQHKHYLDEIIEQISEFSKRVILADANLDKVLSAYNKHRDKPIREQAENIIHLFTLTNLGAPAAFKYFDTTIDRKRYTSTKEVLDATLIHQSITGLYETRIDLSQLGGDGGGSSGSSGSSGSSGSSGGVPWLMKKPLQLTVLVPLHEYQERLLQQTALPKEQKELLQKLFLKYDALWQHWENQVGHRRIKPHNIATGTLAPRPQKQYPINPKAKPSIQIVIDDLLKQGVLIQQNSTMNTPVYPVPKPDGKWRMVLDYREVNKTIPLIAAQNQHSAGILSSIYRGKYKTTLDLTNGFWAHPITPESYWLTAFTWQGKQYCWTRLPQGFLNSPALFTADVVDLLKEIPNVQAYVDDIYISHDDPQEHLEQLEKIFSILLNAGYVVSLKKSEIAQREVEFLGFNITKEGRGLTDTFKQKLLNITPPKDLKQLQSILGLLNFARNFIPNYSELVKPLYTIVANANGKFISWTEDNSNQLQHIISVLNQADNLEERNPETRLIIKVNSSPSAGYIRYYNEGSKRPIMYVNYIFSKAEAKFTQTEKLLTTMHKGLIKAMDLAMGQEILVYSPIVSMTKIQRTPLPERKALPVRWITWMTYLEDPRIQFHYDKSLPELQQIPNVTEDVIAKTKHPSEFAMVFYTDGSAIKHPDVNKSHSAGMGIAQVQFIPEYKIVHQWSIPLGDHTAQLAEIAAVEFACKKALKISGPVLIVTDSFYVAESANKELPYWKSNGFLNNKKKPLRHVSKWKSIAECLQLKPDIIIMHEKGHQQPMTTLHTEGNNLADKLATQGSYVVHAGKRTADGSEFEKRTADGSEFESPKKKAKVE

SEQ ID NO: 429 - protein, 2084 aa, synthetic construct
  source 1..2084: note = Description of Artificial Sequence: Synthetic polypeptide
MPAAKRVKLDGGDKKYSIGLDIGTNSVGWAVITDEYKVPSKKFKVLGNTDRHSIKKNLIGALLFDSGETAEATRLKRTARRRYTRRKNRICYLQEIFSNEMAKVDDSFFHRLEESFLVEEDKKHERHPIFGNIVDEVAYHEKYPTIYHLRKKLVDSTDKADLRLIYLALAHMIKFRGHFLIEGDLNPDNSDVDKLFIQLVQTYNQLFEENPINASGVDAKAILSARLSKSRRLENLIAQLPGEKKNGLFGNLIALSLGLTPNFKSNFDLAEDAKLQLSKDTYDDDLDNLLAQIGDQYADLFLAAKNLSDAILLSDILRVNTEITKAPLSASMIKRYDEHHQDLTLLKALVRQQLPEKYKEIFFDQSKNGYAGYIDGGASQEEFYKFIKPILEKMDGTEELLVKLNREDLLRKQRTFDNGSIPHQIHLGELHAILRRQEDFYPFLKDNREKIEKILTFRIPYYVGPLARGNSRFAWMTRKSEETITPWNFEEVVDKGASAQSFIERMTNFDKNLPNEKVLPKHSLLYEYFTVYNELTKVKYVTEGMRKPAFLSGEQKKAIVDLLFKTNRKVTVKQLKEDYFKKIECFDSVEISGVEDRFNASLGTYHDLLKIIKDKDFLDNEENEDILEDIVLTLTLFEDREMIEERLKTYAHLFDDKVMKQLKRRRYTGWGRLSRKLINGIRDKQSGKTILDFLKSDGFANRNFMQLIHDDSLTFKEDIQKAQVSGQGDSLHEHIANLAGSPAIKKGILQTVKVVDELVKVMGRHKPENIVIEMARENQTTQKGQKNSRERMKRIEEGIKELGSQILKEHPVENTQLQNEKLYLYYLQNGRDMYVDQELDINRLSDYDVDHIVPQSFLKDDSIDNKVLTRSDKARGKSDNVPSEEVVKKMKNYWRQLLNAKLITQRKFDNLTKAERGGLSELDKAGFIKRQLVETRQITKHVAQILDSRMNTKYDENDKLIREVKVITLKSKLVSDFRKDFQFYKVREINNYHHAHDAYLNAVVGTALIKKYPKLESEFVYGDYKVYDVRKMIAKSEQEIGKATAKYFFYSNIMNFFKTEITLANGEIRKRPLIETNGETGEIVWDKGRDFATVRKVLSMPQVNIVKKTEVQTGGFSKESILPKRNSDKLIARKKDWDPKKYGGFDSPTVAYSVLVVAKVEKGKSKKLKSVKELLGITIMERSSFEKNPIDFLEAKGYKEVKKDLIIKLPKYSLFELENGRKRMLASAGELQKGNELALPSKYVNFLYLASHYEKLKGSPEDNEQKQLFVEQHKHYLDEIIEQISEFSKRVILADANLDKVLSAYNKHRDKPIREQAENIIHLFTLTNLGAPAAFKYFDTTIDRKRYTSTKEVLDATLIHQSITGLYETRIDLSQLGGDGGGGGGGGGGGGVPWLMKKPLQLTVLVPLHEYQERLLQQTALPKEQKELLQKLFLKYDALWQHWENQVGHRRIKPHNIATGTLAPRPQKQYPINPKAKPSIQIVIDDLLKQGVLIQQNSTMNTPVYPVPKPDGKWRMVLDYREVNKTIPLIAAQNQHSAGILSSIYRGKYKTTLDLTNGFWAHPITPESYWLTAFTWQGKQYCWTRLPQGFLNSPALFTADVVDLLKEIPNVQAYVDDIYISHDDPQEHLEQLEKIFSILLNAGYVVSLKKSEIAQREVEFLGFNITKEGRGLTDTFKQKLLNITPPKDLKQLQSILGLLNFARNFIPNYSELVKPLYTIVANANGKFISWTEDNSNQLQHIISVLNQADNLEERNPETRLIIKVNSSPSAGYIRYYNEGSKRPIMYVNYIFSKAEAKFTQTEKLLTTMHKGLIKAMDLAMGQEILVYSPIVSMTKIQRTPLPERKALPVRWITWMTYLEDPRIQFHYDKSLPELQQIPNVTEDVIAKTKHPSEFAMVFYTDGSAIKHPDVNKSHSAGMGIAQVQFIPEYKIVHQWSIPLGDHTAQLAEIAAVEFACKKALKISGPVLIVTDSFYVAESANKELPYWKSNGFLNNKKKPLRHVSKWKSIAECLQLKPDIIIMHEKGHQQPMTTLHTEGNNLADKLATQGSYVVHAGKRTADGSEFEKRTADGSEFESPKKKAKVE

SEQ ID NO: 430 - protein, 2084 aa, synthetic construct
  source 1..2084: note = Description of Artificial Sequence: Synthetic polypeptide
MPAAKRVKLDGGDKKYSIGLDIGTNSVGWAVITDEYKVPSKKFKVLGNTDRHSIKKNLIGALLFDSGETAEATRLKRTARRRYTRRKNRICYLQEIFSNEMAKVDDSFFHRLEESFLVEEDKKHERHPIFGNIVDEVAYHEKYPTIYHLRKKLVDSTDKADLRLIYLALAHMIKFRGHFLIEGDLNPDNSDVDKLFIQLVQTYNQLFEENPINASGVDAKAILSARLSKSRRLENLIAQLPGEKKNGLFGNLIALSLGLTPNFKSNFDLAEDAKLQLSKDTYDDDLDNLLAQIGDQYADLFLAAKNLSDAILLSDILRVNTEITKAPLSASMIKRYDEHHQDLTLLKALVRQQLPEKYKEIFFDQSKNGYAGYIDGGASQEEFYKFIKPILEKMDGTEELLVKLNREDLLRKQRTFDNGSIPHQIHLGELHAILRRQEDFYPFLKDNREKIEKILTFRIPYYVGPLARGNSRFAWMTRKSEETITPWNFEEVVDKGASAQSFIERMTNFDKNLPNEKVLPKHSLLYEYFTVYNELTKVKYVTEGMRKPAFLSGEQKKAIVDLLFKTNRKVTVKQLKEDYFKKIECFDSVEISGVEDRFNASLGTYHDLLKIIKDKDFLDNEENEDILEDIVLTLTLFEDREMIEERLKTYAHLFDDKVMKQLKRRRYTGWGRLSRKLINGIRDKQSGKTILDFLKSDGFANRNFMQLIHDDSLTFKEDIQKAQVSGQGDSLHEHIANLAGSPAIKKGILQTVKVVDELVKVMGRHKPENIVIEMARENQTTQKGQKNSRERMKRIEEGIKELGSQILKEHPVENTQLQNEKLYLYYLQNGRDMYVDQELDINRLSDYDVDHIVPQSFLKDDSIDNKVLTRSDKARGKSDNVPSEEVVKKMKNYWRQLLNAKLITQRKFDNLTKAERGGLSELDKAGFIKRQLVETRQITKHVAQILDSRMNTKYDENDKLIREVKVITLKSKLVSDFRKDFQFYKVREINNYHHAHDAYLNAVVGTALIKKYPKLESEFVYGDYKVYDVRKMIAKSEQEIGKATAKYFFYSNIMNFFKTEITLANGEIRKRPLIETNGETGEIVWDKGRDFATVRKVLSMPQVNIVKKTEVQTGGFSKESILPKRNSDKLIARKKDWDPKKYGGFDSPTVAYSVLVVAKVEKGKSKKLKSVKELLGITIMERSSFEKNPIDFLEAKGYKEVKKDLIIKLPKYSLFELENGRKRMLASAGELQKGNELALPSKYVNFLYLASHYEKLKGSPEDNEQKQLFVEQHKHYLDEIIEQISEFSKRVILADANLDKVLSAYNKHRDKPIREQAENIIHLFTLTNLGAPAAFKYFDTTIDRKRYTSTKEVLDATLIHQSITGLYETRIDLSQLGGDGGPAPEAAAKGGVPWLMKKPLQLTVLVPLHEYQERLLQQTALPKEQKELLQKLFLKYDALWQHWENQVGHRRIKPHNIATGTLAPRPQKQYPINPKAKPSIQIVIDDLLKQGVLIQQNSTMNTPVYPVPKPDGKWRMVLDYREVNKTIPLIAAQNQHSAGILSSIYRGKYKTTLDLTNGFWAHPITPESYWLTAFTWQGKQYCWTRLPQGFLNSPALFTADVVDLLKEIPNVQAYVDDIYISHDDPQEHLEQLEKIFSILLNAGYVVSLKKSEIAQREVEFLGFNITKEGRGLTDTFKQKLLNITPPKDLKQLQSILGLLNFARNFIPNYSELVKPLYTIVANANGKFISWTEDNSNQLQHIISVLNQADNLEERNPETRLIIKVNSSPSAGYIRYYNEGSKRPIMYVNYIFSKAEAKFTQTEKLLTTMHKGLIKAMDLAMGQEILVYSPIVSMTKIQRTPLPERKALPVRWITWMTYLEDPRIQFHYDKSLPELQQIPNVTEDVIAKTKHPSEFAMVFYTDGSAIKHPDVNKSHSAGMGIAQVQFIPEYKIVHQWSIPLGDHTAQLAEIAAVEFACKKALKISGPVLIVTDSFYVAESANKELPYWKSNGFLNNKKKPLRHVSKWKSIAECLQLKPDIIIMHEKGHQQPMTTLHTEGNNLADKLATQGSYVVHAGKRTADGSEFEKRTADGSEFESPKKKAKVE

SEQ ID NO: 431 - protein, 2082 aa, synthetic construct
  source 1..2082: note = Description of Artificial Sequence: Synthetic polypeptide
MPAAKRVKLDGGDKKYSIGLDIGTNSVGWAVITDEYKVPSKKFKVLGNTDRHSIKKNLIGALLFDSGETAEATRLKRTARRRYTRRKNRICYLQEIFSNEMAKVDDSFFHRLEESFLVEEDKKHERHPIFGNIVDEVAYHEKYPTIYHLRKKLVDSTDKADLRLIYLALAHMIKFRGHFLIEGDLNPDNSDVDKLFIQLVQTYNQLFEENPINASGVDAKAILSARLSKSRRLENLIAQLPGEKKNGLFGNLIALSLGLTPNFKSNFDLAEDAKLQLSKDTYDDDLDNLLAQIGDQYADLFLAAKNLSDAILLSDILRVNTEITKAPLSASMIKRYDEHHQDLTLLKALVRQQLPEKYKEIFFDQSKNGYAGYIDGGASQEEFYKFIKPILEKMDGTEELLVKLNREDLLRKQRTFDNGSIPHQIHLGELHAILRRQEDFYPFLKDNREKIEKILTFRIPYYVGPLARGNSRFAWMTRKSEETITPWNFEEVVDKGASAQSFIERMTNFDKNLPNEKVLPKHSLLYEYFTVYNELTKVKYVTEGMRKPAFLSGEQKKAIVDLLFKTNRKVTVKQLKEDYFKKIECFDSVEISGVEDRFNASLGTYHDLLKIIKDKDFLDNEENEDILEDIVLTLTLFEDREMIEERLKTYAHLFDDKVMKQLKRRRYTGWGRLSRKLINGIRDKQSGKTILDFLKSDGFANRNFMQLIHDDSLTFKEDIQKAQVSGQGDSLHEHIANLAGSPAIKKGILQTVKVVDELVKVMGRHKPENIVIEMARENQTTQKGQKNSRERMKRIEEGIKELGSQILKEHPVENTQLQNEKLYLYYLQNGRDMYVDQELDINRLSDYDVDHIVPQSFLKDDSIDNKVLTRSDKARGKSDNVPSEEVVKKMKNYWRQLLNAKLITQRKFDNLTKAERGGLSELDKAGFIKRQLVETRQITKHVAQILDSRMNTKYDENDKLIREVKVITLKSKLVSDFRKDFQFYKVREINNYHHAHDAYLNAVVGTALIKKYPKLESEFVYGDYKVYDVRKMIAKSEQEIGKATAKYFFYSNIMNFFKTEITLANGEIRKRPLIETNGETGEIVWDKGRDFATVRKVLSMPQVNIVKKTEVQTGGFSKESILPKRNSDKLIARKKDWDPKKYGGFDSPTVAYSVLVVAKVEKGKSKKLKSVKELLGITIMERSSFEKNPIDFLEAKGYKEVKKDLIIKLPKYSLFELENGRKRMLASAGELQKGNELALPSKYVNFLYLASHYEKLKGSPEDNEQKQLFVEQHKHYLDEIIEQISEFSKRVILADANLDKVLSAYNKHRDKPIREQAENIIHLFTLTNLGAPAAFKYFDTTIDRKRYTSTKEVLDATLIHQSITGLYETRIDLSQLGGDGGGGGGGGGGVPWLMKKPLQLTVLVPLHEYQERLLQQTALPKEQKELLQKLFLKYDALWQHWENQVGHRRIKPHNIATGTLAPRPQKQYPINPKAKPSIQIVIDDLLKQGVLIQQNSTMNTPVYPVPKPDGKWRMVLDYREVNKTIPLIAAQNQHSAGILSSIYRGKYKTTLDLTNGFWAHPITPESYWLTAFTWQGKQYCWTRLPQGFLNSPALFTADVVDLLKEIPNVQAYVDDIYISHDDPQEHLEQLEKIFSILLNAGYVVSLKKSEIAQREVEFLGFNITKEGRGLTDTFKQKLLNITPPKDLKQLQSILGLLNFARNFIPNYSELVKPLYTIVANANGKFISWTEDNSNQLQHIISVLNQADNLEERNPETRLIIKVNSSPSAGYIRYYNEGSKRPIMYVNYIFSKAEAKFTQTEKLLTTMHKGLIKAMDLAMGQEILVYSPIVSMTKIQRTPLPERKALPVRWITWMTYLEDPRIQFHYDKSLPELQQIPNVTEDVIAKTKHPSEFAMVFYTDGSAIKHPDVNKSHSAGMGIAQVQFIPEYKIVHQWSIPLGDHTAQLAEIAAVEFACKKALKISGPVLIVTDSFYVAESANKELPYWKSNGFLNNKKKPLRHVSKWKSIAECLQLKPDIIIMHEKGHQQPMTTLHTEGNNLADKLATQGSYVVHAGKRTADGSEFEKRTADGSEFESPKKKAKVE

SEQ ID NO: 432 - protein, 2087 aa, synthetic construct
  source 1..2087: note = Description of Artificial Sequence: Synthetic polypeptide
MPAAKRVKLDGGDKKYSIGLDIGTNSVGWAVITDEYKVPSKKFKVLGNTDRHSIKKNLIGALLFDSGETAEATRLKRTARRRYTRRKNRICYLQEIFSNEMAKVDDSFFHRLEESFLVEEDKKHERHPIFGNIVDEVAYHEKYPTIYHLRKKLVDSTDKADLRLIYLALAHMIKFRGHFLIEGDLNPDNSDVDKLFIQLVQTYNQLFEENPINASGVDAKAILSARLSKSRRLENLIAQLPGEKKNGLFGNLIALSLGLTPNFKSNFDLAEDAKLQLSKDTYDDDLDNLLAQIGDQYADLFLAAKNLSDAILLSDILRVNTEITKAPLSASMIKRYDEHHQDLTLLKALVRQQLPEKYKEIFFDQSKNGYAGYIDGGASQEEFYKFIKPILEKMDGTEELLVKLNREDLLRKQRTFDNGSIPHQIHLGELHAILRRQEDFYPFLKDNREKIEKILTFRIPYYVGPLARGNSRFAWMTRKSEETITPWNFEEVVDKGASAQSFIERMTNFDKNLPNEKVLPKHSLLYEYFTVYNELTKVKYVTEGMRKPAFLSGEQKKAIVDLLFKTNRKVTVKQLKEDYFKKIECFDSVEISGVEDRFNASLGTYHDLLKIIKDKDFLDNEENEDILEDIVLTLTLFEDREMIEERLKTYAHLFDDKVMKQLKRRRYTGWGRLSRKLINGIRDKQSGKTILDFLKSDGFANRNFMQLIHDDSLTFKEDIQKAQVSGQGDSLHEHIANLAGSPAIKKGILQTVKVVDELVKVMGRHKPENIVIEMARENQTTQKGQKNSRERMKRIEEGIKELGSQILKEHPVENTQLQNEKLYLYYLQNGRDMYVDQELDINRLSDYDVDHIVPQSFLKDDSIDNKVLTRSDKARGKSDNVPSEEVVKKMKNYWRQLLNAKLITQRKFDNLTKAERGGLSELDKAGFIKRQLVETRQITKHVAQILDSRMNTKYDENDKLIREVKVITLKSKLVSDFRKDFQFYKVREINNYHHAHDAYLNAVVGTALIKKYPKLESEFVYGDYKVYDVRKMIAKSEQEIGKATAKYFFYSNIMNFFKTEITLANGEIRKRPLIETNGETGEIVWDKGRDFATVRKVLSMPQVNIVKKTEVQTGGFSKESILPKRNSDKLIARKKDWDPKKYGGFDSPTVAYSVLVVAKVEKGKSKKLKSVKELLGITIMERSSFEKNPIDFLEAKGYKEVKKDLIIKLPKYSLFELENGRKRMLASAGELQKGNELALPSKYVNFLYLASHYEKLKGSPEDNEQKQLFVEQHKHYLDEIIEQISEFSKRVILADANLDKVLSAYNKHRDKPIREQAENIIHLFTLTNLGAPAAFKYFDTTIDRKRYTSTKEVLDATLIHQSITGLYETRIDLSQLGGDGGGGSEAAAKPAPGGVPWLMKKPLQLTVLVPLHEYQERLLQQTALPKEQKELLQKLFLKYDALWQHWENQVGHRRIKPHNIATGTLAPRPQKQYPINPKAKPSIQIVIDDLLKQGVLIQQNSTMNTPVYPVPKPDGKWRMVLDYREVNKTIPLIAAQNQHSAGILSSIYRGKYKTTLDLTNGFWAHPITPESYWLTAFTWQGKQYCWTRLPQGFLNSPALFTADVVDLLKEIPNVQAYVDDIYISHDDPQEHLEQLEKIFSILLNAGYVVSLKKSEIAQREVEFLGFNITKEGRGLTDTFKQKLLNITPPKDLKQLQSILGLLNFARNFIPNYSELVKPLYTIVANANGKFISWTEDNSNQLQHIISVLNQADNLEERNPETRLIIKVNSSPSAGYIRYYNEGSKRPIMYVNYIFSKAEAKFTQTEKLLTTMHKGLIKAMDLAMGQEILVYSPIVSMTKIQRTPLPERKALPVRWITWMTYLEDPRIQFHYDKSLPELQQIPNVTEDVIAKTKHPSEFAMVFYTDGSAIKHPDVNKSHSAGMGIAQVQFIPEYKIVHQWSIPLGDHTAQLAEIAAVEFACKKALKISGPVLIVTDSFYVAESANKELPYWKSNGFLNNKKKPLRHVSKWKSIAECLQLKPDIIIMHEKGHQQPMTTLHTEGNNLADKLATQGSYVVHAGKRTADGSEFEKRTADGSEFESPKKKAKVE

SEQ ID NO: 433 - protein, 2087 aa, synthetic construct
  source 1..2087: note = Description of Artificial Sequence: Synthetic polypeptide
MPAAKRVKLDGGDKKYSIGLDIGTNSVGWAVITDEYKVPSKKFKVLGNTDRHSIKKNLIGALLFDSGETAEATRLKRTARRRYTRRKNRICYLQEIFSNEMAKVDDSFFHRLEESFLVEEDKKHERHPIFGNIVDEVAYHEKYPTIYHLRKKLVDSTDKADLRLIYLALAHMIKFRGHFLIEGDLNPDNSDVDKLFIQLVQTYNQLFEENPINASGVDAKAILSARLSKSRRLENLIAQLPGEKKNGLFGNLIALSLGLTPNFKSNFDLAEDAKLQLSKDTYDDDLDNLLAQIGDQYADLFLAAKNLSDAILLSDILRVNTEITKAPLSASMIKRYDEHHQDLTLLKALVRQQLPEKYKEIFFDQSKNGYAGYIDGGASQEEFYKFIKPILEKMDGTEELLVKLNREDLLRKQRTFDNGSIPHQIHLGELHAILRRQEDFYPFLKDNREKIEKILTFRIPYYVGPLARGNSRFAWMTRKSEETITPWNFEEVVDKGASAQSFIERMTNFDKNLPNEKVLPKHSLLYEYFTVYNELTKVKYVTEGMRKPAFLSGEQKKAIVDLLFKTNRKVTVKQLKEDYFKKIECFDSVEISGVEDRFNASLGTYHDLLKIIKDKDFLDNEENEDILEDIVLTLTLFEDREMIEERLKTYAHLFDDKVMKQLKRRRYTGWGRLSRKLINGIRDKQSGKTILDFLKSDGFANRNFMQLIHDDSLTFKEDIQKAQVSGQGDSLHEHIANLAGSPAIKKGILQTVKVVDELVKVMGRHKPENIVIEMARENQTTQKGQKNSRERMKRIEEGIKELGSQILKEHPVENTQLQNEKLYLYYLQNGRDMYVDQELDINRLSDYDVDHIVPQSFLKDDSIDNKVLTRSDKARGKSDNVPSEEVVKKMKNYWRQLLNAKLITQRKFDNLTKAERGGLSELDKAGFIKRQLVETRQITKHVAQILDSRMNTKYDENDKLIREVKVITLKSKLVSDFRKDFQFYKVREINNYHHAHDAYLNAVVGTALIKKYPKLESEFVYGDYKVYDVRKMIAKSEQEIGKATAKYFFYSNIMNFFKTEITLANGEIRKRPLIETNGETGEIVWDKGRDFATVRKVLSMPQVNIVKKTEVQTGGFSKESILPKRNSDKLIARKKDWDPKKYGGFDSPTVAYSVLVVAKVEKGKSKKLKSVKELLGITIMERSSFEKNPIDFLEAKGYKEVKKDLIIKLPKYSLFELENGRKRMLASAGELQKGNELALPSKYVNFLYLASHYEKLKGSPEDNEQKQLFVEQHKHYLDEIIEQISEFSKRVILADANLDKVLSAYNKHRDKPIREQAENIIHLFTLTNLGAPAAFKYFDTTIDRKRYTSTKEVLDATLIHQSITGLYETRIDLSQLGGDGGGGGEAAAKGSSGGVPWLMKKPLQLTVLVPLHEYQERLLQQTALPKEQKELLQKLFLKYDALWQHWENQVGHRRIKPHNIATGTLAPRPQKQYPINPKAKPSIQIVIDDLLKQGVLIQQNSTMNTPVYPVPKPDGKWRMVLDYREVNKTIPLIAAQNQHSAGILSSIYRGKYKTTLDLTNGFWAHPITPESYWLTAFTWQGKQYCWTRLPQGFLNSPALFTADVVDLLKEIPNVQAYVDDIYISHDDPQEHLEQLEKIFSILLNAGYVVSLKKSEIAQREVEFLGFNITKEGRGLTDTFKQKLLNITPPKDLKQLQSILGLLNFARNFIPNYSELVKPLYTIVANANGKFISWTEDNSNQLQHIISVLNQADNLEERNPETRLIIKVNSSPSAGYIRYYNEGSKRPIMYVNYIFSKAEAKFTQTEKLLTTMHKGLIKAMDLAMGQEILVYSPIVSMTKIQRTPLPERKALPVRWITWMTYLEDPRIQFHYDKSLPELQQIPNVTEDVIAKTKHPSEFAMVFYTDGSAIKHPDVNKSHSAGMGIAQVQFIPEYKIVHQWSIPLGDHTAQLAEIAAVEFACKKALKISGPVLIVTDSFYVAESANKELPYWKSNGFLNNKKKPLRHVSKWKSIAECLQLKPDIIIMHEKGHQQPMTTLHTEGNNLADKLATQGSYVVHAGKRTADGSEFEKRTADGSEFESPKKKAKVE

SEQ ID NO: 434 - protein, 2082 aa, synthetic construct
  source 1..2082: note = Description of Artificial Sequence: Synthetic polypeptide
MPAAKRVKLDGGDKKYSIGLDIGTNSVGWAVITDEYKVPSKKFKVLGNTDRHSIKKNLIGALLFDSGETAEATRLKRTARRRYTRRKNRICYLQEIFSNEMAKVDDSFFHRLEESFLVEEDKKHERHPIFGNIVDEVAYHEKYPTIYHLRKKLVDSTDKADLRLIYLALAHMIKFRGHFLIEGDLNPDNSDVDKLFIQLVQTYNQLFEENPINASGVDAKAILSARLSKSRRLENLIAQLPGEKKNGLFGNLIALSLGLTPNFKSNFDLAEDAKLQLSKDTYDDDLDNLLAQIGDQYADLFLAAKNLSDAILLSDILRVNTEITKAPLSASMIKRYDEHHQDLTLLKALVRQQLPEKYKEIFFDQSKNGYAGYIDGGASQEEFYKFIKPILEKMDGTEELLVKLNREDLLRKQRTFDNGSIPHQIHLGELHAILRRQEDFYPFLKDNREKIEKILTFRIPYYVGPLARGNSRFAWMTRKSEETITPWNFEEVVDKGASAQSFIERMTNFDKNLPNEKVLPKHSLLYEYFTVYNELTKVKYVTEGMRKPAFLSGEQKKAIVDLLFKTNRKVTVKQLKEDYFKKIECFDSVEISGVEDRFNASLGTYHDLLKIIKDKDFLDNEENEDILEDIVLTLTLFEDREMIEERLKTYAHLFDDKVMKQLKRRRYTGWGRLSRKLINGIRDKQSGKTILDFLKSDGFANRNFMQLIHDDSLTFKEDIQKAQVSGQGDSLHEHIANLAGSPAIKKGILQTVKVVDELVKVMGRHKPENIVIEMARENQTTQKGQKNSRERMKRIEEGIKELGSQILKEHPVENTQLQNEKLYLYYLQNGRDMYVDQELDINRLSDYDVDHIVPQSFLKDDSIDNKVLTRSDKARGKSDNVPSEEVVKKMKNYWRQLLNAKLITQRKFDNLTKAERGGLSELDKAGFIKRQLVETRQITKHVAQILDSRMNTKYDENDKLIREVKVITLKSKLVSDFRKDFQFYKVREINNYHHAHDAYLNAVVGTALIKKYPKLESEFVYGDYKVYDVRKMIAKSEQEIGKATAKYFFYSNIMNFFKTEITLANGEIRKRPLIETNGETGEIVWDKGRDFATVRKVLSMPQVNIVKKTEVQTGGFSKESILPKRNSDKLIARKKDWDPKKYGGFDSPTVAYSVLVVAKVEKGKSKKLKSVKELLGITIMERSSFEKNPIDFLEAKGYKEVKKDLIIKLPKYSLFELENGRKRMLASAGELQKGNELALPSKYVNFLYLASHYEKLKGSPEDNEQKQLFVEQHKHYLDEIIEQISEFSKRVILADANLDKVLSAYNKHRDKPIREQAENIIHLFTLTNLGAPAAFKYFDTTIDRKRYTSTKEVLDATLIHQSITGLYETRIDLSQLGGDGGGSSGSSGGVPWLMKKPLQLTVLVPLHEYQERLLQQTALPKEQKELLQKLFLKYDALWQHWENQVGHRRIKPHNIATGTLAPRPQKQYPINPKAKPSIQIVIDDLLKQGVLIQQNSTMNTPVYPVPKPDGKWRMVLDYREVNKTIPLIAAQNQHSAGILSSIYRGKYKTTLDLTNGFWAHPITPESYWLTAFTWQGKQYCWTRLPQGFLNSPALFTADVVDLLKEIPNVQAYVDDIYISHDDPQEHLEQLEKIFSILLNAGYVVSLKKSEIAQREVEFLGFNITKEGRGLTDTFKQKLLNITPPKDLKQLQSILGLLNFARNFIPNYSELVKPLYTIVANANGKFISWTEDNSNQLQHIISVLNQADNLEERNPETRLIIKVNSSPSAGYIRYYNEGSKRPIMYVNYIFSKAEAKFTQTEKLLTTMHKGLIKAMDLAMGQEILVYSPIVSMTKIQRTPLPERKALPVRWITWMTYLEDPRIQFHYDKSLPELQQIPNVTEDVIAKTKHPSEFAMVFYTDGSAIKHPDVNKSHSAGMGIAQVQFIPEYKIVHQWSIPLGDHTAQLAEIAAVEFACKKALKISGPVLIVTDSFYVAESANKELPYWKSNGFLNNKKKPLRHVSKWKSIAECLQLKPDIIIMHEKGHQQPMTTLHTEGNNLADKLATQGSYVVHAGKRTADGSEFEKRTADGSEFESPKKKAKVE

SEQ ID NO: 435 - protein, 2084 aa, synthetic construct
  source 1..2084: note = Description of Artificial Sequence: Synthetic polypeptide
MPAAKRVKLDGGDKKYSIGLDIGTNSVGWAVITDEYKVPSKKFKVLGNTDRHSIKKNLIGALLFDSGETAEATRLKRTARRRYTRRKNRICYLQEIFSNEMAKVDDSFFHRLEESFLVEEDKKHERHPIFGNIVDEVAYHEKYPTIYHLRKKLVDSTDKADLRLIYLALAHMIKFRGHFLIEGDLNPDNSDVDKLFIQLVQTYNQLFEENPINASGVDAKAILSARLSKSRRLENLIAQLPGEKKNGLFGNLIALSLGLTPNFKSNFDLAEDAKLQLSKDTYDDDLDNLLAQIGDQYADLFLAAKNLSDAILLSDILRVNTEITKAPLSASMIKRYDEHHQDLTLLKALVRQQLPEKYKEIFFDQSKNGYAGYIDGGASQEEFYKFIKPILEKMDGTEELLVKLNREDLLRKQRTFDNGSIPHQIHLGELHAILRRQEDFYPFLKDNREKIEKILTFRIPYYVGPLARGNSRFAWMTRKSEETITPWNFEEVVDKGASAQSFIERMTNFDKNLPNEKVLPKHSLLYEYFTVYNELTKVKYVTEGMRKPAFLSGEQKKAIVDLLFKTNRKVTVKQLKEDYFKKIECFDSVEISGVEDRFNASLGTYHDLLKIIKDKDFLDNEENEDILEDIVLTLTLFEDREMIEERLKTYAHLFDDKVMKQLKRRRYTGWGRLSRKLINGIRDKQSGKTILDFLKSDGFANRNFMQLIHDDSLTFKEDIQKAQVSGQGDSLHEHIANLAGSPAIKKGILQTVKVVDELVKVMGRHKPENIVIEMARENQTTQKGQKNSRERMKRIEEGIKELGSQILKEHPVENTQLQNEKLYLYYLQNGRDMYVDQELDINRLSDYDVDHIVPQSFLKDDSIDNKVLTRSDKARGKSDNVPSEEVVKKMKNYWRQLLNAKLITQRKFDNLTKAERGGLSELDKAGFIKRQLVETRQITKHVAQILDSRMNTKYDENDKLIREVKVITLKSKLVSDFRKDFQFYKVREINNYHHAHDAYLNAVVGTALIKKYPKLESEFVYGDYKVYDVRKMIAKSEQEIGKATAKYFFYSNIMNFFKTEITLANGEIRKRPLIETNGETGEIVWDKGRDFATVRKVLSMPQVNIVKKTEVQTGGFSKESILPKRNSDKLIARKKDWDPKKYGGFDSPTVAYSVLVVAKVEKGKSKKLKSVKELLGITIMERSSFEKNPIDFLEAKGYKEVKKDLIIKLPKYSLFELENGRKRMLASAGELQKGNELALPSKYVNFLYLASHYEKLKGSPEDNEQKQLFVEQHKHYLDEIIEQISEFSKRVILADANLDKVLSAYNKHRDKPIREQAENIIHLFTLTNLGAPAAFKYFDTTIDRKRYTSTKEVLDATLIHQSITGLYETRIDLSQLGGDGGGGGEAAAKGGVPWLMKKPLQLTVLVPLHEYQERLLQQTALPKEQKELLQKLFLKYDALWQHWENQVGHRRIKPHNIATGTLAPRPQKQYPINPKAKPSIQIVIDDLLKQGVLIQQNSTMNTPVYPVPKPDGKWRMVLDYREVNKTIPLIAAQNQHSAGILSSIYRGKYKTTLDLTNGFWAHPITPESYWLTAFTWQGKQYCWTRLPQGFLNSPALFTADVVDLLKEIPNVQAYVDDIYISHDDPQEHLEQLEKIFSILLNAGYVVSLKKSEIAQREVEFLGFNITKEGRGLTDTFKQKLLNITPPKDLKQLQSILGLLNFARNFIPNYSELVKPLYTIVANANGKFISWTEDNSNQLQHIISVLNQADNLEERNPETRLIIKVNSSPSAGYIRYYNEGSKRPIMYVNYIFSKAEAKFTQTEKLLTTMHKGLIKAMDLAMGQEILVYSPIVSMTKIQRTPLPERKALPVRWITWMTYLEDPRIQFHYDKSLPELQQIPNVTEDVIAKTKHPSEFAMVFYTDGSAIKHPDVNKSHSAGMGIAQVQFIPEYKIVHQWSIPLGDHTAQLAEIAAVEFACKKALKISGPVLIVTDSFYVAESANKELPYWKSNGFLNNKKKPLRHVSKWKSIAECLQLKPDIIIMHEKGHQQPMTTLHTEGNNLADKLATQGSYVVHAGKRTADGSEFEKRTADGSEFESPKKKAKVE

SEQ ID NO: 436 - protein, 2087 aa, synthetic construct
  source 1..2087: note = Description of Artificial Sequence: Synthetic polypeptide
MPAAKRVKLDGGDKKYSIGLDIGTNSVGWAVITDEYKVPSKKFKVLGNTDRHSIKKNLIGALLFDSGETAEATRLKRTARRRYTRRKNRICYLQEIFSNEMAKVDDSFFHRLEESFLVEEDKKHERHPIFGNIVDEVAYHEKYPTIYHLRKKLVDSTDKADLRLIYLALAHMIKFRGHFLIEGDLNPDNSDVDKLFIQLVQTYNQLFEENPINASGVDAKAILSARLSKSRRLENLIAQLPGEKKNGLFGNLIALSLGLTPNFKSNFDLAEDAKLQLSKDTYDDDLDNLLAQIGDQYADLFLAAKNLSDAILLSDILRVNTEITKAPLSASMIKRYDEHHQDLTLLKALVRQQLPEKYKEIFFDQSKNGYAGYIDGGASQEEFYKFIKPILEKMDGTEELLVKLNREDLLRKQRTFDNGSIPHQIHLGELHAILRRQEDFYPFLKDNREKIEKILTFRIPYYVGPLARGNSRFAWMTRKSEETITPWNFEEVVDKGASAQSFIERMTNFDKNLPNEKVLPKHSLLYEYFTVYNELTKVKYVTEGMRKPAFLSGEQKKAIVDLLFKTNRKVTVKQLKEDYFKKIECFDSVEISGVEDRFNASLGTYHDLLKIIKDKDFLDNEENEDILEDIVLTLTLFEDREMIEERLKTYAHLFDDKVMKQLKRRRYTGWGRLSRKLINGIRDKQSGKTILDFLKSDGFANRNFMQLIHDDSLTFKEDIQKAQVSGQGDSLHEHIANLAGSPAIKKGILQTVKVVDELVKVMGRHKPENIVIEMARENQTTQKGQKNSRERMKRIEEGIKELGSQILKEHPVENTQLQNEKLYLYYLQNGRDMYVDQELDINRLSDYDVDHIVPQSFLKDDSIDNKVLTRSDKARGKSDNVPSEEVVKKMKNYWRQLLNAKLITQRKFDNLTKAERGGLSELDKAGFIKRQLVETRQITKHVAQILDSRMNTKYDENDKLIREVKVITLKSKLVSDFRKDFQFYKVREINNYHHAHDAYLNAVVGTALIKKYPKLESEFVYGDYKVYDVRKMIAKSEQEIGKATAKYFFYSNIMNFFKTEITLANGEIRKRPLIETNGETGEIVWDKGRDFATVRKVLSMPQVNIVKKTEVQTGGFSKESILPKRNSDKLIARKKDWDPKKYGGFDSPTVAYSVLVVAKVEKGKSKKLKSVKELLGITIMERSSFEKNPIDFLEAKGYKEVKKDLIIKLPKYSLFELENGRKRMLASAGELQKGNELALPSKYVNFLYLASHYEKLKGSPEDNEQKQLFVEQHKHYLDEIIEQISEFSKRVILADANLDKVLSAYNKHRDKPIREQAENIIHLFTLTNLGAPAAFKYFDTTIDRKRYTSTKEVLDATLIHQSITGLYETRIDLSQLGGDGGPAPGGGEAAAKGGVPWLMKKPLQLTVLVPLHEYQERLLQQTALPKEQKELLQKLFLKYDALWQHWENQVGHRRIKPHNIATGTLAPRPQKQYPINPKAKPSIQIVIDDLLKQGVLIQQNSTMNTPVYPVPKPDGKWRMVLDYREVNKTIPLIAAQNQHSAGILSSIYRGKYKTTLDLTNGFWAHPITPESYWLTAFTWQGKQYCWTRLPQGFLNSPALFTADVVDLLKEIPNVQAYVDDIYISHDDPQEHLEQLEKIFSILLNAGYVVSLKKSEIAQREVEFLGFNITKEGRGLTDTFKQKLLNITPPKDLKQLQSILGLLNFARNFIPNYSELVKPLYTIVANANGKFISWTEDNSNQLQHIISVLNQADNLEERNPETRLIIKVNSSPSAGYIRYYNEGSKRPIMYVNYIFSKAEAKFTQTEKLLTTMHKGLIKAMDLAMGQEILVYSPIVSMTKIQRTPLPERKALPVRWITWMTYLEDPRIQFHYDKSLPELQQIPNVTEDVIAKTKHPSEFAMVFYTDGSAIKHPDVNKSHSAGMGIAQVQFIPEYKIVHQWSIPLGDHTAQLAEIAAVEFACKKALKISGPVLIVTDSFYVAESANKELPYWKSNGFLNNKKKPLRHVSKWKSIAECLQLKPDIIIMHEKGHQQPMTTLHTEGNNLADKLATQGSYVVHAGKRTADGSEFEKRTADGSEFESPKKKAKVE

SEQ ID NO: 437 - protein, 2094 aa, synthetic construct
  source 1..2094: note = Description of Artificial Sequence: Synthetic polypeptide
MPAAKRVKLDGGDKKYSIGLDIGTNSVGWAVITDEYKVPSKKFKVLGNTDRHSIKKNLIGALLFDSGETAEATRLKRTARRRYTRRKNRICYLQEIFSNEMAKVDDSFFHRLEESFLVEEDKKHERHPIFGNIVDEVAYHEKYPTIYHLRKKLVDSTDKADLRLIYLALAHMIKFRGHFLIEGDLNPDNSDVDKLFIQLVQTYNQLFEENPINASGVDAKAILSARLSKSRRLENLIAQLPGEKKNGLFGNLIALSLGLTPNFKSNFDLAEDAKLQLSKDTYDDDLDNLLAQIGDQYADLFLAAKNLSDAILLSDILRVNTEITKAPLSASMIKRYDEHHQDLTLLKALVRQQLPEKYKEIFFDQSKNGYAGYIDGGASQEEFYKFIKPILEKMDGTEELLVKLNREDLLRKQRTFDNGSIPHQIHLGELHAILRRQEDFYPFLKDNREKIEKILTFRIPYYVGPLARGNSRFAWMTRKSEETITPWNFEEVVDKGASAQSFIERMTNFDKNLPNEKVLPKHSLLYEYFTVYNELTKVKYVTEGMRKPAFLSGEQKKAIVDLLFKTNRKVTVKQLKEDYFKKIECFDSVEISGVEDRFNASLGTYHDLLKIIKDKDFLDNEENEDILEDIVLTLTLFEDREMIEERLKTYAHLFDDKVMKQLKRRRYTGWGRLSRKLINGIRDKQSGKTILDFLKSDGFANRNFMQLIHDDSLTFKEDIQKAQVSGQGDSLHEHIANLAGSPAIKKGILQTVKVVDELVKVMGRHKPENIVIEMARENQTTQKGQKNSRERMKRIEEGIKELGSQILKEHPVENTQLQNEKLYLYYLQNGRDMYVDQELDINRLSDYDVDHIVPQSFLKDDSIDNKVLTRSDKARGKSDNVPSEEVVKKMKNYWRQLLNAKLITQRKFDNLTKAERGGLSELDKAGFIKRQLVETRQITKHVAQILDSRMNTKYDENDKLIREVKVITLKSKLVSDFRKDFQFYKVREINNYHHAHDAYLNAVVGTALIKKYPKLESEFVYGDYKVYDVRKMIAKSEQEIGKATAKYFFYSNIMNFFKTEITLANGEIRKRPLIETNGETGEIVWDKGRDFATVRKVLSMPQVNIVKKTEVQTGGFSKESILPKRNSDKLIARKKDWDPKKYGGFDSPTVAYSVLVVAKVEKGKSKKLKSVKELLGITIMERSSFEKNPIDFLEAKGYKEVKKDLIIKLPKYSLFELENGRKRMLASAGELQKGNELALPSKYVNFLYLASHYEKLKGSPEDNEQKQLFVEQHKHYLDEIIEQISEFSKRVILADANLDKVLSAYNKHRDKPIREQAENIIHLFTLTNLGAPAAFKYFDTTIDRKRYTSTKEVLDATLIHQSITGLYETRIDLSQLGGDGGGSSGSSGSSGSSGSSGSSGGVPWLMKKPLQLTVLVPLHEYQERLLQQTALPKEQKELLQKLFLKYDALWQHWENQVGHRRIKPHNIATGTLAPRPQKQYPINPKAKPSIQIVIDDLLKQGVLIQQNSTMNTPVYPVPKPDGKWRMVLDYREVNKTIPLIAAQNQHSAGILSSIYRGKYKTTLDLTNGFWAHPITPESYWLTAFTWQGKQYCWTRLPQGFLNSPALFNADVVDLLKEIPNVQAYVDDIYISHDDPQEHLEQLEKIFSILLNAGYVVSLKKSEIAQREVEFLGFNITKEGRGLTDTFKQKLLNITPPKDLKQLQSILGLLNFARNFIPNYSELVKPLYTIVAPANGKFISWTEDNSNQLQHIISVLNQADNLEERNPETRLIIKVNSSPSAGYIRYYNEGSKRPIMYVNYIFSKAEAKFTQTEKLLTTMHKGLIKAMDLAMGQEILVYSPIVSMTKIQRTPLPERKALPVRWITWMTYLEDPRIQFHYDKSLPELQQIPNVTEDVIAKTKHPSEFAMVFYTDGSAIKHPDVNKSHSAGMGIAQVQFIPEYKIVHQWSIPLGDHTAQLAEIAAVEFACKKALKISGPVLIVTDSFYVAESANKELPYWKSNGFLNNKKKPLRHVSKWKSIAECLQLKPDIIIMHEKGHQQPMTTLHTEGNNLADKLATQGSYVVHAGKRTADGSEFEKRTADGSEFESPKKKAKVE

SEQ ID NO: 438 - protein, 2087 aa, synthetic construct
  source 1..2087: note = Description of Artificial Sequence: Synthetic polypeptide
MPAAKRVKLDGGDKKYSIGLDIGTNSVGWAVITDEYKVPSKKFKVLGNTDRHSIKKNLIGALLFDSGETAEATRLKRTARRRYTRRKNRICYLQEIFSNEMAKVDDSFFHRLEESFLVEEDKKHERHPIFGNIVDEVAYHEKYPTIYHLRKKLVDSTDKADLRLIYLALAHMIKFRGHFLIEGDLNPDNSDVDKLFIQLVQTYNQLFEENPINASGVDAKAILSARLSKSRRLENLIAQLPGEKKNGLFGNLIALSLGLTPNFKSNFDLAEDAKLQLSKDTYDDDLDNLLAQIGDQYADLFLAAKNLSDAILLSDILRVNTEITKAPLSASMIKRYDEHHQDLTLLKALVRQQLPEKYKEIFFDQSKNGYAGYIDGGASQEEFYKFIKPILEKMDGTEELLVKLNREDLLRKQRTFDNGSIPHQIHLGELHAILRRQEDFYPFLKDNREKIEKILTFRIPYYVGPLARGNSRFAWMTRKSEETITPWNFEEVVDKGASAQSFIERMTNFDKNLPNEKVLPKHSLLYEYFTVYNELTKVKYVTEGMRKPAFLSGEQKKAIVDLLFKTNRKVTVKQLKEDYFKKIECFDSVEISGVEDRFNASLGTYHDLLKIIKDKDFLDNEENEDILEDIVLTLTLFEDREMIEERLKTYAHLFDDKVMKQLKRRRYTGWGRLSRKLINGIRDKQSGKTILDFLKSDGFANRNFMQLIHDDSLTFKEDIQKAQVSGQGDSLHEHIANLAGSPAIKKGILQTVKVVDELVKVMGRHKPENIVIEMARENQTTQKGQKNSRERMKRIEEGIKELGSQILKEHPVENTQLQNEKLYLYYLQNGRDMYVDQELDINRLSDYDVDHIVPQSFLKDDSIDNKVLTRSDKARGKSDNVPSEEVVKKMKNYWRQLLNAKLITQRKFDNLTKAERGGLSELDKAGFIKRQLVETRQITKHVAQILDSRMNTKYDENDKLIREVKVITLKSKLVSDFRKDFQFYKVREINNYHHAHDAYLNAVVGTALIKKYPKLESEFVYGDYKVYDVRKMIAKSEQEIGKATAKYFFYSNIMNFFKTEITLANGEIRKRPLIETNGETGEIVWDKGRDFATVRKVLSMPQVNIVKKTEVQTGGFSKESILPKRNSDKLIARKKDWDPKKYGGFDSPTVAYSVLVVAKVEKGKSKKLKSVKELLGITIMERSSFEKNPIDFLEAKGYKEVKKDLIIKLPKYSLFELENGRKRMLASAGELQKGNELALPSKYVNFLYLASHYEKLKGSPEDNEQKQLFVEQHKHYLDEIIEQISEFSKRVILADANLDKVLSAYNKHRDKPIREQAENIIHLFTLTNLGAPAAFKYFDTTIDRKRYTSTKEVLDATLIHQSITGLYETRIDLSQLGGDGGGSSGGGEAAAKGGVPWLMKKPLQLTVLVPLHEYQERLLQQTALPKEQKELLQKLFLKYDALWQHWENQVGHRRIKPHNIATGTLAPRPQKQYPINPKAKPSIQIVIDDLLKQGVLIQQNSTMNTPVYPVPKPDGKWRMVLDYREVNKTIPLIAAQNQHSAGILSSIYRGKYKTTLDLTNGFWAHPITPESYWLTAFTWQGKQYCWTRLPQGFLNSPALFNADVVDLLKEIPNVQAYVDDIYISHDDPQEHLEQLEKIFSILLNAGYVVSLKKSEIAQREVEFLGFNITKEGRGLTDTFKQKLLNITPPKDLKQLQSILGLLNFARNFIPNYSELVKPLYTIVAPANGKFISWTEDNSNQLQHIISVLNQADNLEERNPETRLIIKVNSSPSAGYIRYYNEGSKRPIMYVNYIFSKAEAKFTQTEKLLTTMHKGLIKAMDLAMGQEILVYSPIVSMTKIQRTPLPERKALPVRWITWMTYLEDPRIQFHYDKSLPELQQIPNVTEDVIAKTKHPSEFAMVFYTDGSAIKHPDVNKSHSAGMGIAQVQFIPEYKIVHQWSIPLGDHTAQLAEIAAVEFACKKALKISGPVLIVTDSFYVAESANKELPYWKSNGFLNNKKKPLRHVSKWKSIAECLQLKPDIIIMHEKGHQQPMTTLHTEGNNLADKLATQGSYVVHAGKRTADGSEFEKRTADGSEFESPKKKAKVE

SEQ ID NO: 439 - protein, 2091 aa, synthetic construct
  source 1..2091: note = Description of Artificial Sequence: Synthetic polypeptide
MPAAKRVKLDGGDKKYSIGLDIGTNSVGWAVITDEYKVPSKKFKVLGNTDRHSIKKNLIGALLFDSGETAEATRLKRTARRRYTRRKNRICYLQEIFSNEMAKVDDSFFHRLEESFLVEEDKKHERHPIFGNIVDEVAYHEKYPTIYHLRKKLVDSTDKADLRLIYLALAHMIKFRGHFLIEGDLNPDNSDVDKLFIQLVQTYNQLFEENPINASGVDAKAILSARLSKSRRLENLIAQLPGEKKNGLFGNLIALSLGLTPNFKSNFDLAEDAKLQLSKDTYDDDLDNLLAQIGDQYADLFLAAKNLSDAILLSDILRVNTEITKAPLSASMIKRYDEHHQDLTLLKALVRQQLPEKYKEIFFDQSKNGYAGYIDGGASQEEFYKFIKPILEKMDGTEELLVKLNREDLLRKQRTFDNGSIPHQIHLGELHAILRRQEDFYPFLKDNREKIEKILTFRIPYYVGPLARGNSRFAWMTRKSEETITPWNFEEVVDKGASAQSFIERMTNFDKNLPNEKVLPKHSLLYEYFTVYNELTKVKYVTEGMRKPAFLSGEQKKAIVDLLFKTNRKVTVKQLKEDYFKKIECFDSVEISGVEDRFNASLGTYHDLLKIIKDKDFLDNEENEDILEDIVLTLTLFEDREMIEERLKTYAHLFDDKVMKQLKRRRYTGWGRLSRKLINGIRDKQSGKTILDFLKSDGFANRNFMQLIHDDSLTFKEDIQKAQVSGQGDSLHEHIANLAGSPAIKKGILQTVKVVDELVKVMGRHKPENIVIEMARENQTTQKGQKNSRERMKRIEEGIKELGSQILKEHPVENTQLQNEKLYLYYLQNGRDMYVDQELDINRLSDYDVDHIVPQSFLKDDSIDNKVLTRSDKARGKSDNVPSEEVVKKMKNYWRQLLNAKLITQRKFDNLTKAERGGLSELDKAGFIKRQLVETRQITKHVAQILDSRMNTKYDENDKLIREVKVITLKSKLVSDFRKDFQFYKVREINNYHHAHDAYLNAVVGTALIKKYPKLESEFVYGDYKVYDVRKMIAKSEQEIGKATAKYFFYSNIMNFFKTEITLANGEIRKRPLIETNGETGEIVWDKGRDFATVRKVLSMPQVNIVKKTEVQTGGFSKESILPKRNSDKLIARKKDWDPKKYGGFDSPTVAYSVLVVAKVEKGKSKKLKSVKELLGITIMERSSFEKNPIDFLEAKGYKEVKKDLIIKLPKYSLFELENGRKRMLASAGELQKGNELALPSKYVNFLYLASHYEKLKGSPEDNEQKQLFVEQHKHYLDEIIEQISEFSKRVILADANLDKVLSAYNKHRDKPIREQAENIIHLFTLTNLGAPAAFKYFDTTIDRKRYTSTKEVLDATLIHQSITGLYETRIDLSQLGGDGGGGGGSEAAAKGGGGSGGVPWLMKKPLQLTVLVPLHEYQERLLQQTALPKEQKELLQKLFLKYDALWQHWENQVGHRRIKPHNIATGTLAPRPQKQYPINPKAKPSIQIVIDDLLKQGVLIQQNSTMNTPVYPVPKPDGKWRMVLDYREVNKTIPLIAAQNQHSAGILSSIYRGKYKTTLDLTNGFWAHPITPESYWLTAFTWQGKQYCWTRLPQGFLNSPALFNADVVDLLKEIPNVQAYVDDIYISHDDPQEHLEQLEKIFSILLNAGYVVSLKKSEIAQREVEFLGFNITKEGRGLTDTFKQKLLNITPPKDLKQLQSILGLLNFARNFIPNYSELVKPLYTIVAPANGKFISWTEDNSNQLQHIISVLNQADNLEERNPETRLIIKVNSSPSAGYIRYYNEGSKRPIMYVNYIFSKAEAKFTQTEKLLTTMHKGLIKAMDLAMGQEILVYSPIVSMTKIQRTPLPERKALPVRWITWMTYLEDPRIQFHYDKSLPELQQIPNVTEDVIAKTKHPSEFAMVFYTDGSAIKHPDVNKSHSAGMGIAQVQFIPEYKIVHQWSIPLGDHTAQLAEIAAVEFACKKALKISGPVLIVTDSFYVAESANKELPYWKSNGFLNNKKKPLRHVSKWKSIAECLQLKPDIIIMHEKGHQQPMTTLHTEGNNLADKLATQGSYVVHAGKRTADGSEFEKRTADGSEFESPKKKAKVE

SEQ ID NO: 440 - protein, 2085 aa, synthetic construct
  source 1..2085: note = Description of Artificial Sequence: Synthetic polypeptide
MPAAKRVKLDGGDKKYSIGLDIGTNSVGWAVITDEYKVPSKKFKVLGNTDRHSIKKNLIGALLFDSGETAEATRLKRTARRRYTRRKNRICYLQEIFSNEMAKVDDSFFHRLEESFLVEEDKKHERHPIFGNIVDEVAYHEKYPTIYHLRKKLVDSTDKADLRLIYLALAHMIKFRGHFLIEGDLNPDNSDVDKLFIQLVQTYNQLFEENPINASGVDAKAILSARLSKSRRLENLIAQLPGEKKNGLFGNLIALSLGLTPNFKSNFDLAEDAKLQLSKDTYDDDLDNLLAQIGDQYADLFLAAKNLSDAILLSDILRVNTEITKAPLSASMIKRYDEHHQDLTLLKALVRQQLPEKYKEIFFDQSKNGYAGYIDGGASQEEFYKFIKPILEKMDGTEELLVKLNREDLLRKQRTFDNGSIPHQIHLGELHAILRRQEDFYPFLKDNREKIEKILTFRIPYYVGPLARGNSRFAWMTRKSEETITPWNFEEVVDKGASAQSFIERMTNFDKNLPNEKVLPKHSLLYEYFTVYNELTKVKYVTEGMRKPAFLSGEQKKAIVDLLFKTNRKVTVKQLKEDYFKKIECFDSVEISGVEDRFNASLGTYHDLLKIIKDKDFLDNEENEDILEDIVLTLTLFEDREMIEERLKTYAHLFDDKVMKQLKRRRYTGWGRLSRKLINGIRDKQSGKTILDFLKSDGFANRNFMQLIHDDSLTFKEDIQKAQVSGQGDSLHEHIANLAGSPAIKKGILQTVKVVDELVKVMGRHKPENIVIEMARENQTTQKGQKNSRERMKRIEEGIKELGSQILKEHPVENTQLQNEKLYLYYLQNGRDMYVDQELDINRLSDYDVDHIVPQSFLKDDSIDNKVLTRSDKARGKSDNVPSEEVVKKMKNYWRQLLNAKLITQRKFDNLTKAERGGLSELDKAGFIKRQLVETRQITKHVAQILDSRMNTKYDENDKLIREVKVITLKSKLVSDFRKDFQFYKVREINNYHHAHDAYLNAVVGTALIKKYPKLESEFVYGDYKVYDVRKMIAKSEQEIGKATAKYFFYSNIMNFFKTEITLANGEIRKRPLIETNGETGEIVWDKGRDFATVRKVLSMPQVNIVKKTEVQTGGFSKESILPKRNSDKLIARKKDWDPKKYGGFDSPTVAYSVLVVAKVEKGKSKKLKSVKELLGITIMERSSFEKNPIDFLEAKGYKEVKKDLIIKLPKYSLFELENGRKRMLASAGELQKGNELALPSKYVNFLYLASHYEKLKGSPEDNEQKQLFVEQHKHYLDEIIEQISEFSKRVILADANLDKVLSAYNKHRDKPIREQAENIIHLFTLTNLGAPAAFKYFDTTIDRKRYTSTKEVLDATLIHQSITGLYETRIDLSQLGGDGGPAPGSSGGSGGVPWLMKKPLQLTVLVPLHEYQERLLQQTALPKEQKELLQKLFLKYDALWQHWENQVGHRRIKPHNIATGTLAPRPQKQYPINPKAKPSIQIVIDDLLKQGVLIQQNSTMNTPVYPVPKPDGKWRMVLDYREVNKTIPLIAAQNQHSAGILSSIYRGKYKTTLDLTNGFWAHPITPESYWLTAFTWQGKQYCWTRLPQGFLNSPALFNADVVDLLKEIPNVQAYVDDIYISHDDPQEHLEQLEKIFSILLNAGYVVSLKKSEIAQREVEFLGFNITKEGRGLTDTFKQKLLNITPPKDLKQLQSILGLLNFARNFIPNYSELVKPLYTIVAPANGKFISWTEDNSNQLQHIISVLNQADNLEERNPETRLIIKVNSSPSAGYIRYYNEGSKRPIMYVNYIFSKAEAKFTQTEKLLTTMHKGLIKAMDLAMGQEILVYSPIVSMTKIQRTPLPERKALPVRWITWMTYLEDPRIQFHYDKSLPELQQIPNVTEDVIAKTKHPSEFAMVFYTDGSAIKHPDVNKSHSAGMGIAQVQFIPEYKIVHQWSIPLGDHTAQLAEIAAVEFACKKALKISGPVLIVTDSFYVAESANKELPYWKSNGFLNNKKKPLRHVSKWKSIAECLQLKPDIIIMHEKGHQQPMTTLHTEGNNLADKLATQGSYVVHAGKRTADGSEFEKRTADGSEFESPKKKAKVE

SEQ ID NO: 441 - protein, 2087 aa, synthetic construct
  source 1..2087: note = Description of Artificial Sequence: Synthetic polypeptide
MPAAKRVKLDGGDKKYSIGLDIGTNSVGWAVITDEYKVPSKKFKVLGNTDRHSIKKNLIGALLFDSGETAEATRLKRTARRRYTRRKNRICYLQEIFSNEMAKVDDSFFHRLEESFLVEEDKKHERHPIFGNIVDEVAYHEKYPTIYHLRKKLVDSTDKADLRLIYLALAHMIKFRGHFLIEGDLNPDNSDVDKLFIQLVQTYNQLFEENPINASGVDAKAILSARLSKSRRLENLIAQLPGEKKNGLFGNLIALSLGLTPNFKSNFDLAEDAKLQLSKDTYDDDLDNLLAQIGDQYADLFLAAKNLSDAILLSDILRVNTEITKAPLSASMIKRYDEHHQDLTLLKALVRQQLPEKYKEIFFDQSKNGYAGYIDGGASQEEFYKFIKPILEKMDGTEELLVKLNREDLLRKQRTFDNGSIPHQIHLGELHAILRRQEDFYPFLKDNREKIEKILTFRIPYYVGPLARGNSRFAWMTRKSEETITPWNFEEVVDKGASAQSFIERMTNFDKNLPNEKVLPKHSLLYEYFTVYNELTKVKYVTEGMRKPAFLSGEQKKAIVDLLFKTNRKVTVKQLKEDYFKKIECFDSVEISGVEDRFNASLGTYHDLLKIIKDKDFLDNEENEDILEDIVLTLTLFEDREMIEERLKTYAHLFDDKVMKQLKRRRYTGWGRLSRKLINGIRDKQSGKTILDFLKSDGFANRNFMQLIHDDSLTFKEDIQKAQVSGQGDSLHEHIANLAGSPAIKKGILQTVKVVDELVKVMGRHKPENIVIEMARENQTTQKGQKNSRERMKRIEEGIKELGSQILKEHPVENTQLQNEKLYLYYLQNGRDMYVDQELDINRLSDYDVDHIVPQSFLKDDSIDNKVLTRSDKARGKSDNVPSEEVVKKMKNYWRQLLNAKLITQRKFDNLTKAERGGLSELDKAGFIKRQLVETRQITKHVAQILDSRMNTKYDENDKLIREVKVITLKSKLVSDFRKDFQFYKVREINNYHHAHDAYLNAVVGTALIKKYPKLESEFVYGDYKVYDVRKMIAKSEQEIGKATAKYFFYSNIMNFFKTEITLANGEIRKRPLIETNGETGEIVWDKGRDFATVRKVLSMPQVNIVKKTEVQTGGFSKESILPKRNSDKLIARKKDWDPKKYGGFDSPTVAYSVLVVAKVEKGKSKKLKSVKELLGITIMERSSFEKNPIDFLEAKGYKEVKKDLIIKLPKYSLFELENGRKRMLASAGELQKGNELALPSKYVNFLYLASHYEKLKGSPEDNEQKQLFVEQHKHYLDEIIEQISEFSKRVILADANLDKVLSAYNKHRDKPIREQAENIIHLFTLTNLGAPAAFKYFDTTIDRKRYTSTKEVLDATLIHQSITGLYETRIDLSQLGGDGGGGGEAAAKPAPGGVPWLMKKPLQLTVLVPLHEYQERLLQQTALPKEQKELLQKLFLKYDALWQHWENQVGHRRIKPHNIATGTLAPRPQKQYPINPKAKPSIQIVIDDLLKQGVLIQQNSTMNTPVYPVPKPDGKWRMVLDYREVNKTIPLIAAQNQHSAGILSSIYRGKYKTTLDLTNGFWAHPITPESYWLTAFTWQGKQYCWTRLPQGFLNSPALFNADVVDLLKEIPNVQAYVDDIYISHDDPQEHLEQLEKIFSILLNAGYVVSLKKSEIAQREVEFLGFNITKEGRGLTDTFKQKLLNITPPKDLKQLQSILGLLNFARNFIPNYSELVKPLYTIVAPANGKFISWTEDNSNQLQHIISVLNQADNLEERNPETRLIIKVNSSPSAGYIRYYNEGSKRPIMYVNYIFSKAEAKFTQTEKLLTTMHKGLIKAMDLAMGQEILVYSPIVSMTKIQRTPLPERKALPVRWITWMTYLEDPRIQFHYDKSLPELQQIPNVTEDVIAKTKHPSEFAMVFYTDGSAIKHPDVNKSHSAGMGIAQVQFIPEYKIVHQWSIPLGDHTAQLAEIAAVEFACKKALKISGPVLIVTDSFYVAESANKELPYWKSNGFLNNKKKPLRHVSKWKSIAECLQLKPDIIIMHEKGHQQPMTTLHTEGNNLADKLATQGSYVVHAGKRTADGSEFEKRTADGSEFESPKKKAKVE

SEQ ID NO: 442 - protein, 2087 aa, synthetic construct
  source 1..2087: note = Description of Artificial Sequence: Synthetic polypeptide
MPAAKRVKLDGGDKKYSIGLDIGTNSVGWAVITDEYKVPSKKFKVLGNTDRHSIKKNLIGALLFDSGETAEATRLKRTARRRYTRRKNRICYLQEIFSNEMAKVDDSFFHRLEESFLVEEDKKHERHPIFGNIVDEVAYHEKYPTIYHLRKKLVDSTDKADLRLIYLALAHMIKFRGHFLIEGDLNPDNSDVDKLFIQLVQTYNQLFEENPINASGVDAKAILSARLSKSRRLENLIAQLPGEKKNGLFGNLIALSLGLTPNFKSNFDLAEDAKLQLSKDTYDDDLDNLLAQIGDQYADLFLAAKNLSDAILLSDILRVNTEITKAPLSASMIKRYDEHHQDLTLLKALVRQQLPEKYKEIFFDQSKNGYAGYIDGGASQEEFYKFIKPILEKMDGTEELLVKLNREDLLRKQRTFDNGSIPHQIHLGELHAILRRQEDFYPFLKDNREKIEKILTFRIPYYVGPLARGNSRFAWMTRKSEETITPWNFEEVVDKGASAQSFIERMTNFDKNLPNEKVLPKHSLLYEYFTVYNELTKVKYVTEGMRKPAFLSGEQKKAIVDLLFKTNRKVTVKQLKEDYFKKIECFDSVEISGVEDRFNASLGTYHDLLKIIKDKDFLDNEENEDILEDIVLTLTLFEDREMIEERLKTYAHLFDDKVMKQLKRRRYTGWGRLSRKLINGIRDKQSGKTILDFLKSDGFANRNFMQLIHDDSLTFKEDIQKAQVSGQGDSLHEHIANLAGSPAIKKGILQTVKVVDELVKVMGRHKPENIVIEMARENQTTQKGQKNSRERMKRIEEGIKELGSQILKEHPVENTQLQNEKLYLYYLQNGRDMYVDQELDINRLSDYDVDHIVPQSFLKDDSIDNKVLTRSDKARGKSDNVPSEEVVKKMKNYWRQLLNAKLITQRKFDNLTKAERGGLSELDKAGFIKRQLVETRQITKHVAQILDSRMNTKYDENDKLIREVKVITLKSKLVSDFRKDFQFYKVREINNYHHAHDAYLNAVVGTALIKKYPKLESEFVYGDYKVYDVRKMIAKSEQEIGKATAKYFFYSNIMNFFKTEITLANGEIRKRPLIETNGETGEIVWDKGRDFATVRKVLSMPQVNIVKKTEVQTGGFSKESILPKRNSDKLIARKKDWDPKKYGGFDSPTVAYSVLVVAKVEKGKSKKLKSVKELLGITIMERSSFEKNPIDFLEAKGYKEVKKDLIIKLPKYSLFELENGRKRMLASAGELQKGNELALPSKYVNFLYLASHYEKLKGSPEDNEQKQLFVEQHKHYLDEIIEQISEFSKRVILADANLDKVLSAYNKHRDKPIREQAENIIHLFTLTNLGAPAAFKYFDTTIDRKRYTSTKEVLDATLIHQSITGLYETRIDLSQLGGDGGGGSPAPEAAAKGGVPWLMKKPLQLTVLVPLHEYQERLLQQTALPKEQKELLQKLFLKYDALWQHWENQVGHRRIKPHNIATGTLAPRPQKQYPINPKAKPSIQIVIDDLLKQGVLIQQNSTMNTPVYPVPKPDGKWRMVLDYREVNKTIPLIAAQNQHSAGILSSIYRGKYKTTLDLTNGFWAHPITPESYWLTAFTWQGKQYCWTRLPQGFLNSPALFNADVVDLLKEIPNVQAYVDDIYISHDDPQEHLEQLEKIFSILLNAGYVVSLKKSEIAQREVEFLGFNITKEGRGLTDTFKQKLLNITPPKDLKQLQSILGLLNFARNFIPNYSELVKPLYTIVAPANGKFISWTEDNSNQLQHIISVLNQADNLEERNPETRLIIKVNSSPSAGYIRYYNEGSKRPIMYVNYIFSKAEAKFTQTEKLLTTMHKGLIKAMDLAMGQEILVYSPIVSMTKIQRTPLPERKALPVRWITWMTYLEDPRIQFHYDKSLPELQQIPNVTEDVIAKTKHPSEFAMVFYTDGSAIKHPDVNKSHSAGMGIAQVQFIPEYKIVHQWSIPLGDHTAQLAEIAAVEFACKKALKISGPVLIVTDSFYVAESANKELPYWKSNGFLNNKKKPLRHVSKWKSIAECLQLKPDIIIMHEKGHQQPMTTLHTEGNNLADKLATQGSYVVHAGKRTADGSEFEKRTADGSEFESPKKKAKVE

SEQ ID NO: 443 - protein, 2084 aa, synthetic construct
  source 1..2084: note = Description of Artificial Sequence: Synthetic polypeptide
MPAAKRVKLDGGDKKYSIGLDIGTNSVGWAVITDEYKVPSKKFKVLGNTDRHSIKKNLIGALLFDSGETAEATRLKRTARRRYTRRKNRICYLQEIFSNEMAKVDDSFFHRLEESFLVEEDKKHERHPIFGNIVDEVAYHEKYPTIYHLRKKLVDSTDKADLRLIYLALAHMIKFRGHFLIEGDLNPDNSDVDKLFIQLVQTYNQLFEENPINASGVDAKAILSARLSKSRRLENLIAQLPGEKKNGLFGNLIALSLGLTPNFKSNFDLAEDAKLQLSKDTYDDDLDNLLAQIGDQYADLFLAAKNLSDAILLSDILRVNTEITKAPLSASMIKRYDEHHQDLTLLKALVRQQLPEKYKEIFFDQSKNGYAGYIDGGASQEEFYKFIKPILEKMDGTEELLVKLNREDLLRKQRTFDNGSIPHQIHLGELHAILRRQEDFYPFLKDNREKIEKILTFRIPYYVGPLARGNSRFAWMTRKSEETITPWNFEEVVDKGASAQSFIERMTNFDKNLPNEKVLPKHSLLYEYFTVYNELTKVKYVTEGMRKPAFLSGEQKKAIVDLLFKTNRKVTVKQLKEDYFKKIECFDSVEISGVEDRFNASLGTYHDLLKIIKDKDFLDNEENEDILEDIVLTLTLFEDREMIEERLKTYAHLFDDKVMKQLKRRRYTGWGRLSRKLINGIRDKQSGKTILDFLKSDGFANRNFMQLIHDDSLTFKEDIQKAQVSGQGDSLHEHIANLAGSPAIKKGILQTVKVVDELVKVMGRHKPENIVIEMARENQTTQKGQKNSRERMKRIEEGIKELGSQILKEHPVENTQLQNEKLYLYYLQNGRDMYVDQELDINRLSDYDVDHIVPQSFLKDDSIDNKVLTRSDKARGKSDNVPSEEVVKKMKNYWRQLLNAKLITQRKFDNLTKAERGGLSELDKAGFIKRQLVETRQITKHVAQILDSRMNTKYDENDKLIREVKVITLKSKLVSDFRKDFQFYKVREINNYHHAHDAYLNAVVGTALIKKYPKLESEFVYGDYKVYDVRKMIAKSEQEIGKATAKYFFYSNIMNFFKTEITLANGEIRKRPLIETNGETGEIVWDKGRDFATVRKVLSMPQVNIVKKTEVQTGGFSKESILPKRNSDKLIARKKDWDPKKYGGFDSPTVAYSVLVVAKVEKGKSKKLKSVKELLGITIMERSSFEKNPIDFLEAKGYKEVKKDLIIKLPKYSLFELENGRKRMLASAGELQKGNELALPSKYVNFLYLASHYEKLKGSPEDNEQKQLFVEQHKHYLDEIIEQISEFSKRVILADANLDKVLSAYNKHRDKPIREQAENIIHLFTLTNLGAPAAFKYFDTTIDRKRYTSTKEVLDATLIHQSITGLYETRIDLSQLGGDGGEAAAKGGGGGVPWLMKKPLQLTVLVPLHEYQERLLQQTALPKEQKELLQKLFLKYDALWQHWENQVGHRRIKPHNIATGTLAPRPQKQYPINPKAKPSIQIVIDDLLKQGVLIQQNSTMNTPVYPVPKPDGKWRMVLDYREVNKTIPLIAAQNQHSAGILSSIYRGKYKTTLDLTNGFWAHPITPESYWLTAFTWQGKQYCWTRLPQGFLNSPALFNADVVDLLKEIPNVQAYVDDIYISHDDPQEHLEQLEKIFSILLNAGYVVSLKKSEIAQREVEFLGFNITKEGRGLTDTFKQKLLNITPPKDLKQLQSILGLLNFARNFIPNYSELVKPLYTIVAPANGKFISWTEDNSNQLQHIISVLNQADNLEERNPETRLIIKVNSSPSAGYIRYYNEGSKRPIMYVNYIFSKAEAKFTQTEKLLTTMHKGLIKAMDLAMGQEILVYSPIVSMTKIQRTPLPERKALPVRWITWMTYLEDPRIQFHYDKSLPELQQIPNVTEDVIAKTKHPSEFAMVFYTDGSAIKHPDVNKSHSAGMGIAQVQFIPEYKIVHQWSIPLGDHTAQLAEIAAVEFACKKALKISGPVLIVTDSFYVAESANKELPYWKSNGFLNNKKKPLRHVSKWKSIAECLQLKPDIIIMHEKGHQQPMTTLHTEGNNLADKLATQGSYVVHAGKRTADGSEFEKRTADGSEFESPKKKAKVE

SEQ ID NO: 444 - protein, 2087 aa, synthetic construct
  source 1..2087: note = Description of Artificial Sequence: Synthetic polypeptide
MPAAKRVKLDGGDKKYSIGLDIGTNSVGWAVITDEYKVPSKKFKVLGNTDRHSIKKNLIGALLFDSGETAEATRLKRTARRRYTRRKNRICYLQEIFSNEMAKVDDSFFHRLEESFLVEEDKKHERHPIFGNIVDEVAYHEKYPTIYHLRKKLVDSTDKADLRLIYLALAHMIKFRGHFLIEGDLNPDNSDVDKLFIQLVQTYNQLFEENPINASGVDAKAILSARLSKSRRLENLIAQLPGEKKNGLFGNLIALSLGLTPNFKSNFDLAEDAKLQLSKDTYDDDLDNLLAQIGDQYADLFLAAKNLSDAILLSDILRVNTEITKAPLSASMIKRYDEHHQDLTLLKALVRQQLPEKYKEIFFDQSKNGYAGYIDGGASQEEFYKFIKPILEKMDGTEELLVKLNREDLLRKQRTFDNGSIPHQIHLGELHAILRRQEDFYPFLKDNREKIEKILTFRIPYYVGPLARGNSRFAWMTRKSEETITPWNFEEVVDKGASAQSFIERMTNFDKNLPNEKVLPKHSLLYEYFTVYNELTKVKYVTEGMRKPAFLSGEQKKAIVDLLFKTNRKVTVKQLKEDYFKKIECFDSVEISGVEDRFNASLGTYHDLLKIIKDKDFLDNEENEDILEDIVLTLTLFEDREMIEERLKTYAHLFDDKVMKQLKRRRYTGWGRLSRKLINGIRDKQSGKTILDFLKSDGFANRNFMQLIHDDSLTFKEDIQKAQVSGQGDSLHEHIANLAGSPAIKKGILQTVKVVDELVKVMGRHKPENIVIEMARENQTTQKGQKNSRERMKRIEEGIKELGSQILKEHPVENTQLQNEKLYLYYLQNGRDMYVDQELDINRLSDYDVDHIVPQSFLKDDSIDNKVLTRSDKARGKSDNVPSEEVVKKMKNYWRQLLNAKLITQRKFDNLTKAERGGLSELDKAGFIKRQLVETRQITKHVAQILDSRMNTKYDENDKLIREVKVITLKSKLVSDFRKDFQFYKVREINNYHHAHDAYLNAVVGTALIKKYPKLESEFVYGDYKVYDVRKMIAKSEQEIGKATAKYFFYSNIMNFFKTEITLANGEIRKRPLIETNGETGEIVWDKGRDFATVRKVLSMPQVNIVKKTEVQTGGFSKESILPKRNSDKLIARKKDWDPKKYGGFDSPTVAYSVLVVAKVEKGKSKKLKSVKELLGITIMERSSFEKNPIDFLEAKGYKEVKKDLIIKLPKYSLFELENGRKRMLASAGELQKGNELALPSKYVNFLYLASHYEKLKGSPEDNEQKQLFVEQHKHYLDEIIEQISEFSKRVILADANLDKVLSAYNKHRDKPIREQAENIIHLFTLTNLGAPAAFKYFDTTIDRKRYTSTKEVLDATLIHQSITGLYETRIDLSQLGGDGGPAPGGSEAAAKGGVPWLMKKPLQLTVLVPLHEYQERLLQQTALPKEQKELLQKLFLKYDALWQHWENQVGHRRIKPHNIATGTLAPRPQKQYPINPKAKPSIQIVIDDLLKQGVLIQQNSTMNTPVYPVPKPDGKWRMVLDYREVNKTIPLIAAQNQHSAGILSSIYRGKYKTTLDLTNGFWAHPITPESYWLTAFTWQGKQYCWTRLPQGFLNSPALFNADVVDLLKEIPNVQAYVDDIYISHDDPQEHLEQLEKIFSILLNAGYVVSLKKSEIAQREVEFLGFNITKEGRGLTDTFKQKLLNITPPKDLKQLQSILGLLNFARNFIPNYSELVKPLYTIVAPANGKFISWTEDNSNQLQHIISVLNQADNLEERNPETRLIIKVNSSPSAGYIRYYNEGSKRPIMYVNYIFSKAEAKFTQTEKLLTTMHKGLIKAMDLAMGQEILVYSPIVSMTKIQRTPLPERKALPVRWITWMTYLEDPRIQFHYDKSLPELQQIPNVTEDVIAKTKHPSEFAMVFYTDGSAIKHPDVNKSHSAGMGIAQVQFIPEYKIVHQWSIPLGDHTAQLAEIAAVEFACKKALKISGPVLIVTDSFYVAESANKELPYWKSNGFLNNKKKPLRHVSKWKSIAECLQLKPDIIIMHEKGHQQPMTTLHTEGNNLADKLATQGSYVVHAGKRTADGSEFEKRTADGSEFESPKKKAKVE

SEQ ID NO: 445 - protein, 2091 aa, synthetic construct
  source 1..2091: note = Description of Artificial Sequence: Synthetic polypeptide
MPAAKRVKLDGGDKKYSIGLDIGTNSVGWAVITDEYKVPSKKFKVLGNTDRHSIKKNLIGALLFDSGETAEATRLKRTARRRYTRRKNRICYLQEIFSNEMAKVDDSFFHRLEESFLVEEDKKHERHPIFGNIVDEVAYHEKYPTIYHLRKKLVDSTDKADLRLIYLALAHMIKFRGHFLIEGDLNPDNSDVDKLFIQLVQTYNQLFEENPINASGVDAKAILSARLSKSRRLENLIAQLPGEKKNGLFGNLIALSLGLTPNFKSNFDLAEDAKLQLSKDTYDDDLDNLLAQIGDQYADLFLAAKNLSDAILLSDILRVNTEITKAPLSASMIKRYDEHHQDLTLLKALVRQQLPEKYKEIFFDQSKNGYAGYIDGGASQEEFYKFIKPILEKMDGTEELLVKLNREDLLRKQRTFDNGSIPHQIHLGELHAILRRQEDFYPFLKDNREKIEKILTFRIPYYVGPLARGNSRFAWMTRKSEETITPWNFEEVVDKGASAQSFIERMTNFDKNLPNEKVLPKHSLLYEYFTVYNELTKVKYVTEGMRKPAFLSGEQKKAIVDLLFKTNRKVTVKQLKEDYFKKIECFDSVEISGVEDRFNASLGTYHDLLKIIKDKDFLDNEENEDILEDIVLTLTLFEDREMIEERLKTYAHLFDDKVMKQLKRRRYTGWGRLSRKLINGIRDKQSGKTILDFLKSDGFANRNFMQLIHDDSLTFKEDIQKAQVSGQGDSLHEHIANLAGSPAIKKGILQTVKVVDELVKVMGRHKPENIVIEMARENQTTQKGQKNSRERMKRIEEGIKELGSQILKEHPVENTQLQNEKLYLYYLQNGRDMYVDQELDINRLSDYDVDHIVPQSFLKDDSIDNKVLTRSDKARGKSDNVPSEEVVKKMKNYWRQLLNAKLITQRKFDNLTKAERGGLSELDKAGFIKRQLVETRQITKHVAQILDSRMNTKYDENDKLIREVKVITLKSKLVSDFRKDFQFYKVREINNYHHAHDAYLNAVVGTALIKKYPKLESEFVYGDYKVYDVRKMIAKSEQEIGKATAKYFFYSNIMNFFKTEITLANGEIRKRPLIETNGETGEIVWDKGRDFATVRKVLSMPQVNIVKKTEVQTGGFSKESILPKRNSDKLIARKKDWDPKKYGGFDSPTVAYSVLVVAKVEKGKSKKLKSVKELLGITIMERSSFEKNPIDFLEAKGYKEVKKDLIIKLPKYSLFELENGRKRMLASAGELQKGNELALPSKYVNFLYLASHYEKLKGSPEDNEQKQLFVEQHKHYLDEIIEQISEFSKRVILADANLDKVLSAYNKHRDKPIREQAENIIHLFTLTNLGAPAAFKYFDTTIDRKRYTSTKEVLDATLIHQSITGLYETRIDLSQLGGDGGGGGGSEAAAKGGGGSGGVPWLMKKPLQLTVLVPLHEYQERLLQQTALPKEQKELLQKLFLKYDALWQHWENQVGHRRIKPHNIATGTLAPRPQKQYPINPKAKPSIQIVIDDLLKQGVLIQQNSTMNTPVYPVPKPDGKWRMVLDYREVNKTIPLIAAQNQHSAGILSSIYRGKYKTTLDLTNGFWAHPITPESYWLTAFTWQGKQYCWTRLPQGFLNSPALFNADVVDLLKEIPNVQAYVDDIYISHDDPQEHLEQLEKIFSILLNAGYVVSLKKSEIAQREVEFLGFNITKEGRGLTDTFKQKLLNITPPKDLKQLQSILGKLNFARNFIPNYSELVKPLYTIVAPANGKFISWTEDNSNQLQHIISVLNQADNLEERNPETRLIIKVNSSPSAGYIRYYNEGSKRPIMYVNYIFSKAEAKFTQTEKLLTTMHKGLIKAMDLAMGQEILVYSPIVSMTKIQRTPLPERKALPVRWITWMTYLEDPRIQFHYDKSLPELQQIPNVTEDVIAKTKHPSEFAMVFYTDGSAIKHPDVNKSHSAGMGIAQVQFIPEYKIVHQWSIPLGDHTAQLAEIAAVEFACKKALKISGPVLIVTDSFYVAESANKELPYWKSNGFLNNKKKPLRHVSKWKSIAECLQLKPDIIIMHEKGHQQPMTTLHTEGNNLADKLATQGSYVVHAGKRTADGSEFEKRTADGSEFESPKKKAKVE

SEQ ID NO: 446 - protein, 2082 aa, synthetic construct
  source 1..2082: note = Description of Artificial Sequence: Synthetic polypeptide
MPAAKRVKLDGGDKKYSIGLDIGTNSVGWAVITDEYKVPSKKFKVLGNTDRHSIKKNLIGALLFDSGETAEATRLKRTARRRYTRRKNRICYLQEIFSNEMAKVDDSFFHRLEESFLVEEDKKHERHPIFGNIVDEVAYHEKYPTIYHLRKKLVDSTDKADLRLIYLALAHMIKFRGHFLIEGDLNPDNSDVDKLFIQLVQTYNQLFEENPINASGVDAKAILSARLSKSRRLENLIAQLPGEKKNGLFGNLIALSLGLTPNFKSNFDLAEDAKLQLSKDTYDDDLDNLLAQIGDQYADLFLAAKNLSDAILLSDILRVNTEITKAPLSASMIKRYDEHHQDLTLLKALVRQQLPEKYKEIFFDQSKNGYAGYIDGGASQEEFYKFIKPILEKMDGTEELLVKLNREDLLRKQRTFDNGSIPHQIHLGELHAILRRQEDFYPFLKDNREKIEKILTFRIPYYVGPLARGNSRFAWMTRKSEETITPWNFEEVVDKGASAQSFIERMTNFDKNLPNEKVLPKHSLLYEYFTVYNELTKVKYVTEGMRKPAFLSGEQKKAIVDLLFKTNRKVTVKQLKEDYFKKIECFDSVEISGVEDRFNASLGTYHDLLKIIKDKDFLDNEENEDILEDIVLTLTLFEDREMIEERLKTYAHLFDDKVMKQLKRRRYTGWGRLSRKLINGIRDKQSGKTILDFLKSDGFANRNFMQLIHDDSLTFKEDIQKAQVSGQGDSLHEHIANLAGSPAIKKGILQTVKVVDELVKVMGRHKPENIVIEMARENQTTQKGQKNSRERMKRIEEGIKELGSQILKEHPVENTQLQNEKLYLYYLQNGRDMYVDQELDINRLSDYDVDHIVPQSFLKDDSIDNKVLTRSDKARGKSDNVPSEEVVKKMKNYWRQLLNAKLITQRKFDNLTKAERGGLSELDKAGFIKRQLVETRQITKHVAQILDSRMNTKYDENDKLIREVKVITLKSKLVSDFRKDFQFYKVREINNYHHAHDAYLNAVVGTALIKKYPKLESEFVYGDYKVYDVRKMIAKSEQEIGKATAKYFFYSNIMNFFKTEITLANGEIRKRPLIETNGETGEIVWDKGRDFATVRKVLSMPQVNIVKKTEVQTGGFSKESILPKRNSDKLIARKKDWDPKKYGGFDSPTVAYSVLVVAKVEKGKSKKLKSVKELLGITIMERSSFEKNPIDFLEAKGYKEVKKDLIIKLPKYSLFELENGRKRMLASAGELQKGNELALPSKYVNFLYLASHYEKLKGSPEDNEQKQLFVEQHKHYLDEIIEQISEFSKRVILADANLDKVLSAYNKHRDKPIREQAENIIHLFTLTNLGAPAAFKYFDTTIDRKRYTSTKEVLDATLIHQSITGLYETRIDLSQLGGDGGGGGGSSGGVPWLMKKPLQLTVLVPLHEYQERLLQQTALPKEQKELLQKLFLKYDALWQHWENQVGHRRIKPHNIATGTLAPRPQKQYPINPKAKPSIQIVIDDLLKQGVLIQQNSTMNTPVYPVPKPDGKWRMVLDYREVNKTIPLIAAQNQHSAGILSSIYRGKYKTTLDLTNGFWAHPITPESYWLTAFTWQGKQYCWTRLPQGFLNSPALFNADVVDLLKEIPNVQAYVDDIYISHDDPQEHLEQLEKIFSILLNAGYVVSLKKSEIAQREVEFLGFNITKEGRGLTDTFKQKLLNITPPKDLKQLQSILGKLNFARNFIPNYSELVKPLYTIVAPANGKFISWTEDNSNQLQHIISVLNQADNLEERNPETRLIIKVNSSPSAGYIRYYNEGSKRPIMYVNYIFSKAEAKFTQTEKLLTTMHKGLIKAMDLAMGQEILVYSPIVSMTKIQRTPLPERKALPVRWITWMTYLEDPRIQFHYDKSLPELQQIPNVTEDVIAKTKHPSEFAMVFYTDGSAIKHPDVNKSHSAGMGIAQVQFIPEYKIVHQWSIPLGDHTAQLAEIAAVEFACKKALKISGPVLIVTDSFYVAESANKELPYWKSNGFLNNKKKPLRHVSKWKSIAECLQLKPDIIIMHEKGHQQPMTTLHTEGNNLADKLATQGSYVVHAGKRTADGSEFEKRTADGSEFESPKKKAKVE

SEQ ID NO: 447 - protein, 2101 aa, synthetic construct
  source 1..2101: note = Description of Artificial Sequence: Synthetic polypeptide
MPAAKRVKLDGGDKKYSIGLDIGTNSVGWAVITDEYKVPSKKFKVLGNTDRHSIKKNLIGALLFDSGETAEATRLKRTARRRYTRRKNRICYLQEIFSNEMAKVDDSFFHRLEESFLVEEDKKHERHPIFGNIVDEVAYHEKYPTIYHLRKKLVDSTDKADLRLIYLALAHMIKFRGHFLIEGDLNPDNSDVDKLFIQLVQTYNQLFEENPINASGVDAKAILSARLSKSRRLENLIAQLPGEKKNGLFGNLIALSLGLTPNFKSNFDLAEDAKLQLSKDTYDDDLDNLLAQIGDQYADLFLAAKNLSDAILLSDILRVNTEITKAPLSASMIKRYDEHHQDLTLLKALVRQQLPEKYKEIFFDQSKNGYAGYIDGGASQEEFYKFIKPILEKMDGTEELLVKLNREDLLRKQRTFDNGSIPHQIHLGELHAILRRQEDFYPFLKDNREKIEKILTFRIPYYVGPLARGNSRFAWMTRKSEETITPWNFEEVVDKGASAQSFIERMTNFDKNLPNEKVLPKHSLLYEYFTVYNELTKVKYVTEGMRKPAFLSGEQKKAIVDLLFKTNRKVTVKQLKEDYFKKIECFDSVEISGVEDRFNASLGTYHDLLKIIKDKDFLDNEENEDILEDIVLTLTLFEDREMIEERLKTYAHLFDDKVMKQLKRRRYTGWGRLSRKLINGIRDKQSGKTILDFLKSDGFANRNFMQLIHDDSLTFKEDIQKAQVSGQGDSLHEHIANLAGSPAIKKGILQTVKVVDELVKVMGRHKPENIVIEMARENQTTQKGQKNSRERMKRIEEGIKELGSQILKEHPVENTQLQNEKLYLYYLQNGRDMYVDQELDINRLSDYDVDHIVPQSFLKDDSIDNKVLTRSDKARGKSDNVPSEEVVKKMKNYWRQLLNAKLITQRKFDNLTKAERGGLSELDKAGFIKRQLVETRQITKHVAQILDSRMNTKYDENDKLIREVKVITLKSKLVSDFRKDFQFYKVREINNYHHAHDAYLNAVVGTALIKKYPKLESEFVYGDYKVYDVRKMIAKSEQEIGKATAKYFFYSNIMNFFKTEITLANGEIRKRPLIETNGETGEIVWDKGRDFATVRKVLSMPQVNIVKKTEVQTGGFSKESILPKRNSDKLIARKKDWDPKKYGGFDSPTVAYSVLVVAKVEKGKSKKLKSVKELLGITIMERSSFEKNPIDFLEAKGYKEVKKDLIIKLPKYSLFELENGRKRMLASAGELQKGNELALPSKYVNFLYLASHYEKLKGSPEDNEQKQLFVEQHKHYLDEIIEQISEFSKRVILADANLDKVLSAYNKHRDKPIREQAENIIHLFTLTNLGAPAAFKYFDTTIDRKRYTSTKEVLDATLIHQSITGLYETRIDLSQLGGDGGEAAAKEAAAKEAAAKEAAAKEAAAKGGVPWLMKKPLQLTVLVPLHEYQERLLQQTALPKEQKELLQKLFLKYDALWQHWENQVGHRRIKPHNIATGTLAPRPQKQYPINPKAKPSIQIVIDDLLKQGVLIQQNSTMNTPVYPVPKPDGKWRMVLDYREVNKTIPLIAAQNQHSAGILSSIYRGKYKTTLDLTNGFWAHPITPESYWLTAFTWQGKQYCWTRLPQGFLNSPALFNADVVDLLKEIPNVQAYVDDIYISHDDPQEHLEQLEKIFSILLNAGYVVSLKKSEIAQREVEFLGFNITKEGRGLTDTFKQKLLNITPPKDLKQLQSILGKLNFARNFIPNYSELVKPLYTIVAPANGKFISWTEDNSNQLQHIISVLNQADNLEERNPETRLIIKVNSSPSAGYIRYYNEGSKRPIMYVNYIFSKAEAKFTQTEKLLTTMHKGLIKAMDLAMGQEILVYSPIVSMTKIQRTPLPERKALPVRWITWMTYLEDPRIQFHYDKSLPELQQIPNVTEDVIAKTKHPSEFAMVFYTDGSAIKHPDVNKSHSAGMGIAQVQFIPEYKIVHQWSIPLGDHTAQLAEIAAVEFACKKALKISGPVLIVTDSFYVAESANKELPYWKSNGFLNNKKKPLRHVSKWKSIAECLQLKPDIIIMHEKGHQQPMTTLHTEGNNLADKLATQGSYVVHAGKRTADGSEFEKRTADGSEFESPKKKAKVE

SEQ ID NO: 448 - protein, 2085 aa, synthetic construct
  source 1..2085: note = Description of Artificial Sequence: Synthetic polypeptide
MPAAKRVKLDGGDKKYSIGLDIGTNSVGWAVITDEYKVPSKKFKVLGNTDRHSIKKNLIGALLFDSGETAEATRLKRTARRRYTRRKNRICYLQEIFSNEMAKVDDSFFHRLEESFLVEEDKKHERHPIFGNIVDEVAYHEKYPTIYHLRKKLVDSTDKADLRLIYLALAHMIKFRGHFLIEGDLNPDNSDVDKLFIQLVQTYNQLFEENPINASGVDAKAILSARLSKSRRLENLIAQLPGEKKNGLFGNLIALSLGLTPNFKSNFDLAEDAKLQLSKDTYDDDLDNLLAQIGDQYADLFLAAKNLSDAILLSDILRVNTEITKAPLSASMIKRYDEHHQDLTLLKALVRQQLPEKYKEIFFDQSKNGYAGYIDGGASQEEFYKFIKPILEKMDGTEELLVKLNREDLLRKQRTFDNGSIPHQIHLGELHAILRRQEDFYPFLKDNREKIEKILTFRIPYYVGPLARGNSRFAWMTRKSEETITPWNFEEVVDKGASAQSFIERMTNFDKNLPNEKVLPKHSLLYEYFTVYNELTKVKYVTEGMRKPAFLSGEQKKAIVDLLFKTNRKVTVKQLKEDYFKKIECFDSVEISGVEDRFNASLGTYHDLLKIIKDKDFLDNEENEDILEDIVLTLTLFEDREMIEERLKTYAHLFDDKVMKQLKRRRYTGWGRLSRKLINGIRDKQSGKTILDFLKSDGFANRNFMQLIHDDSLTFKEDIQKAQVSGQGDSLHEHIANLAGSPAIKKGILQTVKVVDELVKVMGRHKPENIVIEMARENQTTQKGQKNSRERMKRIEEGIKELGSQILKEHPVENTQLQNEKLYLYYLQNGRDMYVDQELDINRLSDYDVDHIVPQSFLKDDSIDNKVLTRSDKARGKSDNVPSEEVVKKMKNYWRQLLNAKLITQRKFDNLTKAERGGLSELDKAGFIKRQLVETRQITKHVAQILDSRMNTKYDENDKLIREVKVITLKSKLVSDFRKDFQFYKVREINNYHHAHDAYLNAVVGTALIKKYPKLESEFVYGDYKVYDVRKMIAKSEQEIGKATAKYFFYSNIMNFFKTEITLANGEIRKRPLIETNGETGEIVWDKGRDFATVRKVLSMPQVNIVKKTEVQTGGFSKESILPKRNSDKLIARKKDWDPKKYGGFDSPTVAYSVLVVAKVEKGKSKKLKSVKELLGITIMERSSFEKNPIDFLEAKGYKEVKKDLIIKLPKYSLFELENGRKRMLASAGELQKGNELALPSKYVNFLYLASHYEKLKGSPEDNEQKQLFVEQHKHYLDEIIEQISEFSKRVILADANLDKVLSAYNKHRDKPIREQAENIIHLFTLTNLGAPAAFKYFDTTIDRKRYTSTKEVLDATLIHQSITGLYETRIDLSQLGGDGGGGGPAPGGSGGVPWLMKKPLQLTVLVPLHEYQERLLQQTALPKEQKELLQKLFLKYDALWQHWENQVGHRRIKPHNIATGTLAPRPQKQYPINPKAKPSIQIVIDDLLKQGVLIQQNSTMNTPVYPVPKPDGKWRMVLDYREVNKTIPLIAAQNQHSAGILSSIYRGKYKTTLDLTNGFWAHPITPESYWLTAFTWQGKQYCWTRLPQGFLNSPALFNADVVDLLKEIPNVQAYVDDIYISHDDPQEHLEQLEKIFSILLNAGYVVSLKKSEIAQREVEFLGFNITKEGRGLTDTFKQKLLNITPPKDLKQLQSILGKLNFARNFIPNYSELVKPLYTIVAPANGKFISWTEDNSNQLQHIISVLNQADNLEERNPETRLIIKVNSSPSAGYIRYYNEGSKRPIMYVNYIFSKAEAKFTQTEKLLTTMHKGLIKAMDLAMGQEILVYSPIVSMTKIQRTPLPERKALPVRWITWMTYLEDPRIQFHYDKSLPELQQIPNVTEDVIAKTKHPSEFAMVFYTDGSAIKHPDVNKSHSAGMGIAQVQFIPEYKIVHQWSIPLGDHTAQLAEIAAVEFACKKALKISGPVLIVTDSFYVAESANKELPYWKSNGFLNNKKKPLRHVSKWKSIAECLQLKPDIIIMHEKGHQQPMTTLHTEGNNLADKLATQGSYVVHAGKRTADGSEFEKRTADGSEFESPKKKAKVE

SEQ ID NO: 449 - protein, 2088 aa, synthetic construct
  source 1..2088: note = Description of Artificial Sequence: Synthetic polypeptide
MPAAKRVKLDGGDKKYSIGLDIGTNSVGWAVITDEYKVPSKKFKVLGNTDRHSIKKNLIGALLFDSGETAEATRLKRTARRRYTRRKNRICYLQEIFSNEMAKVDDSFFHRLEESFLVEEDKKHERHPIFGNIVDEVAYHEKYPTIYHLRKKLVDSTDKADLRLIYLALAHMIKFRGHFLIEGDLNPDNSDVDKLFIQLVQTYNQLFEENPINASGVDAKAILSARLSKSRRLENLIAQLPGEKKNGLFGNLIALSLGLTPNFKSNFDLAEDAKLQLSKDTYDDDLDNLLAQIGDQYADLFLAAKNLSDAILLSDILRVNTEITKAPLSASMIKRYDEHHQDLTLLKALVRQQLPEKYKEIFFDQSKNGYAGYIDGGASQEEFYKFIKPILEKMDGTEELLVKLNREDLLRKQRTFDNGSIPHQIHLGELHAILRRQEDFYPFLKDNREKIEKILTFRIPYYVGPLARGNSRFAWMTRKSEETITPWNFEEVVDKGASAQSFIERMTNFDKNLPNEKVLPKHSLLYEYFTVYNELTKVKYVTEGMRKPAFLSGEQKKAIVDLLFKTNRKVTVKQLKEDYFKKIECFDSVEISGVEDRFNASLGTYHDLLKIIKDKDFLDNEENEDILEDIVLTLTLFEDREMIEERLKTYAHLFDDKVMKQLKRRRYTGWGRLSRKLINGIRDKQSGKTILDFLKSDGFANRNFMQLIHDDSLTFKEDIQKAQVSGQGDSLHEHIANLAGSPAIKKGILQTVKVVDELVKVMGRHKPENIVIEMARENQTTQKGQKNSRERMKRIEEGIKELGSQILKEHPVENTQLQNEKLYLYYLQNGRDMYVDQELDINRLSDYDVDHIVPQSFLKDDSIDNKVLTRSDKARGKSDNVPSEEVVKKMKNYWRQLLNAKLITQRKFDNLTKAERGGLSELDKAGFIKRQLVETRQITKHVAQILDSRMNTKYDENDKLIREVKVITLKSKLVSDFRKDFQFYKVREINNYHHAHDAYLNAVVGTALIKKYPKLESEFVYGDYKVYDVRKMIAKSEQEIGKATAKYFFYSNIMNFFKTEITLANGEIRKRPLIETNGETGEIVWDKGRDFATVRKVLSMPQVNIVKKTEVQTGGFSKESILPKRNSDKLIARKKDWDPKKYGGFDSPTVAYSVLVVAKVEKGKSKKLKSVKELLGITIMERSSFEKNPIDFLEAKGYKEVKKDLIIKLPKYSLFELENGRKRMLASAGELQKGNELALPSKYVNFLYLASHYEKLKGSPEDNEQKQLFVEQHKHYLDEIIEQISEFSKRVILADANLDKVLSAYNKHRDKPIREQAENIIHLFTLTNLGAPAAFKYFDTTIDRKRYTSTKEVLDATLIHQSITGLYETRIDLSQLGGDGGGSSGSSGSSGSSGGVPWLMKKPLQLTVLVPLHEYQERLLQQTALPKEQKELLQKLFLKYDALWQHWENQVGHRRIKPHNIATGTLAPRPQKQYPINPKAKPSIQIVIDDLLKQGVLIQQNSTMNTPVYPVPKPDGKWRMVLDYREVNKTIPLIAAQNQHSAGILSSIYRGKYKTTLDLTNGFWAHPITPESYWLTAFTWQGKQYCWTRLPQGFLNSPALFNADVVDLLKEIPNVQAYVDDIYISHDDPQEHLEQLEKIFSILLNAGYVVSLKKSEIAQREVEFLGFNITKEGRGLTDTFKQKLLNITPPKDLKQLQSILGKLNFARNFIPNYSELVKPLYTIVAPANGKFISWTEDNSNQLQHIISVLNQADNLEERNPETRLIIKVNSSPSAGYIRYYNEGSKRPIMYVNYIFSKAEAKFTQTEKLLTTMHKGLIKAMDLAMGQEILVYSPIVSMTKIQRTPLPERKALPVRWITWMTYLEDPRIQFHYDKSLPELQQIPNVTEDVIAKTKHPSEFAMVFYTDGSAIKHPDVNKSHSAGMGIAQVQFIPEYKIVHQWSIPLGDHTAQLAEIAAVEFACKKALKISGPVLIVTDSFYVAESANKELPYWKSNGFLNNKKKPLRHVSKWKSIAECLQLKPDIIIMHEKGHQQPMTTLHTEGNNLADKLATQGSYVVHAGKRTADGSEFEKRTADGSEFESPKKKAKVE

SEQ ID NO: 450 - protein, 2094 aa, synthetic construct
  source 1..2094: note = Description of Artificial Sequence: Synthetic polypeptide
MPAAKRVKLDGGDKKYSIGLDIGTNSVGWAVITDEYKVPSKKFKVLGNTDRHSIKKNLIGALLFDSGETAEATRLKRTARRRYTRRKNRICYLQEIFSNEMAKVDDSFFHRLEESFLVEEDKKHERHPIFGNIVDEVAYHEKYPTIYHLRKKLVDSTDKADLRLIYLALAHMIKFRGHFLIEGDLNPDNSDVDKLFIQLVQTYNQLFEENPINASGVDAKAILSARLSKSRRLENLIAQLPGEKKNGLFGNLIALSLGLTPNFKSNFDLAEDAKLQLSKDTYDDDLDNLLAQIGDQYADLFLAAKNLSDAILLSDILRVNTEITKAPLSASMIKRYDEHHQDLTLLKALVRQQLPEKYKEIFFDQSKNGYAGYIDGGASQEEFYKFIKPILEKMDGTEELLVKLNREDLLRKQRTFDNGSIPHQIHLGELHAILRRQEDFYPFLKDNREKIEKILTFRIPYYVGPLARGNSRFAWMTRKSEETITPWNFEEVVDKGASAQSFIERMTNFDKNLPNEKVLPKHSLLYEYFTVYNELTKVKYVTEGMRKPAFLSGEQKKAIVDLLFKTNRKVTVKQLKEDYFKKIECFDSVEISGVEDRFNASLGTYHDLLKIIKDKDFLDNEENEDILEDIVLTLTLFEDREMIEERLKTYAHLFDDKVMKQLKRRRYTGWGRLSRKLINGIRDKQSGKTILDFLKSDGFANRNFMQLIHDDSLTFKEDIQKAQVSGQGDSLHEHIANLAGSPAIKKGILQTVKVVDELVKVMGRHKPENIVIEMARENQTTQKGQKNSRERMKRIEEGIKELGSQILKEHPVENTQLQNEKLYLYYLQNGRDMYVDQELDINRLSDYDVDHIVPQSFLKDDSIDNKVLTRSDKARGKSDNVPSEEVVKKMKNYWRQLLNAKLITQRKFDNLTKAERGGLSELDKAGFIKRQLVETRQITKHVAQILDSRMNTKYDENDKLIREVKVITLKSKLVSDFRKDFQFYKVREINNYHHAHDAYLNAVVGTALIKKYPKLESEFVYGDYKVYDVRKMIAKSEQEIGKATAKYFFYSNIMNFFKTEITLANGEIRKRPLIETNGETGEIVWDKGRDFATVRKVLSMPQVNIVKKTEVQTGGFSKESILPKRNSDKLIARKKDWDPKKYGGFDSPTVAYSVLVVAKVEKGKSKKLKSVKELLGITIMERSSFEKNPIDFLEAKGYKEVKKDLIIKLPKYSLFELENGRKRMLASAGELQKGNELALPSKYVNFLYLASHYEKLKGSPEDNEQKQLFVEQHKHYLDEIIEQISEFSKRVILADANLDKVLSAYNKHRDKPIREQAENIIHLFTLTNLGAPAAFKYFDTTIDRKRYTSTKEVLDATLIHQSITGLYETRIDLSQLGGDGGGSSGSSGSSGSSGSSGSSGGVPWLMKKPLQLTVLVPLHEYQERLLQQTALPKEQKELLQKLFLKYDALWQHWENQVGHRRIKPHNIATGTLAPRPQKQYPINPKAKPSIQIVIDDLLKQGVLIQQNSTMNTPVYPVPKPDGKWRMVLDYREVNKTIPLIAAQNQHSAGILSSIYRGKYKTTLDLTNGFWAHPITPESYWLTAFTWQGKQYCWTRLPQGFLNSPALFNADVVDLLKEIPNVQAYVDDIYISHDDPQEHLEQLEKIFSILLNAGYVVSLKKSEIAQREVEFLGFNITKEGRGLTDTFKQKLLNITPPKDLKQLQSILGKLNFARNFIPNYSELVKPLYTIVAPANGKFISWTEDNSNQLQHIISVLNQADNLEERNPETRLIIKVNSSPSAGYIRYYNEGSKRPIMYVNYIFSKAEAKFTQTEKLLTTMHKGLIKAMDLAMGQEILVYSPIVSMTKIQRTPLPERKALPVRWITWMTYLEDPRIQFHYDKSLPELQQIPNVTEDVIAKTKHPSEFAMVFYTDGSAIKHPDVNKSHSAGMGIAQVQFIPEYKIVHQWSIPLGDHTAQLAEIAAVEFACKKALKISGPVLIVTDSFYVAESANKELPYWKSNGFLNNKKKPLRHVSKWKSIAECLQLKPDIIIMHEKGHQQPMTTLHTEGNNLADKLATQGSYVVHAGKRTADGSEFEKRTADGSEFESPKKKAKVE

SEQ ID NO: 451 - protein, 2087 aa, synthetic construct
  source 1..2087: note = Description of Artificial Sequence: Synthetic polypeptide
MPAAKRVKLDGGDKKYSIGLDIGTNSVGWAVITDEYKVPSKKFKVLGNTDRHSIKKNLIGALLFDSGETAEATRLKRTARRRYTRRKNRICYLQEIFSNEMAKVDDSFFHRLEESFLVEEDKKHERHPIFGNIVDEVAYHEKYPTIYHLRKKLVDSTDKADLRLIYLALAHMIKFRGHFLIEGDLNPDNSDVDKLFIQLVQTYNQLFEENPINASGVDAKAILSARLSKSRRLENLIAQLPGEKKNGLFGNLIALSLGLTPNFKSNFDLAEDAKLQLSKDTYDDDLDNLLAQIGDQYADLFLAAKNLSDAILLSDILRVNTEITKAPLSASMIKRYDEHHQDLTLLKALVRQQLPEKYKEIFFDQSKNGYAGYIDGGASQEEFYKFIKPILEKMDGTEELLVKLNREDLLRKQRTFDNGSIPHQIHLGELHAILRRQEDFYPFLKDNREKIEKILTFRIPYYVGPLARGNSRFAWMTRKSEETITPWNFEEVVDKGASAQSFIERMTNFDKNLPNEKVLPKHSLLYEYFTVYNELTKVKYVTEGMRKPAFLSGEQKKAIVDLLFKTNRKVTVKQLKEDYFKKIECFDSVEISGVEDRFNASLGTYHDLLKIIKDKDFLDNEENEDILEDIVLTLTLFEDREMIEERLKTYAHLFDDKVMKQLKRRRYTGWGRLSRKLINGIRDKQSGKTILDFLKSDGFANRNFMQLIHDDSLTFKEDIQKAQVSGQGDSLHEHIANLAGSPAIKKGILQTVKVVDELVKVMGRHKPENIVIEMARENQTTQKGQKNSRERMKRIEEGIKELGSQILKEHPVENTQLQNEKLYLYYLQNGRDMYVDQELDINRLSDYDVDHIVPQSFLKDDSIDNKVLTRSDKARGKSDNVPSEEVVKKMKNYWRQLLNAKLITQRKFDNLTKAERGGLSELDKAGFIKRQLVETRQITKHVAQILDSRMNTKYDENDKLIREVKVITLKSKLVSDFRKDFQFYKVREINNYHHAHDAYLNAVVGTALIKKYPKLESEFVYGDYKVYDVRKMIAKSEQEIGKATAKYFFYSNIMNFFKTEITLANGEIRKRPLIETNGETGEIVWDKGRDFATVRKVLSMPQVNIVKKTEVQTGGFSKESILPKRNSDKLIARKKDWDPKKYGGFDSPTVAYSVLVVAKVEKGKSKKLKSVKELLGITIMERSSFEKNPIDFLEAKGYKEVKKDLIIKLPKYSLFELENGRKRMLASAGELQKGNELALPSKYVNFLYLASHYEKLKGSPEDNEQKQLFVEQHKHYLDEIIEQISEFSKRVILADANLDKVLSAYNKHRDKPIREQAENIIHLFTLTNLGAPAAFKYFDTTIDRKRYTSTKEVLDATLIHQSITGLYETRIDLSQLGGDGGPAPGGGEAAAKGGVPWLMKKPLQLTVLVPLHEYQERLLQQTALPKEQKELLQKLFLKYDALWQHWENQVGHRRIKPHNIATGTLAPRPQKQYPINPKAKPSIQIVIDDLLKQGVLIQQNSTMNTPVYPVPKPDGKWRMVLDYREVNKTIPLIAAQNQHSAGILSSIYRGKYKTTLDLTNGFWAHPITPESYWLTAFTWQGKQYCWTRLPQGFLNSPALFNADVVDLLKEIPNVQAYVDDIYISHDDPQEHLEQLEKIFSILLNAGYVVSLKKSEIAQREVEFLGFNITKEGRGLTDTFKQKLLNITPPKDLKQLQSILGKLNFARNFIPNYSELVKPLYTIVAPANGKFISWTEDNSNQLQHIISVLNQADNLEERNPETRLIIKVNSSPSAGYIRYYNEGSKRPIMYVNYIFSKAEAKFTQTEKLLTTMHKGLIKAMDLAMGQEILVYSPIVSMTKIQRTPLPERKALPVRWITWMTYLEDPRIQFHYDKSLPELQQIPNVTEDVIAKTKHPSEFAMVFYTDGSAIKHPDVNKSHSAGMGIAQVQFIPEYKIVHQWSIPLGDHTAQLAEIAAVEFACKKALKISGPVLIVTDSFYVAESANKELPYWKSNGFLNNKKKPLRHVSKWKSIAECLQLKPDIIIMHEKGHQQPMTTLHTEGNNLADKLATQGSYVVHAGKRTADGSEFEKRTADGSEFESPKKKAKVE

SEQ ID NO: 452 - protein, 2081 aa, synthetic construct
  source 1..2081: note = Description of Artificial Sequence: Synthetic polypeptide
MPAAKRVKLDGGDKKYSIGLDIGTNSVGWAVITDEYKVPSKKFKVLGNTDRHSIKKNLIGALLFDSGETAEATRLKRTARRRYTRRKNRICYLQEIFSNEMAKVDDSFFHRLEESFLVEEDKKHERHPIFGNIVDEVAYHEKYPTIYHLRKKLVDSTDKADLRLIYLALAHMIKFRGHFLIEGDLNPDNSDVDKLFIQLVQTYNQLFEENPINASGVDAKAILSARLSKSRRLENLIAQLPGEKKNGLFGNLIALSLGLTPNFKSNFDLAEDAKLQLSKDTYDDDLDNLLAQIGDQYADLFLAAKNLSDAILLSDILRVNTEITKAPLSASMIKRYDEHHQDLTLLKALVRQQLPEKYKEIFFDQSKNGYAGYIDGGASQEEFYKFIKPILEKMDGTEELLVKLNREDLLRKQRTFDNGSIPHQIHLGELHAILRRQEDFYPFLKDNREKIEKILTFRIPYYVGPLARGNSRFAWMTRKSEETITPWNFEEVVDKGASAQSFIERMTNFDKNLPNEKVLPKHSLLYEYFTVYNELTKVKYVTEGMRKPAFLSGEQKKAIVDLLFKTNRKVTVKQLKEDYFKKIECFDSVEISGVEDRFNASLGTYHDLLKIIKDKDFLDNEENEDILEDIVLTLTLFEDREMIEERLKTYAHLFDDKVMKQLKRRRYTGWGRLSRKLINGIRDKQSGKTILDFLKSDGFANRNFMQLIHDDSLTFKEDIQKAQVSGQGDSLHEHIANLAGSPAIKKGILQTVKVVDELVKVMGRHKPENIVIEMARENQTTQKGQKNSRERMKRIEEGIKELGSQILKEHPVENTQLQNEKLYLYYLQNGRDMYVDQELDINRLSDYDVDHIVPQSFLKDDSIDNKVLTRSDKARGKSDNVPSEEVVKKMKNYWRQLLNAKLITQRKFDNLTKAERGGLSELDKAGFIKRQLVETRQITKHVAQILDSRMNTKYDENDKLIREVKVITLKSKLVSDFRKDFQFYKVREINNYHHAHDAYLNAVVGTALIKKYPKLESEFVYGDYKVYDVRKMIAKSEQEIGKATAKYFFYSNIMNFFKTEITLANGEIRKRPLIETNGETGEIVWDKGRDFATVRKVLSMPQVNIVKKTEVQTGGFSKESILPKRNSDKLIARKKDWDPKKYGGFDSPTVAYSVLVVAKVEKGKSKKLKSVKELLGITIMERSSFEKNPIDFLEAKGYKEVKKDLIIKLPKYSLFELENGRKRMLASAGELQKGNELALPSKYVNFLYLASHYEKLKGSPEDNEQKQLFVEQHKHYLDEIIEQISEFSKRVILADANLDKVLSAYNKHRDKPIREQAENIIHLFTLTNLGAPAAFKYFDTTIDRKRYTSTKEVLDATLIHQSITGLYETRIDLSQLGGDGGGGGGSGGVPWLMKKPLQLTVLVPLHEYQERLLQQTALPKEQKELLQKLFLKYDALWQHWENQVGHRRIKPHNIATGTLAPRPQKQYPINPKAKPSIQIVIDDLLKQGVLIQQNSTMNTPVYPVPKPDGKWRMVLDYREVNKTIPLIAAQNQHSAGILSSIYRGKYKTTLDLTNGFWAHPITPESYWLTAFTWQGKQYCWTRLPQGFLNSPALFNADVVDLLKEIPNVQAYVDDIYISHDDPQEHLEQLEKIFSILLNAGYVVSLKKSEIAQREVEFLGFNITKEGRGLTDTFKQKLLNITPPKDLKQLQSILGKLNFARNFIPNYSELVKPLYTIVAPANGKFISWTEDNSNQLQHIISVLNQADNLEERNPETRLIIKVNSSPSAGYIRYYNEGSKRPIMYVNYIFSKAEAKFTQTEKLLTTMHKGLIKAMDLAMGQEILVYSPIVSMTKIQRTPLPERKALPVRWITWMTYLEDPRIQFHYDKSLPELQQIPNVTEDVIAKTKHPSEFAMVFYTDGSAIKHPDVNKSHSAGMGIAQVQFIPEYKIVHQWSIPLGDHTAQLAEIAAVEFACKKALKISGPVLIVTDSFYVAESANKELPYWKSNGFLNNKKKPLRHVSKWKSIAECLQLKPDIIIMHEKGHQQPMTTLHTEGNNLADKLATQGSYVVHAGKRTADGSEFEKRTADGSEFESPKKKAKVE

SEQ ID NO: 453 - protein, 2084 aa, synthetic construct
  source 1..2084: note = Description of Artificial Sequence: Synthetic polypeptide
MPAAKRVKLDGGDKKYSIGLDIGTNSVGWAVITDEYKVPSKKFKVLGNTDRHSIKKNLIGALLFDSGETAEATRLKRTARRRYTRRKNRICYLQEIFSNEMAKVDDSFFHRLEESFLVEEDKKHERHPIFGNIVDEVAYHEKYPTIYHLRKKLVDSTDKADLRLIYLALAHMIKFRGHFLIEGDLNPDNSDVDKLFIQLVQTYNQLFEENPINASGVDAKAILSARLSKSRRLENLIAQLPGEKKNGLFGNLIALSLGLTPNFKSNFDLAEDAKLQLSKDTYDDDLDNLLAQIGDQYADLFLAAKNLSDAILLSDILRVNTEITKAPLSASMIKRYDEHHQDLTLLKALVRQQLPEKYKEIFFDQSKNGYAGYIDGGASQEEFYKFIKPILEKMDGTEELLVKLNREDLLRKQRTFDNGSIPHQIHLGELHAILRRQEDFYPFLKDNREKIEKILTFRIPYYVGPLARGNSRFAWMTRKSEETITPWNFEEVVDKGASAQSFIERMTNFDKNLPNEKVLPKHSLLYEYFTVYNELTKVKYVTEGMRKPAFLSGEQKKAIVDLLFKTNRKVTVKQLKEDYFKKIECFDSVEISGVEDRFNASLGTYHDLLKIIKDKDFLDNEENEDILEDIVLTLTLFEDREMIEERLKTYAHLFDDKVMKQLKRRRYTGWGRLSRKLINGIRDKQSGKTILDFLKSDGFANRNFMQLIHDDSLTFKEDIQKAQVSGQGDSLHEHIANLAGSPAIKKGILQTVKVVDELVKVMGRHKPENIVIEMARENQTTQKGQKNSRERMKRIEEGIKELGSQILKEHPVENTQLQNEKLYLYYLQNGRDMYVDQELDINRLSDYDVDHIVPQSFLKDDSIDNKVLTRSDKARGKSDNVPSEEVVKKMKNYWRQLLNAKLITQRKFDNLTKAERGGLSELDKAGFIKRQLVETRQITKHVAQILDSRMNTKYDENDKLIREVKVITLKSKLVSDFRKDFQFYKVREINNYHHAHDAYLNAVVGTALIKKYPKLESEFVYGDYKVYDVRKMIAKSEQEIGKATAKYFFYSNIMNFFKTEITLANGEIRKRPLIETNGETGEIVWDKGRDFATVRKVLSMPQVNIVKKTEVQTGGFSKESILPKRNSDKLIARKKDWDPKKYGGFDSPTVAYSVLVVAKVEKGKSKKLKSVKELLGITIMERSSFEKNPIDFLEAKGYKEVKKDLIIKLPKYSLFELENGRKRMLASAGELQKGNELALPSKYVNFLYLASHYEKLKGSPEDNEQKQLFVEQHKHYLDEIIEQISEFSKRVILADANLDKVLSAYNKHRDKPIREQAENIIHLFTLTNLGAPAAFKYFDTTIDRKRYTSTKEVLDATLIHQSITGLYETRIDLSQLGGDGGEAAAKPAPGGVPWLMKKPLQLTVLVPLHEYQERLLQQTALPKEQKELLQKLFLKYDALWQHWENQVGHRRIKPHNIATGTLAPRPQKQYPINPKAKPSIQIVIDDLLKQGVLIQQNSTMNTPVYPVPKPDGKWRMVLDYREVNKTIPLIAAQNQHSAGILSSIYRGKYKTTLDLTNGFWAHPITPESYWLTAFTWQGKQYCWTRLPQGFLNSPALFNADVVDLLKEIPNVQAYVDDIYISHDDPQEHLEQLEKIFSILLNAGYVVSLKKSEIAQREVEFLGFNITKEGRGLTDTFKQKLLNITPPKDLKQLQSILGKLNFARNFIPNYSELVKPLYTIVAPANGKFISWTEDNSNQLQHIISVLNQADNLEERNPETRLIIKVNSSPSAGYIRYYNEGSKRPIMYVNYIFSKAEAKFTQTEKLLTTMHKGLIKAMDLAMGQEILVYSPIVSMTKIQRTPLPERKALPVRWITWMTYLEDPRIQFHYDKSLPELQQIPNVTEDVIAKTKHPSEFAMVFYTDGSAIKHPDVNKSHSAGMGIAQVQFIPEYKIVHQWSIPLGDHTAQLAEIAAVEFACKKALKISGPVLIVTDSFYVAESANKELPYWKSNGFLNNKKKPLRHVSKWKSIAECLQLKPDIIIMHEKGHQQPMTTLHTEGNNLADKLATQGSYVVHAGKRTADGSEFEKRTADGSEFESPKKKAKVE

SEQ ID NO: 454 - protein, 2085 aa, synthetic construct
  source 1..2085: note = Description of Artificial Sequence: Synthetic polypeptide
MPAAKRVKLDGGDKKYSIGLDIGTNSVGWAVITDEYKVPSKKFKVLGNTDRHSIKKNLIGALLFDSGETAEATRLKRTARRRYTRRKNRICYLQEIFSNEMAKVDDSFFHRLEESFLVEEDKKHERHPIFGNIVDEVAYHEKYPTIYHLRKKLVDSTDKADLRLIYLALAHMIKFRGHFLIEGDLNPDNSDVDKLFIQLVQTYNQLFEENPINASGVDAKAILSARLSKSRRLENLIAQLPGEKKNGLFGNLIALSLGLTPNFKSNFDLAEDAKLQLSKDTYDDDLDNLLAQIGDQYADLFLAAKNLSDAILLSDILRVNTEITKAPLSASMIKRYDEHHQDLTLLKALVRQQLPEKYKEIFFDQSKNGYAGYIDGGASQEEFYKFIKPILEKMDGTEELLVKLNREDLLRKQRTFDNGSIPHQIHLGELHAILRRQEDFYPFLKDNREKIEKILTFRIPYYVGPLARGNSRFAWMTRKSEETITPWNFEEVVDKGASAQSFIERMTNFDKNLPNEKVLPKHSLLYEYFTVYNELTKVKYVTEGMRKPAFLSGEQKKAIVDLLFKTNRKVTVKQLKEDYFKKIECFDSVEISGVEDRFNASLGTYHDLLKIIKDKDFLDNEENEDILEDIVLTLTLFEDREMIEERLKTYAHLFDDKVMKQLKRRRYTGWGRLSRKLINGIRDKQSGKTILDFLKSDGFANRNFMQLIHDDSLTFKEDIQKAQVSGQGDSLHEHIANLAGSPAIKKGILQTVKVVDELVKVMGRHKPENIVIEMARENQTTQKGQKNSRERMKRIEEGIKELGSQILKEHPVENTQLQNEKLYLYYLQNGRDMYVDQELDINRLSDYDVDHIVPQSFLKDDSIDNKVLTRSDKARGKSDNVPSEEVVKKMKNYWRQLLNAKLITQRKFDNLTKAERGGLSELDKAGFIKRQLVETRQITKHVAQILDSRMNTKYDENDKLIREVKVITLKSKLVSDFRKDFQFYKVREINNYHHAHDAYLNAVVGTALIKKYPKLESEFVYGDYKVYDVRKMIAKSEQEIGKATAKYFFYSNIMNFFKTEITLANGEIRKRPLIETNGETGEIVWDKGRDFATVRKVLSMPQVNIVKKTEVQTGGFSKESILPKRNSDKLIARKKDWDPKKYGGFDSPTVAYSVLVVAKVEKGKSKKLKSVKELLGITIMERSSFEKNPIDFLEAKGYKEVKKDLIIKLPKYSLFELENGRKRMLASAGELQKGNELALPSKYVNFLYLASHYEKLKGSPEDNEQKQLFVEQHKHYLDEIIEQISEFSKRVILADANLDKVLSAYNKHRDKPIREQAENIIHLFTLTNLGAPAAFKYFDTTIDRKRYTSTKEVLDATLIHQSITGLYETRIDLSQLGGDGGGGGGSSGGSGGVPWLMKKPLQLTVLVPLHEYQERLLQQTALPKEQKELLQKLFLKYDALWQHWENQVGHRRIKPHNIATGTLAPRPQKQYPINPKAKPSIQIVIDDLLKQGVLIQQNSTMNTPVYPVPKPDGKWRMVLDYREVNKTIPLIAAQNQHSAGILSSIYRGKYKTTLDLTNGFWAHPITPESYWLTAFTWQGKQYCWTRLPQGFLNSPALFNADVVDLLKEIPNVQAYVDDIYISHDDPQEHLEQLEKIFSILLNAGYVVSLKKSEIAQREVEFLGFNITKEGRGLTDTFKQKLLNITPPKDLKQLQSILGKLNFARNFIPNYSELVKPLYTIVAPANGKFISWTEDNSNQLQHIISVLNQADNLEERNPETRLIIKVNSSPSAGYIRYYNEGSKRPIMYVNYIFSKAEAKFTQTEKLLTTMHKGLIKAMDLAMGQEILVYSPIVSMTKIQRTPLPERKALPVRWITWMTYLEDPRIQFHYDKSLPELQQIPNVTEDVIAKTKHPSEFAMVFYTDGSAIKHPDVNKSHSAGMGIAQVQFIPEYKIVHQWSIPLGDHTAQLAEIAAVEFACKKALKISGPVLIVTDSFYVAESANKELPYWKSNGFLNNKKKPLRHVSKWKSIAECLQLKPDIIIMHEKGHQQPMTTLHTEGNNLADKLATQGSYVVHAGKRTADGSEFEKRTADGSEFESPKKKAKVE

SEQ ID NO: 455 - protein, 2085 aa, synthetic construct
  source 1..2085: note = Description of Artificial Sequence: Synthetic polypeptide
MPAAKRVKLDGGDKKYSIGLDIGTNSVGWAVITDEYKVPSKKFKVLGNTDRHSIKKNLIGALLFDSGETAEATRLKRTARRRYTRRKNRICYLQEIFSNEMAKVDDSFFHRLEESFLVEEDKKHERHPIFGNIVDEVAYHEKYPTIYHLRKKLVDSTDKADLRLIYLALAHMIKFRGHFLIEGDLNPDNSDVDKLFIQLVQTYNQLFEENPINASGVDAKAILSARLSKSRRLENLIAQLPGEKKNGLFGNLIALSLGLTPNFKSNFDLAEDAKLQLSKDTYDDDLDNLLAQIGDQYADLFLAAKNLSDAILLSDILRVNTEITKAPLSASMIKRYDEHHQDLTLLKALVRQQLPEKYKEIFFDQSKNGYAGYIDGGASQEEFYKFIKPILEKMDGTEELLVKLNREDLLRKQRTFDNGSIPHQIHLGELHAILRRQEDFYPFLKDNREKIEKILTFRIPYYVGPLARGNSRFAWMTRKSEETITPWNFEEVVDKGASAQSFIERMTNFDKNLPNEKVLPKHSLLYEYFTVYNELTKVKYVTEGMRKPAFLSGEQKKAIVDLLFKTNRKVTVKQLKEDYFKKIECFDSVEISGVEDRFNASLGTYHDLLKIIKDKDFLDNEENEDILEDIVLTLTLFEDREMIEERLKTYAHLFDDKVMKQLKRRRYTGWGRLSRKLINGIRDKQSGKTILDFLKSDGFANRNFMQLIHDDSLTFKEDIQKAQVSGQGDSLHEHIANLAGSPAIKKGILQTVKVVDELVKVMGRHKPENIVIEMARENQTTQKGQKNSRERMKRIEEGIKELGSQILKEHPVENTQLQNEKLYLYYLQNGRDMYVDQELDINRLSDYDVDHIVPQSFLKDDSIDNKVLTRSDKARGKSDNVPSEEVVKKMKNYWRQLLNAKLITQRKFDNLTKAERGGLSELDKAGFIKRQLVETRQITKHVAQILDSRMNTKYDENDKLIREVKVITLKSKLVSDFRKDFQFYKVREINNYHHAHDAYLNAVVGTALIKKYPKLESEFVYGDYKVYDVRKMIAKSEQEIGKATAKYFFYSNIMNFFKTEITLANGEIRKRPLIETNGETGEIVWDKGRDFATVRKVLSMPQVNIVKKTEVQTGGFSKESILPKRNSDKLIARKKDWDPKKYGGFDSPTVAYSVLVVAKVEKGKSKKLKSVKELLGITIMERSSFEKNPIDFLEAKGYKEVKKDLIIKLPKYSLFELENGRKRMLASAGELQKGNELALPSKYVNFLYLASHYEKLKGSPEDNEQKQLFVEQHKHYLDEIIEQISEFSKRVILADANLDKVLSAYNKHRDKPIREQAENIIHLFTLTNLGAPAAFKYFDTTIDRKRYTSTKEVLDATLIHQSITGLYETRIDLSQLGGDGGGSSPAPGGSGGVPWLMKKPLQLTVLVPLHEYQERLLQQTALPKEQKELLQKLFLKYDALWQHWENQVGHRRIKPHNIATGTLAPRPQKQYPINPKAKPSIQIVIDDLLKQGVLIQQNSTMNTPVYPVPKPDGKWRMVLDYREVNKTIPLIAAQNQHSAGILSSIYRGKYKTTLDLTNGFWAHPITPESYWLTAFTWQGKQYCWTRLPQGFLNSPALFNADVVDLLKEIPNVQAYVDDIYISHDDPQEHLEQLEKIFSILLNAGYVVSLKKSEIAQREVEFLGFNITKEGRGLTDTFKQKLLNITPPKDLKQLQSILGKLNFARNFIPNYSELVKPLYTIVAPANGKFISWTEDNSNQLQHIISVLNQADNLEERNPETRLIIKVNSSPSAGYIRYYNEGSKRPIMYVNYIFSKAEAKFTQTEKLLTTMHKGLIKAMDLAMGQEILVYSPIVSMTKIQRTPLPERKALPVRWITWMTYLEDPRIQFHYDKSLPELQQIPNVTEDVIAKTKHPSEFAMVFYTDGSAIKHPDVNKSHSAGMGIAQVQFIPEYKIVHQWSIPLGDHTAQLAEIAAVEFACKKALKISGPVLIVTDSFYVAESANKELPYWKSNGFLNNKKKPLRHVSKWKSIAECLQLKPDIIIMHEKGHQQPMTTLHTEGNNLADKLATQGSYVVHAGKRTADGSEFEKRTADGSEFESPKKKAKVE

SEQ ID NO: 456 - protein, 2085 aa, synthetic construct
  source 1..2085: note = Description of Artificial Sequence: Synthetic polypeptide
MPAAKRVKLDGGDKKYSIGLDIGTNSVGWAVITDEYKVPSKKFKVLGNTDRHSIKKNLIGALLFDSGETAEATRLKRTARRRYTRRKNRICYLQEIFSNEMAKVDDSFFHRLEESFLVEEDKKHERHPIFGNIVDEVAYHEKYPTIYHLRKKLVDSTDKADLRLIYLALAHMIKFRGHFLIEGDLNPDNSDVDKLFIQLVQTYNQLFEENPINASGVDAKAILSARLSKSRRLENLIAQLPGEKKNGLFGNLIALSLGLTPNFKSNFDLAEDAKLQLSKDTYDDDLDNLLAQIGDQYADLFLAAKNLSDAILLSDILRVNTEITKAPLSASMIKRYDEHHQDLTLLKALVRQQLPEKYKEIFFDQSKNGYAGYIDGGASQEEFYKFIKPILEKMDGTEELLVKLNREDLLRKQRTFDNGSIPHQIHLGELHAILRRQEDFYPFLKDNREKIEKILTFRIPYYVGPLARGNSRFAWMTRKSEETITPWNFEEVVDKGASAQSFIERMTNFDKNLPNEKVLPKHSLLYEYFTVYNELTKVKYVTEGMRKPAFLSGEQKKAIVDLLFKTNRKVTVKQLKEDYFKKIECFDSVEISGVEDRFNASLGTYHDLLKIIKDKDFLDNEENEDILEDIVLTLTLFEDREMIEERLKTYAHLFDDKVMKQLKRRRYTGWGRLSRKLINGIRDKQSGKTILDFLKSDGFANRNFMQLIHDDSLTFKEDIQKAQVSGQGDSLHEHIANLAGSPAIKKGILQTVKVVDELVKVMGRHKPENIVIEMARENQTTQKGQKNSRERMKRIEEGIKELGSQILKEHPVENTQLQNEKLYLYYLQNGRDMYVDQELDINRLSDYDVDHIVPQSFLKDDSIDNKVLTRSDKARGKSDNVPSEEVVKKMKNYWRQLLNAKLITQRKFDNLTKAERGGLSELDKAGFIKRQLVETRQITKHVAQILDSRMNTKYDENDKLIREVKVITLKSKLVSDFRKDFQFYKVREINNYHHAHDAYLNAVVGTALIKKYPKLESEFVYGDYKVYDVRKMIAKSEQEIGKATAKYFFYSNIMNFFKTEITLANGEIRKRPLIETNGETGEIVWDKGRDFATVRKVLSMPQVNIVKKTEVQTGGFSKESILPKRNSDKLIARKKDWDPKKYGGFDSPTVAYSVLVVAKVEKGKSKKLKSVKELLGITIMERSSFEKNPIDFLEAKGYKEVKKDLIIKLPKYSLFELENGRKRMLASAGELQKGNELALPSKYVNFLYLASHYEKLKGSPEDNEQKQLFVEQHKHYLDEIIEQISEFSKRVILADANLDKVLSAYNKHRDKPIREQAENIIHLFTLTNLGAPAAFKYFDTTIDRKRYTSTKEVLDATLIHQSITGLYETRIDLSQLGGDGGPAPGSSGGGGGVPWLMKKPLQLTVLVPLHEYQERLLQQTALPKEQKELLQKLFLKYDALWQHWENQVGHRRIKPHNIATGTLAPRPQKQYPINPKAKPSIQIVIDDLLKQGVLIQQNSTMNTPVYPVPKPDGKWRMVLDYREVNKTIPLIAAQNQHSAGILSSIYRGKYKTTLDLTNGFWAHPITPESYWLTAFTWQGKQYCWTRLPQGFLNSPALFNADVVDLLKEIPNVQAYVDDIYISHDDPQEHLEQLEKIFSILLNAGYVVSLKKSEIAQREVEFLGFNITKEGRGLTDTFKQKLLNITPPKDLKQLQSILGKLNFARNFIPNYSELVKPLYTIVAPANGKFISWTEDNSNQLQHIISVLNQADNLEERNPETRLIIKVNSSPSAGYIRYYNEGSKRPIMYVNYIFSKAEAKFTQTEKLLTTMHKGLIKAMDLAMGQEILVYSPIVSMTKIQRTPLPERKALPVRWITWMTYLEDPRIQFHYDKSLPELQQIPNVTEDVIAKTKHPSEFAMVFYTDGSAIKHPDVNKSHSAGMGIAQVQFIPEYKIVHQWSIPLGDHTAQLAEIAAVEFACKKALKISGPVLIVTDSFYVAESANKELPYWKSNGFLNNKKKPLRHVSKWKSIAECLQLKPDIIIMHEKGHQQPMTTLHTEGNNLADKLATQGSYVVHAGKRTADGSEFEKRTADGSEFESPKKKAKVE

SEQ ID NO: 457 - protein, 2082 aa, synthetic construct
  source 1..2082: note = Description of Artificial Sequence: Synthetic polypeptide
MPAAKRVKLDGGDKKYSIGLDIGTNSVGWAVITDEYKVPSKKFKVLGNTDRHSIKKNLIGALLFDSGETAEATRLKRTARRRYTRRKNRICYLQEIFSNEMAKVDDSFFHRLEESFLVEEDKKHERHPIFGNIVDEVAYHEKYPTIYHLRKKLVDSTDKADLRLIYLALAHMIKFRGHFLIEGDLNPDNSDVDKLFIQLVQTYNQLFEENPINASGVDAKAILSARLSKSRRLENLIAQLPGEKKNGLFGNLIALSLGLTPNFKSNFDLAEDAKLQLSKDTYDDDLDNLLAQIGDQYADLFLAAKNLSDAILLSDILRVNTEITKAPLSASMIKRYDEHHQDLTLLKALVRQQLPEKYKEIFFDQSKNGYAGYIDGGASQEEFYKFIKPILEKMDGTEELLVKLNREDLLRKQRTFDNGSIPHQIHLGELHAILRRQEDFYPFLKDNREKIEKILTFRIPYYVGPLARGNSRFAWMTRKSEETITPWNFEEVVDKGASAQSFIERMTNFDKNLPNEKVLPKHSLLYEYFTVYNELTKVKYVTEGMRKPAFLSGEQKKAIVDLLFKTNRKVTVKQLKEDYFKKIECFDSVEISGVEDRFNASLGTYHDLLKIIKDKDFLDNEENEDILEDIVLTLTLFEDREMIEERLKTYAHLFDDKVMKQLKRRRYTGWGRLSRKLINGIRDKQSGKTILDFLKSDGFANRNFMQLIHDDSLTFKEDIQKAQVSGQGDSLHEHIANLAGSPAIKKGILQTVKVVDELVKVMGRHKPENIVIEMARENQTTQKGQKNSRERMKRIEEGIKELGSQILKEHPVENTQLQNEKLYLYYLQNGRDMYVDQELDINRLSDYDVDHIVPQSFLKDDSIDNKVLTRSDKARGKSDNVPSEEVVKKMKNYWRQLLNAKLITQRKFDNLTKAERGGLSELDKAGFIKRQLVETRQITKHVAQILDSRMNTKYDENDKLIREVKVITLKSKLVSDFRKDFQFYKVREINNYHHAHDAYLNAVVGTALIKKYPKLESEFVYGDYKVYDVRKMIAKSEQEIGKATAKYFFYSNIMNFFKTEITLANGEIRKRPLIETNGETGEIVWDKGRDFATVRKVLSMPQVNIVKKTEVQTGGFSKESILPKRNSDKLIARKKDWDPKKYGGFDSPTVAYSVLVVAKVEKGKSKKLKSVKELLGITIMERSSFEKNPIDFLEAKGYKEVKKDLIIKLPKYSLFELENGRKRMLASAGELQKGNELALPSKYVNFLYLASHYEKLKGSPEDNEQKQLFVEQHKHYLDEIIEQISEFSKRVILADANLDKVLSAYNKHRDKPIREQAENIIHLFTLTNLGAPAAFKYFDTTIDRKRYTSTKEVLDATLIHQSITGLYETRIDLSQLGGDGGGGSGGSGGVPWLMKKPLQLTVLVPLHEYQERLLQQTALPKEQKELLQKLFLKYDALWQHWENQVGHRRIKPHNIATGTLAPRPQKQYPINPKAKPSIQIVIDDLLKQGVLIQQNSTMNTPVYPVPKPDGKWRMVLDYREVNKTIPLIAAQNQHSAGILSSIYRGKYKTTLDLTNGFWAHPITPESYWLTAFTWQGKQYCWTRLPQGFLNSPALFNADVVDLLKEIPNVQAYVDDIYISHDDPQEHLEQLEKIFSILLNAGYVVSLKKSEIAQREVEFLGFNITKEGRGLTDTFKQKLLNITPPKDLKQLQSILGKLNFARNFIPNYSELVKPLYTIVAPANGKFISWTEDNSNQLQHIISVLNQADNLEERNPETRLIIKVNSSPSAGYIRYYNEGSKRPIMYVNYIFSKAEAKFTQTEKLLTTMHKGLIKAMDLAMGQEILVYSPIVSMTKIQRTPLPERKALPVRWITWMTYLEDPRIQFHYDKSLPELQQIPNVTEDVIAKTKHPSEFAMVFYTDGSAIKHPDVNKSHSAGMGIAQVQFIPEYKIVHQWSIPLGDHTAQLAEIAAVEFACKKALKISGPVLIVTDSFYVAESANKELPYWKSNGFLNNKKKPLRHVSKWKSIAECLQLKPDIIIMHEKGHQQPMTTLHTEGNNLADKLATQGSYVVHAGKRTADGSEFEKRTADGSEFESPKKKAKVE

SEQ ID NO: 458 - protein, 2087 aa, synthetic construct
  source 1..2087: note = Description of Artificial Sequence: Synthetic polypeptide
MPAAKRVKLDGGDKKYSIGLDIGTNSVGWAVITDEYKVPSKKFKVLGNTDRHSIKKNLIGALLFDSGETAEATRLKRTARRRYTRRKNRICYLQEIFSNEMAKVDDSFFHRLEESFLVEEDKKHERHPIFGNIVDEVAYHEKYPTIYHLRKKLVDSTDKADLRLIYLALAHMIKFRGHFLIEGDLNPDNSDVDKLFIQLVQTYNQLFEENPINASGVDAKAILSARLSKSRRLENLIAQLPGEKKNGLFGNLIALSLGLTPNFKSNFDLAEDAKLQLSKDTYDDDLDNLLAQIGDQYADLFLAAKNLSDAILLSDILRVNTEITKAPLSASMIKRYDEHHQDLTLLKALVRQQLPEKYKEIFFDQSKNGYAGYIDGGASQEEFYKFIKPILEKMDGTEELLVKLNREDLLRKQRTFDNGSIPHQIHLGELHAILRRQEDFYPFLKDNREKIEKILTFRIPYYVGPLARGNSRFAWMTRKSEETITPWNFEEVVDKGASAQSFIERMTNFDKNLPNEKVLPKHSLLYEYFTVYNELTKVKYVTEGMRKPAFLSGEQKKAIVDLLFKTNRKVTVKQLKEDYFKKIECFDSVEISGVEDRFNASLGTYHDLLKIIKDKDFLDNEENEDILEDIVLTLTLFEDREMIEERLKTYAHLFDDKVMKQLKRRRYTGWGRLSRKLINGIRDKQSGKTILDFLKSDGFANRNFMQLIHDDSLTFKEDIQKAQVSGQGDSLHEHIANLAGSPAIKKGILQTVKVVDELVKVMGRHKPENIVIEMARENQTTQKGQKNSRERMKRIEEGIKELGSQILKEHPVENTQLQNEKLYLYYLQNGRDMYVDQELDINRLSDYDVDHIVPQSFLKDDSIDNKVLTRSDKARGKSDNVPSEEVVKKMKNYWRQLLNAKLITQRKFDNLTKAERGGLSELDKAGFIKRQLVETRQITKHVAQILDSRMNTKYDENDKLIREVKVITLKSKLVSDFRKDFQFYKVREINNYHHAHDAYLNAVVGTALIKKYPKLESEFVYGDYKVYDVRKMIAKSEQEIGKATAKYFFYSNIMNFFKTEITLANGEIRKRPLIETNGETGEIVWDKGRDFATVRKVLSMPQVNIVKKTEVQTGGFSKESILPKRNSDKLIARKKDWDPKKYGGFDSPTVAYSVLVVAKVEKGKSKKLKSVKELLGITIMERSSFEKNPIDFLEAKGYKEVKKDLIIKLPKYSLFELENGRKRMLASAGELQKGNELALPSKYVNFLYLASHYEKLKGSPEDNEQKQLFVEQHKHYLDEIIEQISEFSKRVILADANLDKVLSAYNKHRDKPIREQAENIIHLFTLTNLGAPAAFKYFDTTIDRKRYTSTKEVLDATLIHQSITGLYETRIDLSQLGGDGGGGGEAAAKGSSGGVPWLMKKPLQLTVLVPLHEYQERLLQQTALPKEQKELLQKLFLKYDALWQHWENQVGHRRIKPHNIATGTLAPRPQKQYPINPKAKPSIQIVIDDLLKQGVLIQQNSTMNTPVYPVPKPDGKWRMVLDYREVNKTIPLIAAQNQHSAGILSSIYRGKYKTTLDLTNGFWAHPITPESYWLTAFTWQGKQYCWTRLPQGFLNSPALFNADVVDLLKEIPNVQAYVDDIYISHDDPQEHLEQLEKIFSILLNAGYVVSLKKSEIAQREVEFLGFNITKEGRGLTDTFKQKLLNITPPKDLKQLQSILGKLNFARNFIPNYSELVKPLYTIVAPANGKFISWTEDNSNQLQHIISVLNQADNLEERNPETRLIIKVNSSPSAGYIRYYNEGSKRPIMYVNYIFSKAEAKFTQTEKLLTTMHKGLIKAMDLAMGQEILVYSPIVSMTKIQRTPLPERKALPVRWITWMTYLEDPRIQFHYDKSLPELQQIPNVTEDVIAKTKHPSEFAMVFYTDGSAIKHPDVNKSHSAGMGIAQVQFIPEYKIVHQWSIPLGDHTAQLAEIAAVEFACKKALKISGPVLIVTDSFYVAESANKELPYWKSNGFLNNKKKPLRHVSKWKSIAECLQLKPDIIIMHEKGHQQPMTTLHTEGNNLADKLATQGSYVVHAGKRTADGSEFEKRTADGSEFESPKKKAKVE

SEQ ID NO: 459 - protein, 2087 aa, synthetic construct
  source 1..2087: note = Description of Artificial Sequence: Synthetic polypeptide
MPAAKRVKLDGGDKKYSIGLDIGTNSVGWAVITDEYKVPSKKFKVLGNTDRHSIKKNLIGALLFDSGETAEATRLKRTARRRYTRRKNRICYLQEIFSNEMAKVDDSFFHRLEESFLVEEDKKHERHPIFGNIVDEVAYHEKYPTIYHLRKKLVDSTDKADLRLIYLALAHMIKFRGHFLIEGDLNPDNSDVDKLFIQLVQTYNQLFEENPINASGVDAKAILSARLSKSRRLENLIAQLPGEKKNGLFGNLIALSLGLTPNFKSNFDLAEDAKLQLSKDTYDDDLDNLLAQIGDQYADLFLAAKNLSDAILLSDILRVNTEITKAPLSASMIKRYDEHHQDLTLLKALVRQQLPEKYKEIFFDQSKNGYAGYIDGGASQEEFYKFIKPILEKMDGTEELLVKLNREDLLRKQRTFDNGSIPHQIHLGELHAILRRQEDFYPFLKDNREKIEKILTFRIPYYVGPLARGNSRFAWMTRKSEETITPWNFEEVVDKGASAQSFIERMTNFDKNLPNEKVLPKHSLLYEYFTVYNELTKVKYVTEGMRKPAFLSGEQKKAIVDLLFKTNRKVTVKQLKEDYFKKIECFDSVEISGVEDRFNASLGTYHDLLKIIKDKDFLDNEENEDILEDIVLTLTLFEDREMIEERLKTYAHLFDDKVMKQLKRRRYTGWGRLSRKLINGIRDKQSGKTILDFLKSDGFANRNFMQLIHDDSLTFKEDIQKAQVSGQGDSLHEHIANLAGSPAIKKGILQTVKVVDELVKVMGRHKPENIVIEMARENQTTQKGQKNSRERMKRIEEGIKELGSQILKEHPVENTQLQNEKLYLYYLQNGRDMYVDQELDINRLSDYDVDHIVPQSFLKDDSIDNKVLTRSDKARGKSDNVPSEEVVKKMKNYWRQLLNAKLITQRKFDNLTKAERGGLSELDKAGFIKRQLVETRQITKHVAQILDSRMNTKYDENDKLIREVKVITLKSKLVSDFRKDFQFYKVREINNYHHAHDAYLNAVVGTALIKKYPKLESEFVYGDYKVYDVRKMIAKSEQEIGKATAKYFFYSNIMNFFKTEITLANGEIRKRPLIETNGETGEIVWDKGRDFATVRKVLSMPQVNIVKKTEVQTGGFSKESILPKRNSDKLIARKKDWDPKKYGGFDSPTVAYSVLVVAKVEKGKSKKLKSVKELLGITIMERSSFEKNPIDFLEAKGYKEVKKDLIIKLPKYSLFELENGRKRMLASAGELQKGNELALPSKYVNFLYLASHYEKLKGSPEDNEQKQLFVEQHKHYLDEIIEQISEFSKRVILADANLDKVLSAYNKHRDKPIREQAENIIHLFTLTNLGAPAAFKYFDTTIDRKRYTSTKEVLDATLIHQSITGLYETRIDLSQLGGDGGGGSGGGEAAAKGGVPWLMKKPLQLTVLVPLHEYQERLLQQTALPKEQKELLQKLFLKYDALWQHWENQVGHRRIKPHNIATGTLAPRPQKQYPINPKAKPSIQIVIDDLLKQGVLIQQNSTMNTPVYPVPKPDGKWRMVLDYREVNKTIPLIAAQNQHSAGILSSIYRGKYKTTLDLTNGFWAHPITPESYWLTAFTWQGKQYCWTRLPQGFLNSPALFNADVVDLLKEIPNVQAYVDDIYISHDDPQEHLEQLEKIFSILLNAGYVVSLKKSEIAQREVEFLGFNITKEGRGLTDTFKQKLLNITPPKDLKQLQSILGKLNFARNFIPNYSELVKPLYTIVAPANGKFISWTEDNSNQLQHIISVLNQADNLEERNPETRLIIKVNSSPSAGYIRYYNEGSKRPIMYVNYIFSKAEAKFTQTEKLLTTMHKGLIKAMDLAMGQEILVYSPIVSMTKIQRTPLPERKALPVRWITWMTYLEDPRIQFHYDKSLPELQQIPNVTEDVIAKTKHPSEFAMVFYTDGSAIKHPDVNKSHSAGMGIAQVQFIPEYKIVHQWSIPLGDHTAQLAEIAAVEFACKKALKISGPVLIVTDSFYVAESANKELPYWKSNGFLNNKKKPLRHVSKWKSIAECLQLKPDIIIMHEKGHQQPMTTLHTEGNNLADKLATQGSYVVHAGKRTADGSEFEKRTADGSEFESPKKKAKVE

SEQ ID NO: 460 - protein, 2185 aa, synthetic construct
  source 1..2185: note = Description of Artificial Sequence: Synthetic polypeptide
MPAAKRVKLDGGDKKYSIGLDIGTNSVGWAVITDEYKVPSKKFKVLGNTDRHSIKKNLIGALLFDSGETAEATRLKRTARRRYTRRKNRICYLQEIFSNEMAKVDDSFFHRLEESFLVEEDKKHERHPIFGNIVDEVAYHEKYPTIYHLRKKLVDSTDKADLRLIYLALAHMIKFRGHFLIEGDLNPDNSDVDKLFIQLVQTYNQLFEENPINASGVDAKAILSARLSKSRRLENLIAQLPGEKKNGLFGNLIALSLGLTPNFKSNFDLAEDAKLQLSKDTYDDDLDNLLAQIGDQYADLFLAAKNLSDAILLSDILRVNTEITKAPLSASMIKRYDEHHQDLTLLKALVRQQLPEKYKEIFFDQSKNGYAGYIDGGASQEEFYKFIKPILEKMDGTEELLVKLNREDLLRKQRTFDNGSIPHQIHLGELHAILRRQEDFYPFLKDNREKIEKILTFRIPYYVGPLARGNSRFAWMTRKSEETITPWNFEEVVDKGASAQSFIERMTNFDKNLPNEKVLPKHSLLYEYFTVYNELTKVKYVTEGMRKPAFLSGEQKKAIVDLLFKTNRKVTVKQLKEDYFKKIECFDSVEISGVEDRFNASLGTYHDLLKIIKDKDFLDNEENEDILEDIVLTLTLFEDREMIEERLKTYAHLFDDKVMKQLKRRRYTGWGRLSRKLINGIRDKQSGKTILDFLKSDGFANRNFMQLIHDDSLTFKEDIQKAQVSGQGDSLHEHIANLAGSPAIKKGILQTVKVVDELVKVMGRHKPENIVIEMARENQTTQKGQKNSRERMKRIEEGIKELGSQILKEHPVENTQLQNEKLYLYYLQNGRDMYVDQELDINRLSDYDVDHIVPQSFLKDDSIDNKVLTRSDKARGKSDNVPSEEVVKKMKNYWRQLLNAKLITQRKFDNLTKAERGGLSELDKAGFIKRQLVETRQITKHVAQILDSRMNTKYDENDKLIREVKVITLKSKLVSDFRKDFQFYKVREINNYHHAHDAYLNAVVGTALIKKYPKLESEFVYGDYKVYDVRKMIAKSEQEIGKATAKYFFYSNIMNFFKTEITLANGEIRKRPLIETNGETGEIVWDKGRDFATVRKVLSMPQVNIVKKTEVQTGGFSKESILPKRNSDKLIARKKDWDPKKYGGFDSPTVAYSVLVVAKVEKGKSKKLKSVKELLGITIMERSSFEKNPIDFLEAKGYKEVKKDLIIKLPKYSLFELENGRKRMLASAGELQKGNELALPSKYVNFLYLASHYEKLKGSPEDNEQKQLFVEQHKHYLDEIIEQISEFSKRVILADANLDKVLSAYNKHRDKPIREQAENIIHLFTLTNLGAPAAFKYFDTTIDRKRYTSTKEVLDATLIHQSITGLYETRIDLSQLGGDGGGGGGSGGGGSGGGGSGGGGSGGMDPLQLLQPLEAEIKGTKLKAHWNSGATITCVPEAFLEDERPIQTMLIKTIHGEKQQDVYYLTFKVQGRKVEAEVLASPYDYILLNPSDVPWLMKKPLQLTVLVPLHEYQERLLQQTALPKEQKELLQKLFLKYDALWQHWENQVGHRRIKPHNIATGTLAPRPQKQYPINPKAKPSIQIVIDDLLKQGVLIQQNSTMNTPVYPVPKPDGKWRMVLDYREVNKTIPLIAAQNQHSAGILSSIYRGKYKTTLDLTNGFWAHPITPESYWLTAFTWQGKQYCWTRLPQGFLNSPALFNADVVDLLKEIPNVQAYVDDIYISHDDPQEHLEQLEKIFSILLNAGYVVSLKKSEIAQREVEFLGFNITKEGRGLTDTFKQKLLNITPPKDLKQLQSILGLLNFARNFIPNYSELVKPLYTIVAPANGKFISWTEDNSNQLQHIISVLNQADNLEERNPETRLIIKVNSSPSAGYIRYYNEGSKRPIMYVNYIFSKAEAKFTQTEKLLTTMHKGLIKAMDLAMGQEILVYSPIVSMTKIQRTPLPERKALPVRWITWMTYLEDPRIQFHYDKSLPELQQIPNVTEDVIAKTKHPSEFAMVFYTDGSAIKHPDVNKSHSAGMGIAQVQFIPEYKIVHQWSIPLGDHTAQLAEIAAVEFACKKALKISGPVLIVTDSFYVAESANKELPYWKSNGFLNNKKKPLRHVSKWKSIAECLQLKPDIIIMHEKGHQQPMTTLHTEGNNLADKLATQGSYVVHAGKRTADGSEFEKRTADGSEFESPKKKAKVE

SEQ ID NO: 461 - protein, 2180 aa, synthetic construct
  source 1..2180: note = Description of Artificial Sequence: Synthetic polypeptide
MPAAKRVKLDGGDKKYSIGLDIGTNSVGWAVITDEYKVPSKKFKVLGNTDRHSIKKNLIGALLFDSGETAEATRLKRTARRRYTRRKNRICYLQEIFSNEMAKVDDSFFHRLEESFLVEEDKKHERHPIFGNIVDEVAYHEKYPTIYHLRKKLVDSTDKADLRLIYLALAHMIKFRGHFLIEGDLNPDNSDVDKLFIQLVQTYNQLFEENPINASGVDAKAILSARLSKSRRLENLIAQLPGEKKNGLFGNLIALSLGLTPNFKSNFDLAEDAKLQLSKDTYDDDLDNLLAQIGDQYADLFLAAKNLSDAILLSDILRVNTEITKAPLSASMIKRYDEHHQDLTLLKALVRQQLPEKYKEIFFDQSKNGYAGYIDGGASQEEFYKFIKPILEKMDGTEELLVKLNREDLLRKQRTFDNGSIPHQIHLGELHAILRRQEDFYPFLKDNREKIEKILTFRIPYYVGPLARGNSRFAWMTRKSEETITPWNFEEVVDKGASAQSFIERMTNFDKNLPNEKVLPKHSLLYEYFTVYNELTKVKYVTEGMRKPAFLSGEQKKAIVDLLFKTNRKVTVKQLKEDYFKKIECFDSVEISGVEDRFNASLGTYHDLLKIIKDKDFLDNEENEDILEDIVLTLTLFEDREMIEERLKTYAHLFDDKVMKQLKRRRYTGWGRLSRKLINGIRDKQSGKTILDFLKSDGFANRNFMQLIHDDSLTFKEDIQKAQVSGQGDSLHEHIANLAGSPAIKKGILQTVKVVDELVKVMGRHKPENIVIEMARENQTTQKGQKNSRERMKRIEEGIKELGSQILKEHPVENTQLQNEKLYLYYLQNGRDMYVDQELDINRLSDYDVDHIVPQSFLKDDSIDNKVLTRSDKARGKSDNVPSEEVVKKMKNYWRQLLNAKLITQRKFDNLTKAERGGLSELDKAGFIKRQLVETRQITKHVAQILDSRMNTKYDENDKLIREVKVITLKSKLVSDFRKDFQFYKVREINNYHHAHDAYLNAVVGTALIKKYPKLESEFVYGDYKVYDVRKMIAKSEQEIGKATAKYFFYSNIMNFFKTEITLANGEIRKRPLIETNGETGEIVWDKGRDFATVRKVLSMPQVNIVKKTEVQTGGFSKESILPKRNSDKLIARKKDWDPKKYGGFDSPTVAYSVLVVAKVEKGKSKKLKSVKELLGITIMERSSFEKNPIDFLEAKGYKEVKKDLIIKLPKYSLFELENGRKRMLASAGELQKGNELALPSKYVNFLYLASHYEKLKGSPEDNEQKQLFVEQHKHYLDEIIEQISEFSKRVILADANLDKVLSAYNKHRDKPIREQAENIIHLFTLTNLGAPAAFKYFDTTIDRKRYTSTKEVLDATLIHQSITGLYETRIDLSQLGGDGGGSSGSSGSSGSSGSSGGMDPLQLLQPLEAEIKGTKLKAHWNSGATITCVPEAFLEDERPIQTMLIKTIHGEKQQDVYYLTFKVQGRKVEAEVLASPYDYILLNPSDVPWLMKKPLQLTVLVPLHEYQERLLQQTALPKEQKELLQKLFLKYDALWQHWENQVGHRRIKPHNIATGTLAPRPQKQYPINPKAKPSIQIVIDDLLKQGVLIQQNSTMNTPVYPVPKPDGKWRMVLDYREVNKTIPLIAAQNQHSAGILSSIYRGKYKTTLDLTNGFWAHPITPESYWLTAFTWQGKQYCWTRLPQGFLNSPALFNADVVDLLKEIPNVQAYVDDIYISHDDPQEHLEQLEKIFSILLNAGYVVSLKKSEIAQREVEFLGFNITKEGRGLTDTFKQKLLNITPPKDLKQLQSILGLLNFARNFIPNYSELVKPLYTIVAPANGKFISWTEDNSNQLQHIISVLNQADNLEERNPETRLIIKVNSSPSAGYIRYYNEGSKRPIMYVNYIFSKAEAKFTQTEKLLTTMHKGLIKAMDLAMGQEILVYSPIVSMTKIQRTPLPERKALPVRWITWMTYLEDPRIQFHYDKSLPELQQIPNVTEDVIAKTKHPSEFAMVFYTDGSAIKHPDVNKSHSAGMGIAQVQFIPEYKIVHQWSIPLGDHTAQLAEIAAVEFACKKALKISGPVLIVTDSFYVAESANKELPYWKSNGFLNNKKKPLRHVSKWKSIAECLQLKPDIIIMHEKGHQQPMTTLHTEGNNLADKLATQGSYVVHAGKRTADGSEFEKRTADGSEFESPKKKAKVE

SEQ ID NO: 462 - protein, 2176 aa, synthetic construct
  source 1..2176: note = Description of Artificial Sequence: Synthetic polypeptide
MPAAKRVKLDGGDKKYSIGLDIGTNSVGWAVITDEYKVPSKKFKVLGNTDRHSIKKNLIGALLFDSGETAEATRLKRTARRRYTRRKNRICYLQEIFSNEMAKVDDSFFHRLEESFLVEEDKKHERHPIFGNIVDEVAYHEKYPTIYHLRKKLVDSTDKADLRLIYLALAHMIKFRGHFLIEGDLNPDNSDVDKLFIQLVQTYNQLFEENPINASGVDAKAILSARLSKSRRLENLIAQLPGEKKNGLFGNLIALSLGLTPNFKSNFDLAEDAKLQLSKDTYDDDLDNLLAQIGDQYADLFLAAKNLSDAILLSDILRVNTEITKAPLSASMIKRYDEHHQDLTLLKALVRQQLPEKYKEIFFDQSKNGYAGYIDGGASQEEFYKFIKPILEKMDGTEELLVKLNREDLLRKQRTFDNGSIPHQIHLGELHAILRRQEDFYPFLKDNREKIEKILTFRIPYYVGPLARGNSRFAWMTRKSEETITPWNFEEVVDKGASAQSFIERMTNFDKNLPNEKVLPKHSLLYEYFTVYNELTKVKYVTEGMRKPAFLSGEQKKAIVDLLFKTNRKVTVKQLKEDYFKKIECFDSVEISGVEDRFNASLGTYHDLLKIIKDKDFLDNEENEDILEDIVLTLTLFEDREMIEERLKTYAHLFDDKVMKQLKRRRYTGWGRLSRKLINGIRDKQSGKTILDFLKSDGFANRNFMQLIHDDSLTFKEDIQKAQVSGQGDSLHEHIANLAGSPAIKKGILQTVKVVDELVKVMGRHKPENIVIEMARENQTTQKGQKNSRERMKRIEEGIKELGSQILKEHPVENTQLQNEKLYLYYLQNGRDMYVDQELDINRLSDYDVDHIVPQSFLKDDSIDNKVLTRSDKARGKSDNVPSEEVVKKMKNYWRQLLNAKLITQRKFDNLTKAERGGLSELDKAGFIKRQLVETRQITKHVAQILDSRMNTKYDENDKLIREVKVITLKSKLVSDFRKDFQFYKVREINNYHHAHDAYLNAVVGTALIKKYPKLESEFVYGDYKVYDVRKMIAKSEQEIGKATAKYFFYSNIMNFFKTEITLANGEIRKRPLIETNGETGEIVWDKGRDFATVRKVLSMPQVNIVKKTEVQTGGFSKESILPKRNSDKLIARKKDWDPKKYGGFDSPTVAYSVLVVAKVEKGKSKKLKSVKELLGITIMERSSFEKNPIDFLEAKGYKEVKKDLIIKLPKYSLFELENGRKRMLASAGELQKGNELALPSKYVNFLYLASHYEKLKGSPEDNEQKQLFVEQHKHYLDEIIEQISEFSKRVILADANLDKVLSAYNKHRDKPIREQAENIIHLFTLTNLGAPAAFKYFDTTIDRKRYTSTKEVLDATLIHQSITGLYETRIDLSQLGGDGGGGGEAAAKGSSGGMDPLQLLQPLEAEIKGTKLKAHWNSGATITCVPEAFLEDERPIQTMLIKTIHGEKQQDVYYLTFKVQGRKVEAEVLASPYDYILLNPSDVPWLMKKPLQLTVLVPLHEYQERLLQQTALPKEQKELLQKLFLKYDALWQHWENQVGHRRIKPHNIATGTLAPRPQKQYPINPKAKPSIQIVIDDLLKQGVLIQQNSTMNTPVYPVPKPDGKWRMVLDYREVNKTIPLIAAQNQHSAGILSSIYRGKYKTTLDLTNGFWAHPITPESYWLTAFTWQGKQYCWTRLPQGFLNSPALFNADVVDLLKEIPNVQAYVDDIYISHDDPQEHLEQLEKIFSILLNAGYVVSLKKSEIAQREVEFLGFNITKEGRGLTDTFKQKLLNITPPKDLKQLQSILGLLNFARNFIPNYSELVKPLYTIVAPANGKFISWTEDNSNQLQHIISVLNQADNLEERNPETRLIIKVNSSPSAGYIRYYNEGSKRPIMYVNYIFSKAEAKFTQTEKLLTTMHKGLIKAMDLAMGQEILVYSPIVSMTKIQRTPLPERKALPVRWITWMTYLEDPRIQFHYDKSLPELQQIPNVTEDVIAKTKHPSEFAMVFYTDGSAIKHPDVNKSHSAGMGIAQVQFIPEYKIVHQWSIPLGDHTAQLAEIAAVEFACKKALKISGPVLIVTDSFYVAESANKELPYWKSNGFLNNKKKPLRHVSKWKSIAECLQLKPDIIIMHEKGHQQPMTTLHTEGNNLADKLATQGSYVVHAGKRTADGSEFEKRTADGSEFESPKKKAKVE

SEQ ID NO: 463 - protein, 2176 aa, synthetic construct
  source 1..2176: note = Description of Artificial Sequence: Synthetic polypeptide
MPAAKRVKLDGGDKKYSIGLDIGTNSVGWAVITDEYKVPSKKFKVLGNTDRHSIKKNLIGALLFDSGETAEATRLKRTARRRYTRRKNRICYLQEIFSNEMAKVDDSFFHRLEESFLVEEDKKHERHPIFGNIVDEVAYHEKYPTIYHLRKKLVDSTDKADLRLIYLALAHMIKFRGHFLIEGDLNPDNSDVDKLFIQLVQTYNQLFEENPINASGVDAKAILSARLSKSRRLENLIAQLPGEKKNGLFGNLIALSLGLTPNFKSNFDLAEDAKLQLSKDTYDDDLDNLLAQIGDQYADLFLAAKNLSDAILLSDILRVNTEITKAPLSASMIKRYDEHHQDLTLLKALVRQQLPEKYKEIFFDQSKNGYAGYIDGGASQEEFYKFIKPILEKMDGTEELLVKLNREDLLRKQRTFDNGSIPHQIHLGELHAILRRQEDFYPFLKDNREKIEKILTFRIPYYVGPLARGNSRFAWMTRKSEETITPWNFEEVVDKGASAQSFIERMTNFDKNLPNEKVLPKHSLLYEYFTVYNELTKVKYVTEGMRKPAFLSGEQKKAIVDLLFKTNRKVTVKQLKEDYFKKIECFDSVEISGVEDRFNASLGTYHDLLKIIKDKDFLDNEENEDILEDIVLTLTLFEDREMIEERLKTYAHLFDDKVMKQLKRRRYTGWGRLSRKLINGIRDKQSGKTILDFLKSDGFANRNFMQLIHDDSLTFKEDIQKAQVSGQGDSLHEHIANLAGSPAIKKGILQTVKVVDELVKVMGRHKPENIVIEMARENQTTQKGQKNSRERMKRIEEGIKELGSQILKEHPVENTQLQNEKLYLYYLQNGRDMYVDQELDINRLSDYDVDHIVPQSFLKDDSIDNKVLTRSDKARGKSDNVPSEEVVKKMKNYWRQLLNAKLITQRKFDNLTKAERGGLSELDKAGFIKRQLVETRQITKHVAQILDSRMNTKYDENDKLIREVKVITLKSKLVSDFRKDFQFYKVREINNYHHAHDAYLNAVVGTALIKKYPKLESEFVYGDYKVYDVRKMIAKSEQEIGKATAKYFFYSNIMNFFKTEITLANGEIRKRPLIETNGETGEIVWDKGRDFATVRKVLSMPQVNIVKKTEVQTGGFSKESILPKRNSDKLIARKKDWDPKKYGGFDSPTVAYSVLVVAKVEKGKSKKLKSVKELLGITIMERSSFEKNPIDFLEAKGYKEVKKDLIIKLPKYSLFELENGRKRMLASAGELQKGNELALPSKYVNFLYLASHYEKLKGSPEDNEQKQLFVEQHKHYLDEIIEQISEFSKRVILADANLDKVLSAYNKHRDKPIREQAENIIHLFTLTNLGAPAAFKYFDTTIDRKRYTSTKEVLDATLIHQSITGLYETRIDLSQLGGDGGGGGEAAAKPAPGGMDPLQLLQPLEAEIKGTKLKAHWNSGATITCVPEAFLEDERPIQTMLIKTIHGEKQQDVYYLTFKVQGRKVEAEVLASPYDYILLNPSDVPWLMKKPLQLTVLVPLHEYQERLLQQTALPKEQKELLQKLFLKYDALWQHWENQVGHRRIKPHNIATGTLAPRPQKQYPINPKAKPSIQIVIDDLLKQGVLIQQNSTMNTPVYPVPKPDGKWRMVLDYREVNKTIPLIAAQNQHSAGILSSIYRGKYKTTLDLTNGFWAHPITPESYWLTAFTWQGKQYCWTRLPQGFLNSPALFNADVVDLLKEIPNVQAYVDDIYISHDDPQEHLEQLEKIFSILLNAGYVVSLKKSEIAQREVEFLGFNITKEGRGLTDTFKQKLLNITPPKDLKQLQSILGLLNFARNFIPNYSELVKPLYTIVAPANGKFISWTEDNSNQLQHIISVLNQADNLEERNPETRLIIKVNSSPSAGYIRYYNEGSKRPIMYVNYIFSKAEAKFTQTEKLLTTMHKGLIKAMDLAMGQEILVYSPIVSMTKIQRTPLPERKALPVRWITWMTYLEDPRIQFHYDKSLPELQQIPNVTEDVIAKTKHPSEFAMVFYTDGSAIKHPDVNKSHSAGMGIAQVQFIPEYKIVHQWSIPLGDHTAQLAEIAAVEFACKKALKISGPVLIVTDSFYVAESANKELPYWKSNGFLNNKKKPLRHVSKWKSIAECLQLKPDIIIMHEKGHQQPMTTLHTEGNNLADKLATQGSYVVHAGKRTADGSEFEKRTADGSEFESPKKKAKVE

SEQ ID NO: 464 - protein, 2176 aa, synthetic construct
  source 1..2176: note = Description of Artificial Sequence: Synthetic polypeptide
MPAAKRVKLDGGDKKYSIGLDIGTNSVGWAVITDEYKVPSKKFKVLGNTDRHSIKKNLIGALLFDSGETAEATRLKRTARRRYTRRKNRICYLQEIFSNEMAKVDDSFFHRLEESFLVEEDKKHERHPIFGNIVDEVAYHEKYPTIYHLRKKLVDSTDKADLRLIYLALAHMIKFRGHFLIEGDLNPDNSDVDKLFIQLVQTYNQLFEENPINASGVDAKAILSARLSKSRRLENLIAQLPGEKKNGLFGNLIALSLGLTPNFKSNFDLAEDAKLQLSKDTYDDDLDNLLAQIGDQYADLFLAAKNLSDAILLSDILRVNTEITKAPLSASMIKRYDEHHQDLTLLKALVRQQLPEKYKEIFFDQSKNGYAGYIDGGASQEEFYKFIKPILEKMDGTEELLVKLNREDLLRKQRTFDNGSIPHQIHLGELHAILRRQEDFYPFLKDNREKIEKILTFRIPYYVGPLARGNSRFAWMTRKSEETITPWNFEEVVDKGASAQSFIERMTNFDKNLPNEKVLPKHSLLYEYFTVYNELTKVKYVTEGMRKPAFLSGEQKKAIVDLLFKTNRKVTVKQLKEDYFKKIECFDSVEISGVEDRFNASLGTYHDLLKIIKDKDFLDNEENEDILEDIVLTLTLFEDREMIEERLKTYAHLFDDKVMKQLKRRRYTGWGRLSRKLINGIRDKQSGKTILDFLKSDGFANRNFMQLIHDDSLTFKEDIQKAQVSGQGDSLHEHIANLAGSPAIKKGILQTVKVVDELVKVMGRHKPENIVIEMARENQTTQKGQKNSRERMKRIEEGIKELGSQILKEHPVENTQLQNEKLYLYYLQNGRDMYVDQELDINRLSDYDVDHIVPQSFLKDDSIDNKVLTRSDKARGKSDNVPSEEVVKKMKNYWRQLLNAKLITQRKFDNLTKAERGGLSELDKAGFIKRQLVETRQITKHVAQILDSRMNTKYDENDKLIREVKVITLKSKLVSDFRKDFQFYKVREINNYHHAHDAYLNAVVGTALIKKYPKLESEFVYGDYKVYDVRKMIAKSEQEIGKATAKYFFYSNIMNFFKTEITLANGEIRKRPLIETNGETGEIVWDKGRDFATVRKVLSMPQVNIVKKTEVQTGGFSKESILPKRNSDKLIARKKDWDPKKYGGFDSPTVAYSVLVVAKVEKGKSKKLKSVKELLGITIMERSSFEKNPIDFLEAKGYKEVKKDLIIKLPKYSLFELENGRKRMLASAGELQKGNELALPSKYVNFLYLASHYEKLKGSPEDNEQKQLFVEQHKHYLDEIIEQISEFSKRVILADANLDKVLSAYNKHRDKPIREQAENIIHLFTLTNLGAPAAFKYFDTTIDRKRYTSTKEVLDATLIHQSITGLYETRIDLSQLGGDGGGGSEAAAKPAPGGMDPLQLLQPLEAEIKGTKLKAHWNSGATITCVPEAFLEDERPIQTMLIKTIHGEKQQDVYYLTFKVQGRKVEAEVLASPYDYILLNPSDVPWLMKKPLQLTVLVPLHEYQERLLQQTALPKEQKELLQKLFLKYDALWQHWENQVGHRRIKPHNIATGTLAPRPQKQYPINPKAKPSIQIVIDDLLKQGVLIQQNSTMNTPVYPVPKPDGKWRMVLDYREVNKTIPLIAAQNQHSAGILSSIYRGKYKTTLDLTNGFWAHPITPESYWLTAFTWQGKQYCWTRLPQGFLNSPALFNADVVDLLKEIPNVQAYVDDIYISHDDPQEHLEQLEKIFSILLNAGYVVSLKKSEIAQREVEFLGFNITKEGRGLTDTFKQKLLNITPPKDLKQLQSILGLLNFARNFIPNYSELVKPLYTIVAPANGKFISWTEDNSNQLQHIISVLNQADNLEERNPETRLIIKVNSSPSAGYIRYYNEGSKRPIMYVNYIFSKAEAKFTQTEKLLTTMHKGLIKAMDLAMGQEILVYSPIVSMTKIQRTPLPERKALPVRWITWMTYLEDPRIQFHYDKSLPELQQIPNVTEDVIAKTKHPSEFAMVFYTDGSAIKHPDVNKSHSAGMGIAQVQFIPEYKIVHQWSIPLGDHTAQLAEIAAVEFACKKALKISGPVLIVTDSFYVAESANKELPYWKSNGFLNNKKKPLRHVSKWKSIAECLQLKPDIIIMHEKGHQQPMTTLHTEGNNLADKLATQGSYVVHAGKRTADGSEFEKRTADGSEFESPKKKAKVE

SEQ ID NO: 465 - protein, 2170 aa, synthetic construct
  source 1..2170: note = Description of Artificial Sequence: Synthetic polypeptide
MPAAKRVKLDGGDKKYSIGLDIGTNSVGWAVITDEYKVPSKKFKVLGNTDRHSIKKNLIGALLFDSGETAEATRLKRTARRRYTRRKNRICYLQEIFSNEMAKVDDSFFHRLEESFLVEEDKKHERHPIFGNIVDEVAYHEKYPTIYHLRKKLVDSTDKADLRLIYLALAHMIKFRGHFLIEGDLNPDNSDVDKLFIQLVQTYNQLFEENPINASGVDAKAILSARLSKSRRLENLIAQLPGEKKNGLFGNLIALSLGLTPNFKSNFDLAEDAKLQLSKDTYDDDLDNLLAQIGDQYADLFLAAKNLSDAILLSDILRVNTEITKAPLSASMIKRYDEHHQDLTLLKALVRQQLPEKYKEIFFDQSKNGYAGYIDGGASQEEFYKFIKPILEKMDGTEELLVKLNREDLLRKQRTFDNGSIPHQIHLGELHAILRRQEDFYPFLKDNREKIEKILTFRIPYYVGPLARGNSRFAWMTRKSEETITPWNFEEVVDKGASAQSFIERMTNFDKNLPNEKVLPKHSLLYEYFTVYNELTKVKYVTEGMRKPAFLSGEQKKAIVDLLFKTNRKVTVKQLKEDYFKKIECFDSVEISGVEDRFNASLGTYHDLLKIIKDKDFLDNEENEDILEDIVLTLTLFEDREMIEERLKTYAHLFDDKVMKQLKRRRYTGWGRLSRKLINGIRDKQSGKTILDFLKSDGFANRNFMQLIHDDSLTFKEDIQKAQVSGQGDSLHEHIANLAGSPAIKKGILQTVKVVDELVKVMGRHKPENIVIEMARENQTTQKGQKNSRERMKRIEEGIKELGSQILKEHPVENTQLQNEKLYLYYLQNGRDMYVDQELDINRLSDYDVDHIVPQSFLKDDSIDNKVLTRSDKARGKSDNVPSEEVVKKMKNYWRQLLNAKLITQRKFDNLTKAERGGLSELDKAGFIKRQLVETRQITKHVAQILDSRMNTKYDENDKLIREVKVITLKSKLVSDFRKDFQFYKVREINNYHHAHDAYLNAVVGTALIKKYPKLESEFVYGDYKVYDVRKMIAKSEQEIGKATAKYFFYSNIMNFFKTEITLANGEIRKRPLIETNGETGEIVWDKGRDFATVRKVLSMPQVNIVKKTEVQTGGFSKESILPKRNSDKLIARKKDWDPKKYGGFDSPTVAYSVLVVAKVEKGKSKKLKSVKELLGITIMERSSFEKNPIDFLEAKGYKEVKKDLIIKLPKYSLFELENGRKRMLASAGELQKGNELALPSKYVNFLYLASHYEKLKGSPEDNEQKQLFVEQHKHYLDEIIEQISEFSKRVILADANLDKVLSAYNKHRDKPIREQAENIIHLFTLTNLGAPAAFKYFDTTIDRKRYTSTKEVLDATLIHQSITGLYETRIDLSQLGGDGGEAAAKGGMDPLQLLQPLEAEIKGTKLKAHWNSGATITCVPEAFLEDERPIQTMLIKTIHGEKQQDVYYLTFKVQGRKVEAEVLASPYDYILLNPSDVPWLMKKPLQLTVLVPLHEYQERLLQQTALPKEQKELLQKLFLKYDALWQHWENQVGHRRIKPHNIATGTLAPRPQKQYPINPKAKPSIQIVIDDLLKQGVLIQQNSTMNTPVYPVPKPDGKWRMVLDYREVNKTIPLIAAQNQHSAGILSSIYRGKYKTTLDLTNGFWAHPITPESYWLTAFTWQGKQYCWTRLPQGFLNSPALFNADVVDLLKEIPNVQAYVDDIYISHDDPQEHLEQLEKIFSILLNAGYVVSLKKSEIAQREVEFLGFNITKEGRGLTDTFKQKLLNITPPKDLKQLQSILGLLNFARNFIPNYSELVKPLYTIVAPANGKFISWTEDNSNQLQHIISVLNQADNLEERNPETRLIIKVNSSPSAGYIRYYNEGSKRPIMYVNYIFSKAEAKFTQTEKLLTTMHKGLIKAMDLAMGQEILVYSPIVSMTKIQRTPLPERKALPVRWITWMTYLEDPRIQFHYDKSLPELQQIPNVTEDVIAKTKHPSEFAMVFYTDGSAIKHPDVNKSHSAGMGIAQVQFIPEYKIVHQWSIPLGDHTAQLAEIAAVEFACKKALKISGPVLIVTDSFYVAESANKELPYWKSNGFLNNKKKPLRHVSKWKSIAECLQLKPDIIIMHEKGHQQPMTTLHTEGNNLADKLATQGSYVVHAGKRTADGSEFEKRTADGSEFESPKKKAKVE

SEQ ID NO: 466 - protein, 2176 aa, synthetic construct
  source 1..2176: note = Description of Artificial Sequence: Synthetic polypeptide
MPAAKRVKLDGGDKKYSIGLDIGTNSVGWAVITDEYKVPSKKFKVLGNTDRHSIKKNLIGALLFDSGETAEATRLKRTARRRYTRRKNRICYLQEIFSNEMAKVDDSFFHRLEESFLVEEDKKHERHPIFGNIVDEVAYHEKYPTIYHLRKKLVDSTDKADLRLIYLALAHMIKFRGHFLIEGDLNPDNSDVDKLFIQLVQTYNQLFEENPINASGVDAKAILSARLSKSRRLENLIAQLPGEKKNGLFGNLIALSLGLTPNFKSNFDLAEDAKLQLSKDTYDDDLDNLLAQIGDQYADLFLAAKNLSDAILLSDILRVNTEITKAPLSASMIKRYDEHHQDLTLLKALVRQQLPEKYKEIFFDQSKNGYAGYIDGGASQEEFYKFIKPILEKMDGTEELLVKLNREDLLRKQRTFDNGSIPHQIHLGELHAILRRQEDFYPFLKDNREKIEKILTFRIPYYVGPLARGNSRFAWMTRKSEETITPWNFEEVVDKGASAQSFIERMTNFDKNLPNEKVLPKHSLLYEYFTVYNELTKVKYVTEGMRKPAFLSGEQKKAIVDLLFKTNRKVTVKQLKEDYFKKIECFDSVEISGVEDRFNASLGTYHDLLKIIKDKDFLDNEENEDILEDIVLTLTLFEDREMIEERLKTYAHLFDDKVMKQLKRRRYTGWGRLSRKLINGIRDKQSGKTILDFLKSDGFANRNFMQLIHDDSLTFKEDIQKAQVSGQGDSLHEHIANLAGSPAIKKGILQTVKVVDELVKVMGRHKPENIVIEMARENQTTQKGQKNSRERMKRIEEGIKELGSQILKEHPVENTQLQNEKLYLYYLQNGRDMYVDQELDINRLSDYDVDHIVPQSFLKDDSIDNKVLTRSDKARGKSDNVPSEEVVKKMKNYWRQLLNAKLITQRKFDNLTKAERGGLSELDKAGFIKRQLVETRQITKHVAQILDSRMNTKYDENDKLIREVKVITLKSKLVSDFRKDFQFYKVREINNYHHAHDAYLNAVVGTALIKKYPKLESEFVYGDYKVYDVRKMIAKSEQEIGKATAKYFFYSNIMNFFKTEITLANGEIRKRPLIETNGETGEIVWDKGRDFATVRKVLSMPQVNIVKKTEVQTGGFSKESILPKRNSDKLIARKKDWDPKKYGGFDSPTVAYSVLVVAKVEKGKSKKLKSVKELLGITIMERSSFEKNPIDFLEAKGYKEVKKDLIIKLPKYSLFELENGRKRMLASAGELQKGNELALPSKYVNFLYLASHYEKLKGSPEDNEQKQLFVEQHKHYLDEIIEQISEFSKRVILADANLDKVLSAYNKHRDKPIREQAENIIHLFTLTNLGAPAAFKYFDTTIDRKRYTSTKEVLDATLIHQSITGLYETRIDLSQLGGDGGGGSGSSEAAAKGGMDPLQLLQPLEAEIKGTKLKAHWNSGATITCVPEAFLEDERPIQTMLIKTIHGEKQQDVYYLTFKVQGRKVEAEVLASPYDYILLNPSDVPWLMKKPLQLTVLVPLHEYQERLLQQTALPKEQKELLQKLFLKYDALWQHWENQVGHRRIKPHNIATGTLAPRPQKQYPINPKAKPSIQIVIDDLLKQGVLIQQNSTMNTPVYPVPKPDGKWRMVLDYREVNKTIPLIAAQNQHSAGILSSIYRGKYKTTLDLTNGFWAHPITPESYWLTAFTWQGKQYCWTRLPQGFLNSPALFNADVVDLLKEIPNVQAYVDDIYISHDDPQEHLEQLEKIFSILLNAGYVVSLKKSEIAQREVEFLGFNITKEGRGLTDTFKQKLLNITPPKDLKQLQSILGLLNFARNFIPNYSELVKPLYTIVAPANGKFISWTEDNSNQLQHIISVLNQADNLEERNPETRLIIKVNSSPSAGYIRYYNEGSKRPIMYVNYIFSKAEAKFTQTEKLLTTMHKGLIKAMDLAMGQEILVYSPIVSMTKIQRTPLPERKALPVRWITWMTYLEDPRIQFHYDKSLPELQQIPNVTEDVIAKTKHPSEFAMVFYTDGSAIKHPDVNKSHSAGMGIAQVQFIPEYKIVHQWSIPLGDHTAQLAEIAAVEFACKKALKISGPVLIVTDSFYVAESANKELPYWKSNGFLNNKKKPLRHVSKWKSIAECLQLKPDIIIMHEKGHQQPMTTLHTEGNNLADKLATQGSYVVHAGKRTADGSEFEKRTADGSEFESPKKKAKVE

SEQ ID NO: 467 - protein, 2177 aa, synthetic construct
  source 1..2177: note = Description of Artificial Sequence: Synthetic polypeptide
MPAAKRVKLDGGDKKYSIGLDIGTNSVGWAVITDEYKVPSKKFKVLGNTDRHSIKKNLIGALLFDSGETAEATRLKRTARRRYTRRKNRICYLQEIFSNEMAKVDDSFFHRLEESFLVEEDKKHERHPIFGNIVDEVAYHEKYPTIYHLRKKLVDSTDKADLRLIYLALAHMIKFRGHFLIEGDLNPDNSDVDKLFIQLVQTYNQLFEENPINASGVDAKAILSARLSKSRRLENLIAQLPGEKKNGLFGNLIALSLGLTPNFKSNFDLAEDAKLQLSKDTYDDDLDNLLAQIGDQYADLFLAAKNLSDAILLSDILRVNTEITKAPLSASMIKRYDEHHQDLTLLKALVRQQLPEKYKEIFFDQSKNGYAGYIDGGASQEEFYKFIKPILEKMDGTEELLVKLNREDLLRKQRTFDNGSIPHQIHLGELHAILRRQEDFYPFLKDNREKIEKILTFRIPYYVGPLARGNSRFAWMTRKSEETITPWNFEEVVDKGASAQSFIERMTNFDKNLPNEKVLPKHSLLYEYFTVYNELTKVKYVTEGMRKPAFLSGEQKKAIVDLLFKTNRKVTVKQLKEDYFKKIECFDSVEISGVEDRFNASLGTYHDLLKIIKDKDFLDNEENEDILEDIVLTLTLFEDREMIEERLKTYAHLFDDKVMKQLKRRRYTGWGRLSRKLINGIRDKQSGKTILDFLKSDGFANRNFMQLIHDDSLTFKEDIQKAQVSGQGDSLHEHIANLAGSPAIKKGILQTVKVVDELVKVMGRHKPENIVIEMARENQTTQKGQKNSRERMKRIEEGIKELGSQILKEHPVENTQLQNEKLYLYYLQNGRDMYVDQELDINRLSDYDVDHIVPQSFLKDDSIDNKVLTRSDKARGKSDNVPSEEVVKKMKNYWRQLLNAKLITQRKFDNLTKAERGGLSELDKAGFIKRQLVETRQITKHVAQILDSRMNTKYDENDKLIREVKVITLKSKLVSDFRKDFQFYKVREINNYHHAHDAYLNAVVGTALIKKYPKLESEFVYGDYKVYDVRKMIAKSEQEIGKATAKYFFYSNIMNFFKTEITLANGEIRKRPLIETNGETGEIVWDKGRDFATVRKVLSMPQVNIVKKTEVQTGGFSKESILPKRNSDKLIARKKDWDPKKYGGFDSPTVAYSVLVVAKVEKGKSKKLKSVKELLGITIMERSSFEKNPIDFLEAKGYKEVKKDLIIKLPKYSLFELENGRKRMLASAGELQKGNELALPSKYVNFLYLASHYEKLKGSPEDNEQKQLFVEQHKHYLDEIIEQISEFSKRVILADANLDKVLSAYNKHRDKPIREQAENIIHLFTLTNLGAPAAFKYFDTTIDRKRYTSTKEVLDATLIHQSITGLYETRIDLSQLGGDGGGSSGSSGSSGSSGGMDPLQLLQPLEAEIKGTKLKAHWNSGATITCVPEAFLEDERPIQTMLIKTIHGEKQQDVYYLTFKVQGRKVEAEVLASPYDYILLNPSDVPWLMKKPLQLTVLVPLHEYQERLLQQTALPKEQKELLQKLFLKYDALWQHWENQVGHRRIKPHNIATGTLAPRPQKQYPINPKAKPSIQIVIDDLLKQGVLIQQNSTMNTPVYPVPKPDGKWRMVLDYREVNKTIPLIAAQNQHSAGILSSIYRGKYKTTLDLTNGFWAHPITPESYWLTAFTWQGKQYCWTRLPQGFLNSPALFNADVVDLLKEIPNVQAYVDDIYISHDDPQEHLEQLEKIFSILLNAGYVVSLKKSEIAQREVEFLGFNITKEGRGLTDTFKQKLLNITPPKDLKQLQSILGLLNFARNFIPNYSELVKPLYTIVAPANGKFISWTEDNSNQLQHIISVLNQADNLEERNPETRLIIKVNSSPSAGYIRYYNEGSKRPIMYVNYIFSKAEAKFTQTEKLLTTMHKGLIKAMDLAMGQEILVYSPIVSMTKIQRTPLPERKALPVRWITWMTYLEDPRIQFHYDKSLPELQQIPNVTEDVIAKTKHPSEFAMVFYTDGSAIKHPDVNKSHSAGMGIAQVQFIPEYKIVHQWSIPLGDHTAQLAEIAAVEFACKKALKISGPVLIVTDSFYVAESANKELPYWKSNGFLNNKKKPLRHVSKWKSIAECLQLKPDIIIMHEKGHQQPMTTLHTEGNNLADKLATQGSYVVHAGKRTADGSEFEKRTADGSEFESPKKKAKVE

SEQ ID NO: 468 - protein, 2177 aa, synthetic construct
  source 1..2177: note = Description of Artificial Sequence: Synthetic polypeptide
MPAAKRVKLDGGDKKYSIGLDIGTNSVGWAVITDEYKVPSKKFKVLGNTDRHSIKKNLIGALLFDSGETAEATRLKRTARRRYTRRKNRICYLQEIFSNEMAKVDDSFFHRLEESFLVEEDKKHERHPIFGNIVDEVAYHEKYPTIYHLRKKLVDSTDKADLRLIYLALAHMIKFRGHFLIEGDLNPDNSDVDKLFIQLVQTYNQLFEENPINASGVDAKAILSARLSKSRRLENLIAQLPGEKKNGLFGNLIALSLGLTPNFKSNFDLAEDAKLQLSKDTYDDDLDNLLAQIGDQYADLFLAAKNLSDAILLSDILRVNTEITKAPLSASMIKRYDEHHQDLTLLKALVRQQLPEKYKEIFFDQSKNGYAGYIDGGASQEEFYKFIKPILEKMDGTEELLVKLNREDLLRKQRTFDNGSIPHQIHLGELHAILRRQEDFYPFLKDNREKIEKILTFRIPYYVGPLARGNSRFAWMTRKSEETITPWNFEEVVDKGASAQSFIERMTNFDKNLPNEKVLPKHSLLYEYFTVYNELTKVKYVTEGMRKPAFLSGEQKKAIVDLLFKTNRKVTVKQLKEDYFKKIECFDSVEISGVEDRFNASLGTYHDLLKIIKDKDFLDNEENEDILEDIVLTLTLFEDREMIEERLKTYAHLFDDKVMKQLKRRRYTGWGRLSRKLINGIRDKQSGKTILDFLKSDGFANRNFMQLIHDDSLTFKEDIQKAQVSGQGDSLHEHIANLAGSPAIKKGILQTVKVVDELVKVMGRHKPENIVIEMARENQTTQKGQKNSRERMKRIEEGIKELGSQILKEHPVENTQLQNEKLYLYYLQNGRDMYVDQELDINRLSDYDVDHIVPQSFLKDDSIDNKVLTRSDKARGKSDNVPSEEVVKKMKNYWRQLLNAKLITQRKFDNLTKAERGGLSELDKAGFIKRQLVETRQITKHVAQILDSRMNTKYDENDKLIREVKVITLKSKLVSDFRKDFQFYKVREINNYHHAHDAYLNAVVGTALIKKYPKLESEFVYGDYKVYDVRKMIAKSEQEIGKATAKYFFYSNIMNFFKTEITLANGEIRKRPLIETNGETGEIVWDKGRDFATVRKVLSMPQVNIVKKTEVQTGGFSKESILPKRNSDKLIARKKDWDPKKYGGFDSPTVAYSVLVVAKVEKGKSKKLKSVKELLGITIMERSSFEKNPIDFLEAKGYKEVKKDLIIKLPKYSLFELENGRKRMLASAGELQKGNELALPSKYVNFLYLASHYEKLKGSPEDNEQKQLFVEQHKHYLDEIIEQISEFSKRVILADANLDKVLSAYNKHRDKPIREQAENIIHLFTLTNLGAPAAFKYFDTTIDRKRYTSTKEVLDATLIHQSITGLYETRIDLSQLGGDGGGSAGSAAGSGEFGGMDPLQLLQPLEAEIKGTKLKAHWNSGATITCVPEAFLEDERPIQTMLIKTIHGEKQQDVYYLTFKVQGRKVEAEVLASPYDYILLNPSDVPWLMKKPLQLTVLVPLHEYQERLLQQTALPKEQKELLQKLFLKYDALWQHWENQVGHRRIKPHNIATGTLAPRPQKQYPINPKAKPSIQIVIDDLLKQGVLIQQNSTMNTPVYPVPKPDGKWRMVLDYREVNKTIPLIAAQNQHSAGILSSIYRGKYKTTLDLTNGFWAHPITPESYWLTAFTWQGKQYCWTRLPQGFLNSPALFNADVVDLLKEIPNVQAYVDDIYISHDDPQEHLEQLEKIFSILLNAGYVVSLKKSEIAQREVEFLGFNITKEGRGLTDTFKQKLLNITPPKDLKQLQSILGLLNFARNFIPNYSELVKPLYTIVAPANGKFISWTEDNSNQLQHIISVLNQADNLEERNPETRLIIKVNSSPSAGYIRYYNEGSKRPIMYVNYIFSKAEAKFTQTEKLLTTMHKGLIKAMDLAMGQEILVYSPIVSMTKIQRTPLPERKALPVRWITWMTYLEDPRIQFHYDKSLPELQQIPNVTEDVIAKTKHPSEFAMVFYTDGSAIKHPDVNKSHSAGMGIAQVQFIPEYKIVHQWSIPLGDHTAQLAEIAAVEFACKKALKISGPVLIVTDSFYVAESANKELPYWKSNGFLNNKKKPLRHVSKWKSIAECLQLKPDIIIMHEKGHQQPMTTLHTEGNNLADKLATQGSYVVHAGKRTADGSEFEKRTADGSEFESPKKKAKVE

SEQ ID NO: 469 - protein, 2171 aa, synthetic construct
  source 1..2171: note = Description of Artificial Sequence: Synthetic polypeptide
MPAAKRVKLDGGDKKYSIGLDIGTNSVGWAVITDEYKVPSKKFKVLGNTDRHSIKKNLIGALLFDSGETAEATRLKRTARRRYTRRKNRICYLQEIFSNEMAKVDDSFFHRLEESFLVEEDKKHERHPIFGNIVDEVAYHEKYPTIYHLRKKLVDSTDKADLRLIYLALAHMIKFRGHFLIEGDLNPDNSDVDKLFIQLVQTYNQLFEENPINASGVDAKAILSARLSKSRRLENLIAQLPGEKKNGLFGNLIALSLGLTPNFKSNFDLAEDAKLQLSKDTYDDDLDNLLAQIGDQYADLFLAAKNLSDAILLSDILRVNTEITKAPLSASMIKRYDEHHQDLTLLKALVRQQLPEKYKEIFFDQSKNGYAGYIDGGASQEEFYKFIKPILEKMDGTEELLVKLNREDLLRKQRTFDNGSIPHQIHLGELHAILRRQEDFYPFLKDNREKIEKILTFRIPYYVGPLARGNSRFAWMTRKSEETITPWNFEEVVDKGASAQSFIERMTNFDKNLPNEKVLPKHSLLYEYFTVYNELTKVKYVTEGMRKPAFLSGEQKKAIVDLLFKTNRKVTVKQLKEDYFKKIECFDSVEISGVEDRFNASLGTYHDLLKIIKDKDFLDNEENEDILEDIVLTLTLFEDREMIEERLKTYAHLFDDKVMKQLKRRRYTGWGRLSRKLINGIRDKQSGKTILDFLKSDGFANRNFMQLIHDDSLTFKEDIQKAQVSGQGDSLHEHIANLAGSPAIKKGILQTVKVVDELVKVMGRHKPENIVIEMARENQTTQKGQKNSRERMKRIEEGIKELGSQILKEHPVENTQLQNEKLYLYYLQNGRDMYVDQELDINRLSDYDVDHIVPQSFLKDDSIDNKVLTRSDKARGKSDNVPSEEVVKKMKNYWRQLLNAKLITQRKFDNLTKAERGGLSELDKAGFIKRQLVETRQITKHVAQILDSRMNTKYDENDKLIREVKVITLKSKLVSDFRKDFQFYKVREINNYHHAHDAYLNAVVGTALIKKYPKLESEFVYGDYKVYDVRKMIAKSEQEIGKATAKYFFYSNIMNFFKTEITLANGEIRKRPLIETNGETGEIVWDKGRDFATVRKVLSMPQVNIVKKTEVQTGGFSKESILPKRNSDKLIARKKDWDPKKYGGFDSPTVAYSVLVVAKVEKGKSKKLKSVKELLGITIMERSSFEKNPIDFLEAKGYKEVKKDLIIKLPKYSLFELENGRKRMLASAGELQKGNELALPSKYVNFLYLASHYEKLKGSPEDNEQKQLFVEQHKHYLDEIIEQISEFSKRVILADANLDKVLSAYNKHRDKPIREQAENIIHLFTLTNLGAPAAFKYFDTTIDRKRYTSTKEVLDATLIHQSITGLYETRIDLSQLGGDGGGGSGGSGGMDPLQLLQPLEAEIKGTKLKAHWNSGATITCVPEAFLEDERPIQTMLIKTIHGEKQQDVYYLTFKVQGRKVEAEVLASPYDYILLNPSDVPWLMKKPLQLTVLVPLHEYQERLLQQTALPKEQKELLQKLFLKYDALWQHWENQVGHRRIKPHNIATGTLAPRPQKQYPINPKAKPSIQIVIDDLLKQGVLIQQNSTMNTPVYPVPKPDGKWRMVLDYREVNKTIPLIAAQNQHSAGILSSIYRGKYKTTLDLTNGFWAHPITPESYWLTAFTWQGKQYCWTRLPQGFLNSPALFNADVVDLLKEIPNVQAYVDDIYISHDDPQEHLEQLEKIFSILLNAGYVVSLKKSEIAQREVEFLGFNITKEGRGLTDTFKQKLLNITPPKDLKQLQSILGLLNFARNFIPNYSELVKPLYTIVAPANGKFISWTEDNSNQLQHIISVLNQADNLEERNPETRLIIKVNSSPSAGYIRYYNEGSKRPIMYVNYIFSKAEAKFTQTEKLLTTMHKGLIKAMDLAMGQEILVYSPIVSMTKIQRTPLPERKALPVRWITWMTYLEDPRIQFHYDKSLPELQQIPNVTEDVIAKTKHPSEFAMVFYTDGSAIKHPDVNKSHSAGMGIAQVQFIPEYKIVHQWSIPLGDHTAQLAEIAAVEFACKKALKISGPVLIVTDSFYVAESANKELPYWKSNGFLNNKKKPLRHVSKWKSIAECLQLKPDIIIMHEKGHQQPMTTLHTEGNNLADKLATQGSYVVHAGKRTADGSEFEKRTADGSEFESPKKKAKVE

SEQ ID NO: 470 - protein, 2176 aa, synthetic construct
  source 1..2176: note = Description of Artificial Sequence: Synthetic polypeptide
MPAAKRVKLDGGDKKYSIGLDIGTNSVGWAVITDEYKVPSKKFKVLGNTDRHSIKKNLIGALLFDSGETAEATRLKRTARRRYTRRKNRICYLQEIFSNEMAKVDDSFFHRLEESFLVEEDKKHERHPIFGNIVDEVAYHEKYPTIYHLRKKLVDSTDKADLRLIYLALAHMIKFRGHFLIEGDLNPDNSDVDKLFIQLVQTYNQLFEENPINASGVDAKAILSARLSKSRRLENLIAQLPGEKKNGLFGNLIALSLGLTPNFKSNFDLAEDAKLQLSKDTYDDDLDNLLAQIGDQYADLFLAAKNLSDAILLSDILRVNTEITKAPLSASMIKRYDEHHQDLTLLKALVRQQLPEKYKEIFFDQSKNGYAGYIDGGASQEEFYKFIKPILEKMDGTEELLVKLNREDLLRKQRTFDNGSIPHQIHLGELHAILRRQEDFYPFLKDNREKIEKILTFRIPYYVGPLARGNSRFAWMTRKSEETITPWNFEEVVDKGASAQSFIERMTNFDKNLPNEKVLPKHSLLYEYFTVYNELTKVKYVTEGMRKPAFLSGEQKKAIVDLLFKTNRKVTVKQLKEDYFKKIECFDSVEISGVEDRFNASLGTYHDLLKIIKDKDFLDNEENEDILEDIVLTLTLFEDREMIEERLKTYAHLFDDKVMKQLKRRRYTGWGRLSRKLINGIRDKQSGKTILDFLKSDGFANRNFMQLIHDDSLTFKEDIQKAQVSGQGDSLHEHIANLAGSPAIKKGILQTVKVVDELVKVMGRHKPENIVIEMARENQTTQKGQKNSRERMKRIEEGIKELGSQILKEHPVENTQLQNEKLYLYYLQNGRDMYVDQELDINRLSDYDVDHIVPQSFLKDDSIDNKVLTRSDKARGKSDNVPSEEVVKKMKNYWRQLLNAKLITQRKFDNLTKAERGGLSELDKAGFIKRQLVETRQITKHVAQILDSRMNTKYDENDKLIREVKVITLKSKLVSDFRKDFQFYKVREINNYHHAHDAYLNAVVGTALIKKYPKLESEFVYGDYKVYDVRKMIAKSEQEIGKATAKYFFYSNIMNFFKTEITLANGEIRKRPLIETNGETGEIVWDKGRDFATVRKVLSMPQVNIVKKTEVQTGGFSKESILPKRNSDKLIARKKDWDPKKYGGFDSPTVAYSVLVVAKVEKGKSKKLKSVKELLGITIMERSSFEKNPIDFLEAKGYKEVKKDLIIKLPKYSLFELENGRKRMLASAGELQKGNELALPSKYVNFLYLASHYEKLKGSPEDNEQKQLFVEQHKHYLDEIIEQISEFSKRVILADANLDKVLSAYNKHRDKPIREQAENIIHLFTLTNLGAPAAFKYFDTTIDRKRYTSTKEVLDATLIHQSITGLYETRIDLSQLGGDGGGGGEAAAKGGSGGMDPLQLLQPLEAEIKGTKLKAHWNSGATITCVPEAFLEDERPIQTMLIKTIHGEKQQDVYYLTFKVQGRKVEAEVLASPYDYILLNPSDVPWLMKKPLQLTVLVPLHEYQERLLQQTALPKEQKELLQKLFLKYDALWQHWENQVGHRRIKPHNIATGTLAPRPQKQYPINPKAKPSIQIVIDDLLKQGVLIQQNSTMNTPVYPVPKPDGKWRMVLDYREVNKTIPLIAAQNQHSAGILSSIYRGKYKTTLDLTNGFWAHPITPESYWLTAFTWQGKQYCWTRLPQGFLNSPALFNADVVDLLKEIPNVQAYVDDIYISHDDPQEHLEQLEKIFSILLNAGYVVSLKKSEIAQREVEFLGFNITKEGRGLTDTFKQKLLNITPPKDLKQLQSILGLLNFARNFIPNYSELVKPLYTIVAPANGKFISWTEDNSNQLQHIISVLNQADNLEERNPETRLIIKVNSSPSAGYIRYYNEGSKRPIMYVNYIFSKAEAKFTQTEKLLTTMHKGLIKAMDLAMGQEILVYSPIVSMTKIQRTPLPERKALPVRWITWMTYLEDPRIQFHYDKSLPELQQIPNVTEDVIAKTKHPSEFAMVFYTDGSAIKHPDVNKSHSAGMGIAQVQFIPEYKIVHQWSIPLGDHTAQLAEIAAVEFACKKALKISGPVLIVTDSFYVAESANKELPYWKSNGFLNNKKKPLRHVSKWKSIAECLQLKPDIIIMHEKGHQQPMTTLHTEGNNLADKLATQGSYVVHAGKRTADGSEFEKRTADGSEFESPKKKAKVE

SEQ ID NO: 471 - protein, 2174 aa, synthetic construct
  source 1..2174: note = Description of Artificial Sequence: Synthetic polypeptide
MPAAKRVKLDGGDKKYSIGLDIGTNSVGWAVITDEYKVPSKKFKVLGNTDRHSIKKNLIGALLFDSGETAEATRLKRTARRRYTRRKNRICYLQEIFSNEMAKVDDSFFHRLEESFLVEEDKKHERHPIFGNIVDEVAYHEKYPTIYHLRKKLVDSTDKADLRLIYLALAHMIKFRGHFLIEGDLNPDNSDVDKLFIQLVQTYNQLFEENPINASGVDAKAILSARLSKSRRLENLIAQLPGEKKNGLFGNLIALSLGLTPNFKSNFDLAEDAKLQLSKDTYDDDLDNLLAQIGDQYADLFLAAKNLSDAILLSDILRVNTEITKAPLSASMIKRYDEHHQDLTLLKALVRQQLPEKYKEIFFDQSKNGYAGYIDGGASQEEFYKFIKPILEKMDGTEELLVKLNREDLLRKQRTFDNGSIPHQIHLGELHAILRRQEDFYPFLKDNREKIEKILTFRIPYYVGPLARGNSRFAWMTRKSEETITPWNFEEVVDKGASAQSFIERMTNFDKNLPNEKVLPKHSLLYEYFTVYNELTKVKYVTEGMRKPAFLSGEQKKAIVDLLFKTNRKVTVKQLKEDYFKKIECFDSVEISGVEDRFNASLGTYHDLLKIIKDKDFLDNEENEDILEDIVLTLTLFEDREMIEERLKTYAHLFDDKVMKQLKRRRYTGWGRLSRKLINGIRDKQSGKTILDFLKSDGFANRNFMQLIHDDSLTFKEDIQKAQVSGQGDSLHEHIANLAGSPAIKKGILQTVKVVDELVKVMGRHKPENIVIEMARENQTTQKGQKNSRERMKRIEEGIKELGSQILKEHPVENTQLQNEKLYLYYLQNGRDMYVDQELDINRLSDYDVDHIVPQSFLKDDSIDNKVLTRSDKARGKSDNVPSEEVVKKMKNYWRQLLNAKLITQRKFDNLTKAERGGLSELDKAGFIKRQLVETRQITKHVAQILDSRMNTKYDENDKLIREVKVITLKSKLVSDFRKDFQFYKVREINNYHHAHDAYLNAVVGTALIKKYPKLESEFVYGDYKVYDVRKMIAKSEQEIGKATAKYFFYSNIMNFFKTEITLANGEIRKRPLIETNGETGEIVWDKGRDFATVRKVLSMPQVNIVKKTEVQTGGFSKESILPKRNSDKLIARKKDWDPKKYGGFDSPTVAYSVLVVAKVEKGKSKKLKSVKELLGITIMERSSFEKNPIDFLEAKGYKEVKKDLIIKLPKYSLFELENGRKRMLASAGELQKGNELALPSKYVNFLYLASHYEKLKGSPEDNEQKQLFVEQHKHYLDEIIEQISEFSKRVILADANLDKVLSAYNKHRDKPIREQAENIIHLFTLTNLGAPAAFKYFDTTIDRKRYTSTKEVLDATLIHQSITGLYETRIDLSQLGGDGGPAPAPAPAPGGMDPLQLLQPLEAEIKGTKLKAHWNSGATITCVPEAFLEDERPIQTMLIKTIHGEKQQDVYYLTFKVQGRKVEAEVLASPYDYILLNPSDVPWLMKKPLQLTVLVPLHEYQERLLQQTALPKEQKELLQKLFLKYDALWQHWENQVGHRRIKPHNIATGTLAPRPQKQYPINPKAKPSIQIVIDDLLKQGVLIQQNSTMNTPVYPVPKPDGKWRMVLDYREVNKTIPLIAAQNQHSAGILSSIYRGKYKTTLDLTNGFWAHPITPESYWLTAFTWQGKQYCWTRLPQGFLNSPALFNADVVDLLKEIPNVQAYVDDIYISHDDPQEHLEQLEKIFSILLNAGYVVSLKKSEIAQREVEFLGFNITKEGRGLTDTFKQKLLNITPPKDLKQLQSILGLLNFARNFIPNYSELVKPLYTIVAPANGKFISWTEDNSNQLQHIISVLNQADNLEERNPETRLIIKVNSSPSAGYIRYYNEGSKRPIMYVNYIFSKAEAKFTQTEKLLTTMHKGLIKAMDLAMGQEILVYSPIVSMTKIQRTPLPERKALPVRWITWMTYLEDPRIQFHYDKSLPELQQIPNVTEDVIAKTKHPSEFAMVFYTDGSAIKHPDVNKSHSAGMGIAQVQFIPEYKIVHQWSIPLGDHTAQLAEIAAVEFACKKALKISGPVLIVTDSFYVAESANKELPYWKSNGFLNNKKKPLRHVSKWKSIAECLQLKPDIIIMHEKGHQQPMTTLHTEGNNLADKLATQGSYVVHAGKRTADGSEFEKRTADGSEFESPKKKAKVE

SEQ ID NO: 472 - protein, 2174 aa, synthetic construct
  source 1..2174: note = Description of Artificial Sequence: Synthetic polypeptide
MPAAKRVKLDGGDKKYSIGLDIGTNSVGWAVITDEYKVPSKKFKVLGNTDRHSIKKNLIGALLFDSGETAEATRLKRTARRRYTRRKNRICYLQEIFSNEMAKVDDSFFHRLEESFLVEEDKKHERHPIFGNIVDEVAYHEKYPTIYHLRKKLVDSTDKADLRLIYLALAHMIKFRGHFLIEGDLNPDNSDVDKLFIQLVQTYNQLFEENPINASGVDAKAILSARLSKSRRLENLIAQLPGEKKNGLFGNLIALSLGLTPNFKSNFDLAEDAKLQLSKDTYDDDLDNLLAQIGDQYADLFLAAKNLSDAILLSDILRVNTEITKAPLSASMIKRYDEHHQDLTLLKALVRQQLPEKYKEIFFDQSKNGYAGYIDGGASQEEFYKFIKPILEKMDGTEELLVKLNREDLLRKQRTFDNGSIPHQIHLGELHAILRRQEDFYPFLKDNREKIEKILTFRIPYYVGPLARGNSRFAWMTRKSEETITPWNFEEVVDKGASAQSFIERMTNFDKNLPNEKVLPKHSLLYEYFTVYNELTKVKYVTEGMRKPAFLSGEQKKAIVDLLFKTNRKVTVKQLKEDYFKKIECFDSVEISGVEDRFNASLGTYHDLLKIIKDKDFLDNEENEDILEDIVLTLTLFEDREMIEERLKTYAHLFDDKVMKQLKRRRYTGWGRLSRKLINGIRDKQSGKTILDFLKSDGFANRNFMQLIHDDSLTFKEDIQKAQVSGQGDSLHEHIANLAGSPAIKKGILQTVKVVDELVKVMGRHKPENIVIEMARENQTTQKGQKNSRERMKRIEEGIKELGSQILKEHPVENTQLQNEKLYLYYLQNGRDMYVDQELDINRLSDYDVDHIVPQSFLKDDSIDNKVLTRSDKARGKSDNVPSEEVVKKMKNYWRQLLNAKLITQRKFDNLTKAERGGLSELDKAGFIKRQLVETRQITKHVAQILDSRMNTKYDENDKLIREVKVITLKSKLVSDFRKDFQFYKVREINNYHHAHDAYLNAVVGTALIKKYPKLESEFVYGDYKVYDVRKMIAKSEQEIGKATAKYFFYSNIMNFFKTEITLANGEIRKRPLIETNGETGEIVWDKGRDFATVRKVLSMPQVNIVKKTEVQTGGFSKESILPKRNSDKLIARKKDWDPKKYGGFDSPTVAYSVLVVAKVEKGKSKKLKSVKELLGITIMERSSFEKNPIDFLEAKGYKEVKKDLIIKLPKYSLFELENGRKRMLASAGELQKGNELALPSKYVNFLYLASHYEKLKGSPEDNEQKQLFVEQHKHYLDEIIEQISEFSKRVILADANLDKVLSAYNKHRDKPIREQAENIIHLFTLTNLGAPAAFKYFDTTIDRKRYTSTKEVLDATLIHQSITGLYETRIDLSQLGGDGGGSSGGSGGGGGMDPLQLLQPLEAEIKGTKLKAHWNSGATITCVPEAFLEDERPIQTMLIKTIHGEKQQDVYYLTFKVQGRKVEAEVLASPYDYILLNPSDVPWLMKKPLQLTVLVPLHEYQERLLQQTALPKEQKELLQKLFLKYDALWQHWENQVGHRRIKPHNIATGTLAPRPQKQYPINPKAKPSIQIVIDDLLKQGVLIQQNSTMNTPVYPVPKPDGKWRMVLDYREVNKTIPLIAAQNQHSAGILSSIYRGKYKTTLDLTNGFWAHPITPESYWLTAFTWQGKQYCWTRLPQGFLNSPALFNADVVDLLKEIPNVQAYVDDIYISHDDPQEHLEQLEKIFSILLNAGYVVSLKKSEIAQREVEFLGFNITKEGRGLTDTFKQKLLNITPPKDLKQLQSILGLLNFARNFIPNYSELVKPLYTIVAPANGKFISWTEDNSNQLQHIISVLNQADNLEERNPETRLIIKVNSSPSAGYIRYYNEGSKRPIMYVNYIFSKAEAKFTQTEKLLTTMHKGLIKAMDLAMGQEILVYSPIVSMTKIQRTPLPERKALPVRWITWMTYLEDPRIQFHYDKSLPELQQIPNVTEDVIAKTKHPSEFAMVFYTDGSAIKHPDVNKSHSAGMGIAQVQFIPEYKIVHQWSIPLGDHTAQLAEIAAVEFACKKALKISGPVLIVTDSFYVAESANKELPYWKSNGFLNNKKKPLRHVSKWKSIAECLQLKPDIIIMHEKGHQQPMTTLHTEGNNLADKLATQGSYVVHAGKRTADGSEFEKRTADGSEFESPKKKAKVE

SEQ ID NO: 473 - protein, 2174 aa, synthetic construct
  source 1..2174: note = Description of Artificial Sequence: Synthetic polypeptide
MPAAKRVKLDGGDKKYSIGLDIGTNSVGWAVITDEYKVPSKKFKVLGNTDRHSIKKNLIGALLFDSGETAEATRLKRTARRRYTRRKNRICYLQEIFSNEMAKVDDSFFHRLEESFLVEEDKKHERHPIFGNIVDEVAYHEKYPTIYHLRKKLVDSTDKADLRLIYLALAHMIKFRGHFLIEGDLNPDNSDVDKLFIQLVQTYNQLFEENPINASGVDAKAILSARLSKSRRLENLIAQLPGEKKNGLFGNLIALSLGLTPNFKSNFDLAEDAKLQLSKDTYDDDLDNLLAQIGDQYADLFLAAKNLSDAILLSDILRVNTEITKAPLSASMIKRYDEHHQDLTLLKALVRQQLPEKYKEIFFDQSKNGYAGYIDGGASQEEFYKFIKPILEKMDGTEELLVKLNREDLLRKQRTFDNGSIPHQIHLGELHAILRRQEDFYPFLKDNREKIEKILTFRIPYYVGPLARGNSRFAWMTRKSEETITPWNFEEVVDKGASAQSFIERMTNFDKNLPNEKVLPKHSLLYEYFTVYNELTKVKYVTEGMRKPAFLSGEQKKAIVDLLFKTNRKVTVKQLKEDYFKKIECFDSVEISGVEDRFNASLGTYHDLLKIIKDKDFLDNEENEDILEDIVLTLTLFEDREMIEERLKTYAHLFDDKVMKQLKRRRYTGWGRLSRKLINGIRDKQSGKTILDFLKSDGFANRNFMQLIHDDSLTFKEDIQKAQVSGQGDSLHEHIANLAGSPAIKKGILQTVKVVDELVKVMGRHKPENIVIEMARENQTTQKGQKNSRERMKRIEEGIKELGSQILKEHPVENTQLQNEKLYLYYLQNGRDMYVDQELDINRLSDYDVDHIVPQSFLKDDSIDNKVLTRSDKARGKSDNVPSEEVVKKMKNYWRQLLNAKLITQRKFDNLTKAERGGLSELDKAGFIKRQLVETRQITKHVAQILDSRMNTKYDENDKLIREVKVITLKSKLVSDFRKDFQFYKVREINNYHHAHDAYLNAVVGTALIKKYPKLESEFVYGDYKVYDVRKMIAKSEQEIGKATAKYFFYSNIMNFFKTEITLANGEIRKRPLIETNGETGEIVWDKGRDFATVRKVLSMPQVNIVKKTEVQTGGFSKESILPKRNSDKLIARKKDWDPKKYGGFDSPTVAYSVLVVAKVEKGKSKKLKSVKELLGITIMERSSFEKNPIDFLEAKGYKEVKKDLIIKLPKYSLFELENGRKRMLASAGELQKGNELALPSKYVNFLYLASHYEKLKGSPEDNEQKQLFVEQHKHYLDEIIEQISEFSKRVILADANLDKVLSAYNKHRDKPIREQAENIIHLFTLTNLGAPAAFKYFDTTIDRKRYTSTKEVLDATLIHQSITGLYETRIDLSQLGGDGGPAPGSSGGSGGMDPLQLLQPLEAEIKGTKLKAHWNSGATITCVPEAFLEDERPIQTMLIKTIHGEKQQDVYYLTFKVQGRKVEAEVLASPYDYILLNPSDVPWLMKKPLQLTVLVPLHEYQERLLQQTALPKEQKELLQKLFLKYDALWQHWENQVGHRRIKPHNIATGTLAPRPQKQYPINPKAKPSIQIVIDDLLKQGVLIQQNSTMNTPVYPVPKPDGKWRMVLDYREVNKTIPLIAAQNQHSAGILSSIYRGKYKTTLDLTNGFWAHPITPESYWLTAFTWQGKQYCWTRLPQGFLNSPALFNADVVDLLKEIPNVQAYVDDIYISHDDPQEHLEQLEKIFSILLNAGYVVSLKKSEIAQREVEFLGFNITKEGRGLTDTFKQKLLNITPPKDLKQLQSILGLLNFARNFIPNYSELVKPLYTIVAPANGKFISWTEDNSNQLQHIISVLNQADNLEERNPETRLIIKVNSSPSAGYIRYYNEGSKRPIMYVNYIFSKAEAKFTQTEKLLTTMHKGLIKAMDLAMGQEILVYSPIVSMTKIQRTPLPERKALPVRWITWMTYLEDPRIQFHYDKSLPELQQIPNVTEDVIAKTKHPSEFAMVFYTDGSAIKHPDVNKSHSAGMGIAQVQFIPEYKIVHQWSIPLGDHTAQLAEIAAVEFACKKALKISGPVLIVTDSFYVAESANKELPYWKSNGFLNNKKKPLRHVSKWKSIAECLQLKPDIIIMHEKGHQQPMTTLHTEGNNLADKLATQGSYVVHAGKRTADGSEFEKRTADGSEFESPKKKAKVE

SEQ ID NO: 474 - protein, 2176 aa, synthetic construct
  source 1..2176: note = Description of Artificial Sequence: Synthetic polypeptide
MPAAKRVKLDGGDKKYSIGLDIGTNSVGWAVITDEYKVPSKKFKVLGNTDRHSIKKNLIGALLFDSGETAEATRLKRTARRRYTRRKNRICYLQEIFSNEMAKVDDSFFHRLEESFLVEEDKKHERHPIFGNIVDEVAYHEKYPTIYHLRKKLVDSTDKADLRLIYLALAHMIKFRGHFLIEGDLNPDNSDVDKLFIQLVQTYNQLFEENPINASGVDAKAILSARLSKSRRLENLIAQLPGEKKNGLFGNLIALSLGLTPNFKSNFDLAEDAKLQLSKDTYDDDLDNLLAQIGDQYADLFLAAKNLSDAILLSDILRVNTEITKAPLSASMIKRYDEHHQDLTLLKALVRQQLPEKYKEIFFDQSKNGYAGYIDGGASQEEFYKFIKPILEKMDGTEELLVKLNREDLLRKQRTFDNGSIPHQIHLGELHAILRRQEDFYPFLKDNREKIEKILTFRIPYYVGPLARGNSRFAWMTRKSEETITPWNFEEVVDKGASAQSFIERMTNFDKNLPNEKVLPKHSLLYEYFTVYNELTKVKYVTEGMRKPAFLSGEQKKAIVDLLFKTNRKVTVKQLKEDYFKKIECFDSVEISGVEDRFNASLGTYHDLLKIIKDKDFLDNEENEDILEDIVLTLTLFEDREMIEERLKTYAHLFDDKVMKQLKRRRYTGWGRLSRKLINGIRDKQSGKTILDFLKSDGFANRNFMQLIHDDSLTFKEDIQKAQVSGQGDSLHEHIANLAGSPAIKKGILQTVKVVDELVKVMGRHKPENIVIEMARENQTTQKGQKNSRERMKRIEEGIKELGSQILKEHPVENTQLQNEKLYLYYLQNGRDMYVDQELDINRLSDYDVDHIVPQSFLKDDSIDNKVLTRSDKARGKSDNVPSEEVVKKMKNYWRQLLNAKLITQRKFDNLTKAERGGLSELDKAGFIKRQLVETRQITKHVAQILDSRMNTKYDENDKLIREVKVITLKSKLVSDFRKDFQFYKVREINNYHHAHDAYLNAVVGTALIKKYPKLESEFVYGDYKVYDVRKMIAKSEQEIGKATAKYFFYSNIMNFFKTEITLANGEIRKRPLIETNGETGEIVWDKGRDFATVRKVLSMPQVNIVKKTEVQTGGFSKESILPKRNSDKLIARKKDWDPKKYGGFDSPTVAYSVLVVAKVEKGKSKKLKSVKELLGITIMERSSFEKNPIDFLEAKGYKEVKKDLIIKLPKYSLFELENGRKRMLASAGELQKGNELALPSKYVNFLYLASHYEKLKGSPEDNEQKQLFVEQHKHYLDEIIEQISEFSKRVILADANLDKVLSAYNKHRDKPIREQAENIIHLFTLTNLGAPAAFKYFDTTIDRKRYTSTKEVLDATLIHQSITGLYETRIDLSQLGGDGGPAPGGSEAAAKGGMDPLQLLQPLEAEIKGTKLKAHWNSGATITCVPEAFLEDERPIQTMLIKTIHGEKQQDVYYLTFKVQGRKVEAEVLASPYDYILLNPSDVPWLMKKPLQLTVLVPLHEYQERLLQQTALPKEQKELLQKLFLKYDALWQHWENQVGHRRIKPHNIATGTLAPRPQKQYPINPKAKPSIQIVIDDLLKQGVLIQQNSTMNTPVYPVPKPDGKWRMVLDYREVNKTIPLIAAQNQHSAGILSSIYRGKYKTTLDLTNGFWAHPITPESYWLTAFTWQGKQYCWTRLPQGFLNSPALFNADVVDLLKEIPNVQAYVDDIYISHDDPQEHLEQLEKIFSILLNAGYVVSLKKSEIAQREVEFLGFNITKEGRGLTDTFKQKLLNITPPKDLKQLQSILGLLNFARNFIPNYSELVKPLYTIVAPANGKFISWTEDNSNQLQHIISVLNQADNLEERNPETRLIIKVNSSPSAGYIRYYNEGSKRPIMYVNYIFSKAEAKFTQTEKLLTTMHKGLIKAMDLAMGQEILVYSPIVSMTKIQRTPLPERKALPVRWITWMTYLEDPRIQFHYDKSLPELQQIPNVTEDVIAKTKHPSEFAMVFYTDGSAIKHPDVNKSHSAGMGIAQVQFIPEYKIVHQWSIPLGDHTAQLAEIAAVEFACKKALKISGPVLIVTDSFYVAESANKELPYWKSNGFLNNKKKPLRHVSKWKSIAECLQLKPDIIIMHEKGHQQPMTTLHTEGNNLADKLATQGSYVVHAGKRTADGSEFEKRTADGSEFESPKKKAKVE

SEQ ID NO: 475 - protein, 2176 aa, synthetic construct
  source 1..2176: note = Description of Artificial Sequence: Synthetic polypeptide
MPAAKRVKLDGGDKKYSIGLDIGTNSVGWAVITDEYKVPSKKFKVLGNTDRHSIKKNLIGALLFDSGETAEATRLKRTARRRYTRRKNRICYLQEIFSNEMAKVDDSFFHRLEESFLVEEDKKHERHPIFGNIVDEVAYHEKYPTIYHLRKKLVDSTDKADLRLIYLALAHMIKFRGHFLIEGDLNPDNSDVDKLFIQLVQTYNQLFEENPINASGVDAKAILSARLSKSRRLENLIAQLPGEKKNGLFGNLIALSLGLTPNFKSNFDLAEDAKLQLSKDTYDDDLDNLLAQIGDQYADLFLAAKNLSDAILLSDILRVNTEITKAPLSASMIKRYDEHHQDLTLLKALVRQQLPEKYKEIFFDQSKNGYAGYIDGGASQEEFYKFIKPILEKMDGTEELLVKLNREDLLRKQRTFDNGSIPHQIHLGELHAILRRQEDFYPFLKDNREKIEKILTFRIPYYVGPLARGNSRFAWMTRKSEETITPWNFEEVVDKGASAQSFIERMTNFDKNLPNEKVLPKHSLLYEYFTVYNELTKVKYVTEGMRKPAFLSGEQKKAIVDLLFKTNRKVTVKQLKEDYFKKIECFDSVEISGVEDRFNASLGTYHDLLKIIKDKDFLDNEENEDILEDIVLTLTLFEDREMIEERLKTYAHLFDDKVMKQLKRRRYTGWGRLSRKLINGIRDKQSGKTILDFLKSDGFANRNFMQLIHDDSLTFKEDIQKAQVSGQGDSLHEHIANLAGSPAIKKGILQTVKVVDELVKVMGRHKPENIVIEMARENQTTQKGQKNSRERMKRIEEGIKELGSQILKEHPVENTQLQNEKLYLYYLQNGRDMYVDQELDINRLSDYDVDHIVPQSFLKDDSIDNKVLTRSDKARGKSDNVPSEEVVKKMKNYWRQLLNAKLITQRKFDNLTKAERGGLSELDKAGFIKRQLVETRQITKHVAQILDSRMNTKYDENDKLIREVKVITLKSKLVSDFRKDFQFYKVREINNYHHAHDAYLNAVVGTALIKKYPKLESEFVYGDYKVYDVRKMIAKSEQEIGKATAKYFFYSNIMNFFKTEITLANGEIRKRPLIETNGETGEIVWDKGRDFATVRKVLSMPQVNIVKKTEVQTGGFSKESILPKRNSDKLIARKKDWDPKKYGGFDSPTVAYSVLVVAKVEKGKSKKLKSVKELLGITIMERSSFEKNPIDFLEAKGYKEVKKDLIIKLPKYSLFELENGRKRMLASAGELQKGNELALPSKYVNFLYLASHYEKLKGSPEDNEQKQLFVEQHKHYLDEIIEQISEFSKRVILADANLDKVLSAYNKHRDKPIREQAENIIHLFTLTNLGAPAAFKYFDTTIDRKRYTSTKEVLDATLIHQSITGLYETRIDLSQLGGDGGEAAAKGGGGSSGGMDPLQLLQPLEAEIKGTKLKAHWNSGATITCVPEAFLEDERPIQTMLIKTIHGEKQQDVYYLTFKVQGRKVEAEVLASPYDYILLNPSDVPWLMKKPLQLTVLVPLHEYQERLLQQTALPKEQKELLQKLFLKYDALWQHWENQVGHRRIKPHNIATGTLAPRPQKQYPINPKAKPSIQIVIDDLLKQGVLIQQNSTMNTPVYPVPKPDGKWRMVLDYREVNKTIPLIAAQNQHSAGILSSIYRGKYKTTLDLTNGFWAHPITPESYWLTAFTWQGKQYCWTRLPQGFLNSPALFNADVVDLLKEIPNVQAYVDDIYISHDDPQEHLEQLEKIFSILLNAGYVVSLKKSEIAQREVEFLGFNITKEGRGLTDTFKQKLLNITPPKDLKQLQSILGLLNFARNFIPNYSELVKPLYTIVAPANGKFISWTEDNSNQLQHIISVLNQADNLEERNPETRLIIKVNSSPSAGYIRYYNEGSKRPIMYVNYIFSKAEAKFTQTEKLLTTMHKGLIKAMDLAMGQEILVYSPIVSMTKIQRTPLPERKALPVRWITWMTYLEDPRIQFHYDKSLPELQQIPNVTEDVIAKTKHPSEFAMVFYTDGSAIKHPDVNKSHSAGMGIAQVQFIPEYKIVHQWSIPLGDHTAQLAEIAAVEFACKKALKISGPVLIVTDSFYVAESANKELPYWKSNGFLNNKKKPLRHVSKWKSIAECLQLKPDIIIMHEKGHQQPMTTLHTEGNNLADKLATQGSYVVHAGKRTADGSEFEKRTADGSEFESPKKKAKVE

SEQ ID NO: 476 - protein, 2174 aa, synthetic construct
  source 1..2174: note = Description of Artificial Sequence: Synthetic polypeptide
MPAAKRVKLDGGDKKYSIGLDIGTNSVGWAVITDEYKVPSKKFKVLGNTDRHSIKKNLIGALLFDSGETAEATRLKRTARRRYTRRKNRICYLQEIFSNEMAKVDDSFFHRLEESFLVEEDKKHERHPIFGNIVDEVAYHEKYPTIYHLRKKLVDSTDKADLRLIYLALAHMIKFRGHFLIEGDLNPDNSDVDKLFIQLVQTYNQLFEENPINASGVDAKAILSARLSKSRRLENLIAQLPGEKKNGLFGNLIALSLGLTPNFKSNFDLAEDAKLQLSKDTYDDDLDNLLAQIGDQYADLFLAAKNLSDAILLSDILRVNTEITKAPLSASMIKRYDEHHQDLTLLKALVRQQLPEKYKEIFFDQSKNGYAGYIDGGASQEEFYKFIKPILEKMDGTEELLVKLNREDLLRKQRTFDNGSIPHQIHLGELHAILRRQEDFYPFLKDNREKIEKILTFRIPYYVGPLARGNSRFAWMTRKSEETITPWNFEEVVDKGASAQSFIERMTNFDKNLPNEKVLPKHSLLYEYFTVYNELTKVKYVTEGMRKPAFLSGEQKKAIVDLLFKTNRKVTVKQLKEDYFKKIECFDSVEISGVEDRFNASLGTYHDLLKIIKDKDFLDNEENEDILEDIVLTLTLFEDREMIEERLKTYAHLFDDKVMKQLKRRRYTGWGRLSRKLINGIRDKQSGKTILDFLKSDGFANRNFMQLIHDDSLTFKEDIQKAQVSGQGDSLHEHIANLAGSPAIKKGILQTVKVVDELVKVMGRHKPENIVIEMARENQTTQKGQKNSRERMKRIEEGIKELGSQILKEHPVENTQLQNEKLYLYYLQNGRDMYVDQELDINRLSDYDVDHIVPQSFLKDDSIDNKVLTRSDKARGKSDNVPSEEVVKKMKNYWRQLLNAKLITQRKFDNLTKAERGGLSELDKAGFIKRQLVETRQITKHVAQILDSRMNTKYDENDKLIREVKVITLKSKLVSDFRKDFQFYKVREINNYHHAHDAYLNAVVGTALIKKYPKLESEFVYGDYKVYDVRKMIAKSEQEIGKATAKYFFYSNIMNFFKTEITLANGEIRKRPLIETNGETGEIVWDKGRDFATVRKVLSMPQVNIVKKTEVQTGGFSKESILPKRNSDKLIARKKDWDPKKYGGFDSPTVAYSVLVVAKVEKGKSKKLKSVKELLGITIMERSSFEKNPIDFLEAKGYKEVKKDLIIKLPKYSLFELENGRKRMLASAGELQKGNELALPSKYVNFLYLASHYEKLKGSPEDNEQKQLFVEQHKHYLDEIIEQISEFSKRVILADANLDKVLSAYNKHRDKPIREQAENIIHLFTLTNLGAPAAFKYFDTTIDRKRYTSTKEVLDATLIHQSITGLYETRIDLSQLGGDGGGSSGGGGGSGGMDPLQLLQPLEAEIKGTKLKAHWNSGATITCVPEAFLEDERPIQTMLIKTIHGEKQQDVYYLTFKVQGRKVEAEVLASPYDYILLNPSDVPWLMKKPLQLTVLVPLHEYQERLLQQTALPKEQKELLQKLFLKYDALWQHWENQVGHRRIKPHNIATGTLAPRPQKQYPINPKAKPSIQIVIDDLLKQGVLIQQNSTMNTPVYPVPKPDGKWRMVLDYREVNKTIPLIAAQNQHSAGILSSIYRGKYKTTLDLTNGFWAHPITPESYWLTAFTWQGKQYCWTRLPQGFLNSPALFNADVVDLLKEIPNVQAYVDDIYISHDDPQEHLEQLEKIFSILLNAGYVVSLKKSEIAQREVEFLGFNITKEGRGLTDTFKQKLLNITPPKDLKQLQSILGLLNFARNFIPNYSELVKPLYTIVAPANGKFISWTEDNSNQLQHIISVLNQADNLEERNPETRLIIKVNSSPSAGYIRYYNEGSKRPIMYVNYIFSKAEAKFTQTEKLLTTMHKGLIKAMDLAMGQEILVYSPIVSMTKIQRTPLPERKALPVRWITWMTYLEDPRIQFHYDKSLPELQQIPNVTEDVIAKTKHPSEFAMVFYTDGSAIKHPDVNKSHSAGMGIAQVQFIPEYKIVHQWSIPLGDHTAQLAEIAAVEFACKKALKISGPVLIVTDSFYVAESANKELPYWKSNGFLNNKKKPLRHVSKWKSIAECLQLKPDIIIMHEKGHQQPMTTLHTEGNNLADKLATQGSYVVHAGKRTADGSEFEKRTADGSEFESPKKKAKVE

SEQ ID NO: 477 - protein, 2171 aa, synthetic construct
  source 1..2171: note = Description of Artificial Sequence: Synthetic polypeptide
MPAAKRVKLDGGDKKYSIGLDIGTNSVGWAVITDEYKVPSKKFKVLGNTDRHSIKKNLIGALLFDSGETAEATRLKRTARRRYTRRKNRICYLQEIFSNEMAKVDDSFFHRLEESFLVEEDKKHERHPIFGNIVDEVAYHEKYPTIYHLRKKLVDSTDKADLRLIYLALAHMIKFRGHFLIEGDLNPDNSDVDKLFIQLVQTYNQLFEENPINASGVDAKAILSARLSKSRRLENLIAQLPGEKKNGLFGNLIALSLGLTPNFKSNFDLAEDAKLQLSKDTYDDDLDNLLAQIGDQYADLFLAAKNLSDAILLSDILRVNTEITKAPLSASMIKRYDEHHQDLTLLKALVRQQLPEKYKEIFFDQSKNGYAGYIDGGASQEEFYKFIKPILEKMDGTEELLVKLNREDLLRKQRTFDNGSIPHQIHLGELHAILRRQEDFYPFLKDNREKIEKILTFRIPYYVGPLARGNSRFAWMTRKSEETITPWNFEEVVDKGASAQSFIERMTNFDKNLPNEKVLPKHSLLYEYFTVYNELTKVKYVTEGMRKPAFLSGEQKKAIVDLLFKTNRKVTVKQLKEDYFKKIECFDSVEISGVEDRFNASLGTYHDLLKIIKDKDFLDNEENEDILEDIVLTLTLFEDREMIEERLKTYAHLFDDKVMKQLKRRRYTGWGRLSRKLINGIRDKQSGKTILDFLKSDGFANRNFMQLIHDDSLTFKEDIQKAQVSGQGDSLHEHIANLAGSPAIKKGILQTVKVVDELVKVMGRHKPENIVIEMARENQTTQKGQKNSRERMKRIEEGIKELGSQILKEHPVENTQLQNEKLYLYYLQNGRDMYVDQELDINRLSDYDVDHIVPQSFLKDDSIDNKVLTRSDKARGKSDNVPSEEVVKKMKNYWRQLLNAKLITQRKFDNLTKAERGGLSELDKAGFIKRQLVETRQITKHVAQILDSRMNTKYDENDKLIREVKVITLKSKLVSDFRKDFQFYKVREINNYHHAHDAYLNAVVGTALIKKYPKLESEFVYGDYKVYDVRKMIAKSEQEIGKATAKYFFYSNIMNFFKTEITLANGEIRKRPLIETNGETGEIVWDKGRDFATVRKVLSMPQVNIVKKTEVQTGGFSKESILPKRNSDKLIARKKDWDPKKYGGFDSPTVAYSVLVVAKVEKGKSKKLKSVKELLGITIMERSSFEKNPIDFLEAKGYKEVKKDLIIKLPKYSLFELENGRKRMLASAGELQKGNELALPSKYVNFLYLASHYEKLKGSPEDNEQKQLFVEQHKHYLDEIIEQISEFSKRVILADANLDKVLSAYNKHRDKPIREQAENIIHLFTLTNLGAPAAFKYFDTTIDRKRYTSTKEVLDATLIHQSITGLYETRIDLSQLGGDGGGSSPAPGGMDPLQLLQPLEAEIKGTKLKAHWNSGATITCVPEAFLEDERPIQTMLIKTIHGEKQQDVYYLTFKVQGRKVEAEVLASPYDYILLNPSDVPWLMKKPLQLTVLVPLHEYQERLLQQTALPKEQKELLQKLFLKYDALWQHWENQVGHRRIKPHNIATGTLAPRPQKQYPINPKAKPSIQIVIDDLLKQGVLIQQNSTMNTPVYPVPKPDGKWRMVLDYREVNKTIPLIAAQNQHSAGILSSIYRGKYKTTLDLTNGFWAHPITPESYWLTAFTWQGKQYCWTRLPQGFLNSPALFNADVVDLLKEIPNVQAYVDDIYISHDDPQEHLEQLEKIFSILLNAGYVVSLKKSEIAQREVEFLGFNITKEGRGLTDTFKQKLLNITPPKDLKQLQSILGLLNFARNFIPNYSELVKPLYTIVAPANGKFISWTEDNSNQLQHIISVLNQADNLEERNPETRLIIKVNSSPSAGYIRYYNEGSKRPIMYVNYIFSKAEAKFTQTEKLLTTMHKGLIKAMDLAMGQEILVYSPIVSMTKIQRTPLPERKALPVRWITWMTYLEDPRIQFHYDKSLPELQQIPNVTEDVIAKTKHPSEFAMVFYTDGSAIKHPDVNKSHSAGMGIAQVQFIPEYKIVHQWSIPLGDHTAQLAEIAAVEFACKKALKISGPVLIVTDSFYVAESANKELPYWKSNGFLNNKKKPLRHVSKWKSIAECLQLKPDIIIMHEKGHQQPMTTLHTEGNNLADKLATQGSYVVHAGKRTADGSEFEKRTADGSEFESPKKKAKVE

SEQ ID NO: 478 - protein, 2178 aa, synthetic construct
  source 1..2178: note = Description of Artificial Sequence: Synthetic polypeptide
MPAAKRVKLDGGDKKYSIGLDIGTNSVGWAVITDEYKVPSKKFKVLGNTDRHSIKKNLIGALLFDSGETAEATRLKRTARRRYTRRKNRICYLQEIFSNEMAKVDDSFFHRLEESFLVEEDKKHERHPIFGNIVDEVAYHEKYPTIYHLRKKLVDSTDKADLRLIYLALAHMIKFRGHFLIEGDLNPDNSDVDKLFIQLVQTYNQLFEENPINASGVDAKAILSARLSKSRRLENLIAQLPGEKKNGLFGNLIALSLGLTPNFKSNFDLAEDAKLQLSKDTYDDDLDNLLAQIGDQYADLFLAAKNLSDAILLSDILRVNTEITKAPLSASMIKRYDEHHQDLTLLKALVRQQLPEKYKEIFFDQSKNGYAGYIDGGASQEEFYKFIKPILEKMDGTEELLVKLNREDLLRKQRTFDNGSIPHQIHLGELHAILRRQEDFYPFLKDNREKIEKILTFRIPYYVGPLARGNSRFAWMTRKSEETITPWNFEEVVDKGASAQSFIERMTNFDKNLPNEKVLPKHSLLYEYFTVYNELTKVKYVTEGMRKPAFLSGEQKKAIVDLLFKTNRKVTVKQLKEDYFKKIECFDSVEISGVEDRFNASLGTYHDLLKIIKDKDFLDNEENEDILEDIVLTLTLFEDREMIEERLKTYAHLFDDKVMKQLKRRRYTGWGRLSRKLINGIRDKQSGKTILDFLKSDGFANRNFMQLIHDDSLTFKEDIQKAQVSGQGDSLHEHIANLAGSPAIKKGILQTVKVVDELVKVMGRHKPENIVIEMARENQTTQKGQKNSRERMKRIEEGIKELGSQILKEHPVENTQLQNEKLYLYYLQNGRDMYVDQELDINRLSDYDVDHIVPQSFLKDDSIDNKVLTRSDKARGKSDNVPSEEVVKKMKNYWRQLLNAKLITQRKFDNLTKAERGGLSELDKAGFIKRQLVETRQITKHVAQILDSRMNTKYDENDKLIREVKVITLKSKLVSDFRKDFQFYKVREINNYHHAHDAYLNAVVGTALIKKYPKLESEFVYGDYKVYDVRKMIAKSEQEIGKATAKYFFYSNIMNFFKTEITLANGEIRKRPLIETNGETGEIVWDKGRDFATVRKVLSMPQVNIVKKTEVQTGGFSKESILPKRNSDKLIARKKDWDPKKYGGFDSPTVAYSVLVVAKVEKGKSKKLKSVKELLGITIMERSSFEKNPIDFLEAKGYKEVKKDLIIKLPKYSLFELENGRKRMLASAGELQKGNELALPSKYVNFLYLASHYEKLKGSPEDNEQKQLFVEQHKHYLDEIIEQISEFSKRVILADANLDKVLSAYNKHRDKPIREQAENIIHLFTLTNLGAPAAFKYFDTTIDRKRYTSTKEVLDATLIHQSITGLYETRIDLSQLGGDGGPAPAPAPAPAPAPGGMDPLQLLQPLEAEIKGTKLKAHWNSGATITCVPEAFLEDERPIQTMLIKTIHGEKQQDVYYLTFKVQGRKVEAEVLASPYDYILLNPSDVPWLMKKPLQLTVLVPLHEYQERLLQQTALPKEQKELLQKLFLKYDALWQHWENQVGHRRIKPHNIATGTLAPRPQKQYPINPKAKPSIQIVIDDLLKQGVLIQQNSTMNTPVYPVPKPDGKWRMVLDYREVNKTIPLIAAQNQHSAGILSSIYRGKYKTTLDLTNGFWAHPITPESYWLTAFTWQGKQYCWTRLPQGFLNSPALFNADVVDLLKEIPNVQAYVDDIYISHDDPQEHLEQLEKIFSILLNAGYVVSLKKSEIAQREVEFLGFNITKEGRGLTDTFKQKLLNITPPKDLKQLQSILGLLNFARNFIPNYSELVKPLYTIVAPANGKFISWTEDNSNQLQHIISVLNQADNLEERNPETRLIIKVNSSPSAGYIRYYNEGSKRPIMYVNYIFSKAEAKFTQTEKLLTTMHKGLIKAMDLAMGQEILVYSPIVSMTKIQRTPLPERKALPVRWITWMTYLEDPRIQFHYDKSLPELQQIPNVTEDVIAKTKHPSEFAMVFYTDGSAIKHPDVNKSHSAGMGIAQVQFIPEYKIVHQWSIPLGDHTAQLAEIAAVEFACKKALKISGPVLIVTDSFYVAESANKELPYWKSNGFLNNKKKPLRHVSKWKSIAECLQLKPDIIIMHEKGHQQPMTTLHTEGNNLADKLATQGSYVVHAGKRTADGSEFEKRTADGSEFESPKKKAKVE

SEQ ID NO: 479 - protein, 2170 aa, synthetic construct
  source 1..2170: note = Description of Artificial Sequence: Synthetic polypeptide
MPAAKRVKLDGGDKKYSIGLDIGTNSVGWAVITDEYKVPSKKFKVLGNTDRHSIKKNLIGALLFDSGETAEATRLKRTARRRYTRRKNRICYLQEIFSNEMAKVDDSFFHRLEESFLVEEDKKHERHPIFGNIVDEVAYHEKYPTIYHLRKKLVDSTDKADLRLIYLALAHMIKFRGHFLIEGDLNPDNSDVDKLFIQLVQTYNQLFEENPINASGVDAKAILSARLSKSRRLENLIAQLPGEKKNGLFGNLIALSLGLTPNFKSNFDLAEDAKLQLSKDTYDDDLDNLLAQIGDQYADLFLAAKNLSDAILLSDILRVNTEITKAPLSASMIKRYDEHHQDLTLLKALVRQQLPEKYKEIFFDQSKNGYAGYIDGGASQEEFYKFIKPILEKMDGTEELLVKLNREDLLRKQRTFDNGSIPHQIHLGELHAILRRQEDFYPFLKDNREKIEKILTFRIPYYVGPLARGNSRFAWMTRKSEETITPWNFEEVVDKGASAQSFIERMTNFDKNLPNEKVLPKHSLLYEYFTVYNELTKVKYVTEGMRKPAFLSGEQKKAIVDLLFKTNRKVTVKQLKEDYFKKIECFDSVEISGVEDRFNASLGTYHDLLKIIKDKDFLDNEENEDILEDIVLTLTLFEDREMIEERLKTYAHLFDDKVMKQLKRRRYTGWGRLSRKLINGIRDKQSGKTILDFLKSDGFANRNFMQLIHDDSLTFKEDIQKAQVSGQGDSLHEHIANLAGSPAIKKGILQTVKVVDELVKVMGRHKPENIVIEMARENQTTQKGQKNSRERMKRIEEGIKELGSQILKEHPVENTQLQNEKLYLYYLQNGRDMYVDQELDINRLSDYDVDHIVPQSFLKDDSIDNKVLTRSDKARGKSDNVPSEEVVKKMKNYWRQLLNAKLITQRKFDNLTKAERGGLSELDKAGFIKRQLVETRQITKHVAQILDSRMNTKYDENDKLIREVKVITLKSKLVSDFRKDFQFYKVREINNYHHAHDAYLNAVVGTALIKKYPKLESEFVYGDYKVYDVRKMIAKSEQEIGKATAKYFFYSNIMNFFKTEITLANGEIRKRPLIETNGETGEIVWDKGRDFATVRKVLSMPQVNIVKKTEVQTGGFSKESILPKRNSDKLIARKKDWDPKKYGGFDSPTVAYSVLVVAKVEKGKSKKLKSVKELLGITIMERSSFEKNPIDFLEAKGYKEVKKDLIIKLPKYSLFELENGRKRMLASAGELQKGNELALPSKYVNFLYLASHYEKLKGSPEDNEQKQLFVEQHKHYLDEIIEQISEFSKRVILADANLDKVLSAYNKHRDKPIREQAENIIHLFTLTNLGAPAAFKYFDTTIDRKRYTSTKEVLDATLIHQSITGLYETRIDLSQLGGDGGGGGGGGGMDPLQLLQPLEAEIKGTKLKAHWNSGATITCVPEAFLEDERPIQTMLIKTIHGEKQQDVYYLTFKVQGRKVEAEVLASPYDYILLNPSDVPWLMKKPLQLTVLVPLHEYQERLLQQTALPKEQKELLQKLFLKYDALWQHWENQVGHRRIKPHNIATGTLAPRPQKQYPINPKAKPSIQIVIDDLLKQGVLIQQNSTMNTPVYPVPKPDGKWRMVLDYREVNKTIPLIAAQNQHSAGILSSIYRGKYKTTLDLTNGFWAHPITPESYWLTAFTWQGKQYCWTRLPQGFLNSPALFNADVVDLLKEIPNVQAYVDDIYISHDDPQEHLEQLEKIFSILLNAGYVVSLKKSEIAQREVEFLGFNITKEGRGLTDTFKQKLLNITPPKDLKQLQSILGLLNFARNFIPNYSELVKPLYTIVAPANGKFISWTEDNSNQLQHIISVLNQADNLEERNPETRLIIKVNSSPSAGYIRYYNEGSKRPIMYVNYIFSKAEAKFTQTEKLLTTMHKGLIKAMDLAMGQEILVYSPIVSMTKIQRTPLPERKALPVRWITWMTYLEDPRIQFHYDKSLPELQQIPNVTEDVIAKTKHPSEFAMVFYTDGSAIKHPDVNKSHSAGMGIAQVQFIPEYKIVHQWSIPLGDHTAQLAEIAAVEFACKKALKISGPVLIVTDSFYVAESANKELPYWKSNGFLNNKKKPLRHVSKWKSIAECLQLKPDIIIMHEKGHQQPMTTLHTEGNNLADKLATQGSYVVHAGKRTADGSEFEKRTADGSEFESPKKKAKVE

SEQ ID NO: 480 - protein, 2211 aa, synthetic construct
  source 1..2211: note = Description of Artificial Sequence: Synthetic polypeptide
MPAAKRVKLDGGDKKYSIGLDIGTNSVGWAVITDEYKVPSKKFKVLGNTDRHSIKKNLIGALLFDSGETAEATRLKRTARRRYTRRKNRICYLQEIFSNEMAKVDDSFFHRLEESFLVEEDKKHERHPIFGNIVDEVAYHEKYPTIYHLRKKLVDSTDKADLRLIYLALAHMIKFRGHFLIEGDLNPDNSDVDKLFIQLVQTYNQLFEENPINASGVDAKAILSARLSKSRRLENLIAQLPGEKKNGLFGNLIALSLGLTPNFKSNFDLAEDAKLQLSKDTYDDDLDNLLAQIGDQYADLFLAAKNLSDAILLSDILRVNTEITKAPLSASMIKRYDEHHQDLTLLKALVRQQLPEKYKEIFFDQSKNGYAGYIDGGASQEEFYKFIKPILEKMDGTEELLVKLNREDLLRKQRTFDNGSIPHQIHLGELHAILRRQEDFYPFLKDNREKIEKILTFRIPYYVGPLARGNSRFAWMTRKSEETITPWNFEEVVDKGASAQSFIERMTNFDKNLPNEKVLPKHSLLYEYFTVYNELTKVKYVTEGMRKPAFLSGEQKKAIVDLLFKTNRKVTVKQLKEDYFKKIECFDSVEISGVEDRFNASLGTYHDLLKIIKDKDFLDNEENEDILEDIVLTLTLFEDREMIEERLKTYAHLFDDKVMKQLKRRRYTGWGRLSRKLINGIRDKQSGKTILDFLKSDGFANRNFMQLIHDDSLTFKEDIQKAQVSGQGDSLHEHIANLAGSPAIKKGILQTVKVVDELVKVMGRHKPENIVIEMARENQTTQKGQKNSRERMKRIEEGIKELGSQILKEHPVENTQLQNEKLYLYYLQNGRDMYVDQELDINRLSDYDVDHIVPQSFLKDDSIDNKVLTRSDKARGKSDNVPSEEVVKKMKNYWRQLLNAKLITQRKFDNLTKAERGGLSELDKAGFIKRQLVETRQITKHVAQILDSRMNTKYDENDKLIREVKVITLKSKLVSDFRKDFQFYKVREINNYHHAHDAYLNAVVGTALIKKYPKLESEFVYGDYKVYDVRKMIAKSEQEIGKATAKYFFYSNIMNFFKTEITLANGEIRKRPLIETNGETGEIVWDKGRDFATVRKVLSMPQVNIVKKTEVQTGGFSKESILPKRNSDKLIARKKDWDPKKYGGFDSPTVAYSVLVVAKVEKGKSKKLKSVKELLGITIMERSSFEKNPIDFLEAKGYKEVKKDLIIKLPKYSLFELENGRKRMLASAGELQKGNELALPSKYVNFLYLASHYEKLKGSPEDNEQKQLFVEQHKHYLDEIIEQISEFSKRVILADANLDKVLSAYNKHRDKPIREQAENIIHLFTLTNLGAPAAFKYFDTTIDRKRYTSTKEVLDATLIHQSITGLYETRIDLSQLGGDGGAEAAAKEAAAKEAAAKEAAAKALEAEAAAKEAAAKEAAAKEAAAKAGGMDPLQLLQPLEAEIKGTKLKAHWNSGATITCVPEAFLEDERPIQTMLIKTIHGEKQQDVYYLTFKVQGRKVEAEVLASPYDYILLNPSDVPWLMKKPLQLTVLVPLHEYQERLLQQTALPKEQKELLQKLFLKYDALWQHWENQVGHRRIKPHNIATGTLAPRPQKQYPINPKAKPSIQIVIDDLLKQGVLIQQNSTMNTPVYPVPKPDGKWRMVLDYREVNKTIPLIAAQNQHSAGILSSIYRGKYKTTLDLTNGFWAHPITPESYWLTAFTWQGKQYCWTRLPQGFLNSPALFNADVVDLLKEIPNVQAYVDDIYISHDDPQEHLEQLEKIFSILLNAGYVVSLKKSEIAQREVEFLGFNITKEGRGLTDTFKQKLLNITPPKDLKQLQSILGKLNFARNFIPNYSELVKPLYTIVAPANGKFISWTEDNSNQLQHIISVLNQADNLEERNPETRLIIKVNSSPSAGYIRYYNEGSKRPIMYVNYIFSKAEAKFTQTEKLLTTMHKGLIKAMDLAMGQEILVYSPIVSMTKIQRTPLPERKALPVRWITWMTYLEDPRIQFHYDKSLPELQQIPNVTEDVIAKTKHPSEFAMVFYTDGSAIKHPDVNKSHSAGMGIAQVQFIPEYKIVHQWSIPLGDHTAQLAEIAAVEFACKKALKISGPVLIVTDSFYVAESANKELPYWKSNGFLNNKKKPLRHVSKWKSIAECLQLKPDIIIMHEKGHQQPMTTLHTEGNNLADKLATQGSYVVHAGKRTADGSEFEKRTADGSEFESPKKKAKVE

SEQ ID NO: 481 - protein, 2195 aa, synthetic construct
  source 1..2195: note = Description of Artificial Sequence: Synthetic polypeptide
MPAAKRVKLDGGDKKYSIGLDIGTNSVGWAVITDEYKVPSKKFKVLGNTDRHSIKKNLIGALLFDSGETAEATRLKRTARRRYTRRKNRICYLQEIFSNEMAKVDDSFFHRLEESFLVEEDKKHERHPIFGNIVDEVAYHEKYPTIYHLRKKLVDSTDKADLRLIYLALAHMIKFRGHFLIEGDLNPDNSDVDKLFIQLVQTYNQLFEENPINASGVDAKAILSARLSKSRRLENLIAQLPGEKKNGLFGNLIALSLGLTPNFKSNFDLAEDAKLQLSKDTYDDDLDNLLAQIGDQYADLFLAAKNLSDAILLSDILRVNTEITKAPLSASMIKRYDEHHQDLTLLKALVRQQLPEKYKEIFFDQSKNGYAGYIDGGASQEEFYKFIKPILEKMDGTEELLVKLNREDLLRKQRTFDNGSIPHQIHLGELHAILRRQEDFYPFLKDNREKIEKILTFRIPYYVGPLARGNSRFAWMTRKSEETITPWNFEEVVDKGASAQSFIERMTNFDKNLPNEKVLPKHSLLYEYFTVYNELTKVKYVTEGMRKPAFLSGEQKKAIVDLLFKTNRKVTVKQLKEDYFKKIECFDSVEISGVEDRFNASLGTYHDLLKIIKDKDFLDNEENEDILEDIVLTLTLFEDREMIEERLKTYAHLFDDKVMKQLKRRRYTGWGRLSRKLINGIRDKQSGKTILDFLKSDGFANRNFMQLIHDDSLTFKEDIQKAQVSGQGDSLHEHIANLAGSPAIKKGILQTVKVVDELVKVMGRHKPENIVIEMARENQTTQKGQKNSRERMKRIEEGIKELGSQILKEHPVENTQLQNEKLYLYYLQNGRDMYVDQELDINRLSDYDVDHIVPQSFLKDDSIDNKVLTRSDKARGKSDNVPSEEVVKKMKNYWRQLLNAKLITQRKFDNLTKAERGGLSELDKAGFIKRQLVETRQITKHVAQILDSRMNTKYDENDKLIREVKVITLKSKLVSDFRKDFQFYKVREINNYHHAHDAYLNAVVGTALIKKYPKLESEFVYGDYKVYDVRKMIAKSEQEIGKATAKYFFYSNIMNFFKTEITLANGEIRKRPLIETNGETGEIVWDKGRDFATVRKVLSMPQVNIVKKTEVQTGGFSKESILPKRNSDKLIARKKDWDPKKYGGFDSPTVAYSVLVVAKVEKGKSKKLKSVKELLGITIMERSSFEKNPIDFLEAKGYKEVKKDLIIKLPKYSLFELENGRKRMLASAGELQKGNELALPSKYVNFLYLASHYEKLKGSPEDNEQKQLFVEQHKHYLDEIIEQISEFSKRVILADANLDKVLSAYNKHRDKPIREQAENIIHLFTLTNLGAPAAFKYFDTTIDRKRYTSTKEVLDATLIHQSITGLYETRIDLSQLGGDGGEAAAKEAAAKEAAAKEAAAKEAAAKEAAAKGGMDPLQLLQPLEAEIKGTKLKAHWNSGATITCVPEAFLEDERPIQTMLIKTIHGEKQQDVYYLTFKVQGRKVEAEVLASPYDYILLNPSDVPWLMKKPLQLTVLVPLHEYQERLLQQTALPKEQKELLQKLFLKYDALWQHWENQVGHRRIKPHNIATGTLAPRPQKQYPINPKAKPSIQIVIDDLLKQGVLIQQNSTMNTPVYPVPKPDGKWRMVLDYREVNKTIPLIAAQNQHSAGILSSIYRGKYKTTLDLTNGFWAHPITPESYWLTAFTWQGKQYCWTRLPQGFLNSPALFNADVVDLLKEIPNVQAYVDDIYISHDDPQEHLEQLEKIFSILLNAGYVVSLKKSEIAQREVEFLGFNITKEGRGLTDTFKQKLLNITPPKDLKQLQSILGKLNFARNFIPNYSELVKPLYTIVAPANGKFISWTEDNSNQLQHIISVLNQADNLEERNPETRLIIKVNSSPSAGYIRYYNEGSKRPIMYVNYIFSKAEAKFTQTEKLLTTMHKGLIKAMDLAMGQEILVYSPIVSMTKIQRTPLPERKALPVRWITWMTYLEDPRIQFHYDKSLPELQQIPNVTEDVIAKTKHPSEFAMVFYTDGSAIKHPDVNKSHSAGMGIAQVQFIPEYKIVHQWSIPLGDHTAQLAEIAAVEFACKKALKISGPVLIVTDSFYVAESANKELPYWKSNGFLNNKKKPLRHVSKWKSIAECLQLKPDIIIMHEKGHQQPMTTLHTEGNNLADKLATQGSYVVHAGKRTADGSEFEKRTADGSEFESPKKKAKVE

SEQ ID NO: 482 - protein, 2176 aa, synthetic construct
  source 1..2176: note = Description of Artificial Sequence: Synthetic polypeptide
MPAAKRVKLDGGDKKYSIGLDIGTNSVGWAVITDEYKVPSKKFKVLGNTDRHSIKKNLIGALLFDSGETAEATRLKRTARRRYTRRKNRICYLQEIFSNEMAKVDDSFFHRLEESFLVEEDKKHERHPIFGNIVDEVAYHEKYPTIYHLRKKLVDSTDKADLRLIYLALAHMIKFRGHFLIEGDLNPDNSDVDKLFIQLVQTYNQLFEENPINASGVDAKAILSARLSKSRRLENLIAQLPGEKKNGLFGNLIALSLGLTPNFKSNFDLAEDAKLQLSKDTYDDDLDNLLAQIGDQYADLFLAAKNLSDAILLSDILRVNTEITKAPLSASMIKRYDEHHQDLTLLKALVRQQLPEKYKEIFFDQSKNGYAGYIDGGASQEEFYKFIKPILEKMDGTEELLVKLNREDLLRKQRTFDNGSIPHQIHLGELHAILRRQEDFYPFLKDNREKIEKILTFRIPYYVGPLARGNSRFAWMTRKSEETITPWNFEEVVDKGASAQSFIERMTNFDKNLPNEKVLPKHSLLYEYFTVYNELTKVKYVTEGMRKPAFLSGEQKKAIVDLLFKTNRKVTVKQLKEDYFKKIECFDSVEISGVEDRFNASLGTYHDLLKIIKDKDFLDNEENEDILEDIVLTLTLFEDREMIEERLKTYAHLFDDKVMKQLKRRRYTGWGRLSRKLINGIRDKQSGKTILDFLKSDGFANRNFMQLIHDDSLTFKEDIQKAQVSGQGDSLHEHIANLAGSPAIKKGILQTVKVVDELVKVMGRHKPENIVIEMARENQTTQKGQKNSRERMKRIEEGIKELGSQILKEHPVENTQLQNEKLYLYYLQNGRDMYVDQELDINRLSDYDVDHIVPQSFLKDDSIDNKVLTRSDKARGKSDNVPSEEVVKKMKNYWRQLLNAKLITQRKFDNLTKAERGGLSELDKAGFIKRQLVETRQITKHVAQILDSRMNTKYDENDKLIREVKVITLKSKLVSDFRKDFQFYKVREINNYHHAHDAYLNAVVGTALIKKYPKLESEFVYGDYKVYDVRKMIAKSEQEIGKATAKYFFYSNIMNFFKTEITLANGEIRKRPLIETNGETGEIVWDKGRDFATVRKVLSMPQVNIVKKTEVQTGGFSKESILPKRNSDKLIARKKDWDPKKYGGFDSPTVAYSVLVVAKVEKGKSKKLKSVKELLGITIMERSSFEKNPIDFLEAKGYKEVKKDLIIKLPKYSLFELENGRKRMLASAGELQKGNELALPSKYVNFLYLASHYEKLKGSPEDNEQKQLFVEQHKHYLDEIIEQISEFSKRVILADANLDKVLSAYNKHRDKPIREQAENIIHLFTLTNLGAPAAFKYFDTTIDRKRYTSTKEVLDATLIHQSITGLYETRIDLSQLGGDGGEAAAKGGSPAPGGMDPLQLLQPLEAEIKGTKLKAHWNSGATITCVPEAFLEDERPIQTMLIKTIHGEKQQDVYYLTFKVQGRKVEAEVLASPYDYILLNPSDVPWLMKKPLQLTVLVPLHEYQERLLQQTALPKEQKELLQKLFLKYDALWQHWENQVGHRRIKPHNIATGTLAPRPQKQYPINPKAKPSIQIVIDDLLKQGVLIQQNSTMNTPVYPVPKPDGKWRMVLDYREVNKTIPLIAAQNQHSAGILSSIYRGKYKTTLDLTNGFWAHPITPESYWLTAFTWQGKQYCWTRLPQGFLNSPALFNADVVDLLKEIPNVQAYVDDIYISHDDPQEHLEQLEKIFSILLNAGYVVSLKKSEIAQREVEFLGFNITKEGRGLTDTFKQKLLNITPPKDLKQLQSILGKLNFARNFIPNYSELVKPLYTIVAPANGKFISWTEDNSNQLQHIISVLNQADNLEERNPETRLIIKVNSSPSAGYIRYYNEGSKRPIMYVNYIFSKAEAKFTQTEKLLTTMHKGLIKAMDLAMGQEILVYSPIVSMTKIQRTPLPERKALPVRWITWMTYLEDPRIQFHYDKSLPELQQIPNVTEDVIAKTKHPSEFAMVFYTDGSAIKHPDVNKSHSAGMGIAQVQFIPEYKIVHQWSIPLGDHTAQLAEIAAVEFACKKALKISGPVLIVTDSFYVAESANKELPYWKSNGFLNNKKKPLRHVSKWKSIAECLQLKPDIIIMHEKGHQQPMTTLHTEGNNLADKLATQGSYVVHAGKRTADGSEFEKRTADGSEFESPKKKAKVE

SEQ ID NO: 483 - protein, 2174 aa, synthetic construct
  source 1..2174: note = Description of Artificial Sequence: Synthetic polypeptide
MPAAKRVKLDGGDKKYSIGLDIGTNSVGWAVITDEYKVPSKKFKVLGNTDRHSIKKNLIGALLFDSGETAEATRLKRTARRRYTRRKNRICYLQEIFSNEMAKVDDSFFHRLEESFLVEEDKKHERHPIFGNIVDEVAYHEKYPTIYHLRKKLVDSTDKADLRLIYLALAHMIKFRGHFLIEGDLNPDNSDVDKLFIQLVQTYNQLFEENPINASGVDAKAILSARLSKSRRLENLIAQLPGEKKNGLFGNLIALSLGLTPNFKSNFDLAEDAKLQLSKDTYDDDLDNLLAQIGDQYADLFLAAKNLSDAILLSDILRVNTEITKAPLSASMIKRYDEHHQDLTLLKALVRQQLPEKYKEIFFDQSKNGYAGYIDGGASQEEFYKFIKPILEKMDGTEELLVKLNREDLLRKQRTFDNGSIPHQIHLGELHAILRRQEDFYPFLKDNREKIEKILTFRIPYYVGPLARGNSRFAWMTRKSEETITPWNFEEVVDKGASAQSFIERMTNFDKNLPNEKVLPKHSLLYEYFTVYNELTKVKYVTEGMRKPAFLSGEQKKAIVDLLFKTNRKVTVKQLKEDYFKKIECFDSVEISGVEDRFNASLGTYHDLLKIIKDKDFLDNEENEDILEDIVLTLTLFEDREMIEERLKTYAHLFDDKVMKQLKRRRYTGWGRLSRKLINGIRDKQSGKTILDFLKSDGFANRNFMQLIHDDSLTFKEDIQKAQVSGQGDSLHEHIANLAGSPAIKKGILQTVKVVDELVKVMGRHKPENIVIEMARENQTTQKGQKNSRERMKRIEEGIKELGSQILKEHPVENTQLQNEKLYLYYLQNGRDMYVDQELDINRLSDYDVDHIVPQSFLKDDSIDNKVLTRSDKARGKSDNVPSEEVVKKMKNYWRQLLNAKLITQRKFDNLTKAERGGLSELDKAGFIKRQLVETRQITKHVAQILDSRMNTKYDENDKLIREVKVITLKSKLVSDFRKDFQFYKVREINNYHHAHDAYLNAVVGTALIKKYPKLESEFVYGDYKVYDVRKMIAKSEQEIGKATAKYFFYSNIMNFFKTEITLANGEIRKRPLIETNGETGEIVWDKGRDFATVRKVLSMPQVNIVKKTEVQTGGFSKESILPKRNSDKLIARKKDWDPKKYGGFDSPTVAYSVLVVAKVEKGKSKKLKSVKELLGITIMERSSFEKNPIDFLEAKGYKEVKKDLIIKLPKYSLFELENGRKRMLASAGELQKGNELALPSKYVNFLYLASHYEKLKGSPEDNEQKQLFVEQHKHYLDEIIEQISEFSKRVILADANLDKVLSAYNKHRDKPIREQAENIIHLFTLTNLGAPAAFKYFDTTIDRKRYTSTKEVLDATLIHQSITGLYETRIDLSQLGGDGGGGSGSSPAPGGMDPLQLLQPLEAEIKGTKLKAHWNSGATITCVPEAFLEDERPIQTMLIKTIHGEKQQDVYYLTFKVQGRKVEAEVLASPYDYILLNPSDVPWLMKKPLQLTVLVPLHEYQERLLQQTALPKEQKELLQKLFLKYDALWQHWENQVGHRRIKPHNIATGTLAPRPQKQYPINPKAKPSIQIVIDDLLKQGVLIQQNSTMNTPVYPVPKPDGKWRMVLDYREVNKTIPLIAAQNQHSAGILSSIYRGKYKTTLDLTNGFWAHPITPESYWLTAFTWQGKQYCWTRLPQGFLNSPALFNADVVDLLKEIPNVQAYVDDIYISHDDPQEHLEQLEKIFSILLNAGYVVSLKKSEIAQREVEFLGFNITKEGRGLTDTFKQKLLNITPPKDLKQLQSILGKLNFARNFIPNYSELVKPLYTIVAPANGKFISWTEDNSNQLQHIISVLNQADNLEERNPETRLIIKVNSSPSAGYIRYYNEGSKRPIMYVNYIFSKAEAKFTQTEKLLTTMHKGLIKAMDLAMGQEILVYSPIVSMTKIQRTPLPERKALPVRWITWMTYLEDPRIQFHYDKSLPELQQIPNVTEDVIAKTKHPSEFAMVFYTDGSAIKHPDVNKSHSAGMGIAQVQFIPEYKIVHQWSIPLGDHTAQLAEIAAVEFACKKALKISGPVLIVTDSFYVAESANKELPYWKSNGFLNNKKKPLRHVSKWKSIAECLQLKPDIIIMHEKGHQQPMTTLHTEGNNLADKLATQGSYVVHAGKRTADGSEFEKRTADGSEFESPKKKAKVE

SEQ ID NO: 484 - protein, 2171 aa, synthetic construct
  source 1..2171: note = Description of Artificial Sequence: Synthetic polypeptide
MPAAKRVKLDGGDKKYSIGLDIGTNSVGWAVITDEYKVPSKKFKVLGNTDRHSIKKNLIGALLFDSGETAEATRLKRTARRRYTRRKNRICYLQEIFSNEMAKVDDSFFHRLEESFLVEEDKKHERHPIFGNIVDEVAYHEKYPTIYHLRKKLVDSTDKADLRLIYLALAHMIKFRGHFLIEGDLNPDNSDVDKLFIQLVQTYNQLFEENPINASGVDAKAILSARLSKSRRLENLIAQLPGEKKNGLFGNLIALSLGLTPNFKSNFDLAEDAKLQLSKDTYDDDLDNLLAQIGDQYADLFLAAKNLSDAILLSDILRVNTEITKAPLSASMIKRYDEHHQDLTLLKALVRQQLPEKYKEIFFDQSKNGYAGYIDGGASQEEFYKFIKPILEKMDGTEELLVKLNREDLLRKQRTFDNGSIPHQIHLGELHAILRRQEDFYPFLKDNREKIEKILTFRIPYYVGPLARGNSRFAWMTRKSEETITPWNFEEVVDKGASAQSFIERMTNFDKNLPNEKVLPKHSLLYEYFTVYNELTKVKYVTEGMRKPAFLSGEQKKAIVDLLFKTNRKVTVKQLKEDYFKKIECFDSVEISGVEDRFNASLGTYHDLLKIIKDKDFLDNEENEDILEDIVLTLTLFEDREMIEERLKTYAHLFDDKVMKQLKRRRYTGWGRLSRKLINGIRDKQSGKTILDFLKSDGFANRNFMQLIHDDSLTFKEDIQKAQVSGQGDSLHEHIANLAGSPAIKKGILQTVKVVDELVKVMGRHKPENIVIEMARENQTTQKGQKNSRERMKRIEEGIKELGSQILKEHPVENTQLQNEKLYLYYLQNGRDMYVDQELDINRLSDYDVDHIVPQSFLKDDSIDNKVLTRSDKARGKSDNVPSEEVVKKMKNYWRQLLNAKLITQRKFDNLTKAERGGLSELDKAGFIKRQLVETRQITKHVAQILDSRMNTKYDENDKLIREVKVITLKSKLVSDFRKDFQFYKVREINNYHHAHDAYLNAVVGTALIKKYPKLESEFVYGDYKVYDVRKMIAKSEQEIGKATAKYFFYSNIMNFFKTEITLANGEIRKRPLIETNGETGEIVWDKGRDFATVRKVLSMPQVNIVKKTEVQTGGFSKESILPKRNSDKLIARKKDWDPKKYGGFDSPTVAYSVLVVAKVEKGKSKKLKSVKELLGITIMERSSFEKNPIDFLEAKGYKEVKKDLIIKLPKYSLFELENGRKRMLASAGELQKGNELALPSKYVNFLYLASHYEKLKGSPEDNEQKQLFVEQHKHYLDEIIEQISEFSKRVILADANLDKVLSAYNKHRDKPIREQAENIIHLFTLTNLGAPAAFKYFDTTIDRKRYTSTKEVLDATLIHQSITGLYETRIDLSQLGGDGGGGGGGGGGMDPLQLLQPLEAEIKGTKLKAHWNSGATITCVPEAFLEDERPIQTMLIKTIHGEKQQDVYYLTFKVQGRKVEAEVLASPYDYILLNPSDVPWLMKKPLQLTVLVPLHEYQERLLQQTALPKEQKELLQKLFLKYDALWQHWENQVGHRRIKPHNIATGTLAPRPQKQYPINPKAKPSIQIVIDDLLKQGVLIQQNSTMNTPVYPVPKPDGKWRMVLDYREVNKTIPLIAAQNQHSAGILSSIYRGKYKTTLDLTNGFWAHPITPESYWLTAFTWQGKQYCWTRLPQGFLNSPALFNADVVDLLKEIPNVQAYVDDIYISHDDPQEHLEQLEKIFSILLNAGYVVSLKKSEIAQREVEFLGFNITKEGRGLTDTFKQKLLNITPPKDLKQLQSILGKLNFARNFIPNYSELVKPLYTIVAPANGKFISWTEDNSNQLQHIISVLNQADNLEERNPETRLIIKVNSSPSAGYIRYYNEGSKRPIMYVNYIFSKAEAKFTQTEKLLTTMHKGLIKAMDLAMGQEILVYSPIVSMTKIQRTPLPERKALPVRWITWMTYLEDPRIQFHYDKSLPELQQIPNVTEDVIAKTKHPSEFAMVFYTDGSAIKHPDVNKSHSAGMGIAQVQFIPEYKIVHQWSIPLGDHTAQLAEIAAVEFACKKALKISGPVLIVTDSFYVAESANKELPYWKSNGFLNNKKKPLRHVSKWKSIAECLQLKPDIIIMHEKGHQQPMTTLHTEGNNLADKLATQGSYVVHAGKRTADGSEFEKRTADGSEFESPKKKAKVE

SEQ ID NO: 485 - protein, 2176 aa, synthetic construct
  source 1..2176: note = Description of Artificial Sequence: Synthetic polypeptide
MPAAKRVKLDGGDKKYSIGLDIGTNSVGWAVITDEYKVPSKKFKVLGNTDRHSIKKNLIGALLFDSGETAEATRLKRTARRRYTRRKNRICYLQEIFSNEMAKVDDSFFHRLEESFLVEEDKKHERHPIFGNIVDEVAYHEKYPTIYHLRKKLVDSTDKADLRLIYLALAHMIKFRGHFLIEGDLNPDNSDVDKLFIQLVQTYNQLFEENPINASGVDAKAILSARLSKSRRLENLIAQLPGEKKNGLFGNLIALSLGLTPNFKSNFDLAEDAKLQLSKDTYDDDLDNLLAQIGDQYADLFLAAKNLSDAILLSDILRVNTEITKAPLSASMIKRYDEHHQDLTLLKALVRQQLPEKYKEIFFDQSKNGYAGYIDGGASQEEFYKFIKPILEKMDGTEELLVKLNREDLLRKQRTFDNGSIPHQIHLGELHAILRRQEDFYPFLKDNREKIEKILTFRIPYYVGPLARGNSRFAWMTRKSEETITPWNFEEVVDKGASAQSFIERMTNFDKNLPNEKVLPKHSLLYEYFTVYNELTKVKYVTEGMRKPAFLSGEQKKAIVDLLFKTNRKVTVKQLKEDYFKKIECFDSVEISGVEDRFNASLGTYHDLLKIIKDKDFLDNEENEDILEDIVLTLTLFEDREMIEERLKTYAHLFDDKVMKQLKRRRYTGWGRLSRKLINGIRDKQSGKTILDFLKSDGFANRNFMQLIHDDSLTFKEDIQKAQVSGQGDSLHEHIANLAGSPAIKKGILQTVKVVDELVKVMGRHKPENIVIEMARENQTTQKGQKNSRERMKRIEEGIKELGSQILKEHPVENTQLQNEKLYLYYLQNGRDMYVDQELDINRLSDYDVDHIVPQSFLKDDSIDNKVLTRSDKARGKSDNVPSEEVVKKMKNYWRQLLNAKLITQRKFDNLTKAERGGLSELDKAGFIKRQLVETRQITKHVAQILDSRMNTKYDENDKLIREVKVITLKSKLVSDFRKDFQFYKVREINNYHHAHDAYLNAVVGTALIKKYPKLESEFVYGDYKVYDVRKMIAKSEQEIGKATAKYFFYSNIMNFFKTEITLANGEIRKRPLIETNGETGEIVWDKGRDFATVRKVLSMPQVNIVKKTEVQTGGFSKESILPKRNSDKLIARKKDWDPKKYGGFDSPTVAYSVLVVAKVEKGKSKKLKSVKELLGITIMERSSFEKNPIDFLEAKGYKEVKKDLIIKLPKYSLFELENGRKRMLASAGELQKGNELALPSKYVNFLYLASHYEKLKGSPEDNEQKQLFVEQHKHYLDEIIEQISEFSKRVILADANLDKVLSAYNKHRDKPIREQAENIIHLFTLTNLGAPAAFKYFDTTIDRKRYTSTKEVLDATLIHQSITGLYETRIDLSQLGGDGGGSSGGGEAAAKGGMDPLQLLQPLEAEIKGTKLKAHWNSGATITCVPEAFLEDERPIQTMLIKTIHGEKQQDVYYLTFKVQGRKVEAEVLASPYDYILLNPSDVPWLMKKPLQLTVLVPLHEYQERLLQQTALPKEQKELLQKLFLKYDALWQHWENQVGHRRIKPHNIATGTLAPRPQKQYPINPKAKPSIQIVIDDLLKQGVLIQQNSTMNTPVYPVPKPDGKWRMVLDYREVNKTIPLIAAQNQHSAGILSSIYRGKYKTTLDLTNGFWAHPITPESYWLTAFTWQGKQYCWTRLPQGFLNSPALFNADVVDLLKEIPNVQAYVDDIYISHDDPQEHLEQLEKIFSILLNAGYVVSLKKSEIAQREVEFLGFNITKEGRGLTDTFKQKLLNITPPKDLKQLQSILGKLNFARNFIPNYSELVKPLYTIVAPANGKFISWTEDNSNQLQHIISVLNQADNLEERNPETRLIIKVNSSPSAGYIRYYNEGSKRPIMYVNYIFSKAEAKFTQTEKLLTTMHKGLIKAMDLAMGQEILVYSPIVSMTKIQRTPLPERKALPVRWITWMTYLEDPRIQFHYDKSLPELQQIPNVTEDVIAKTKHPSEFAMVFYTDGSAIKHPDVNKSHSAGMGIAQVQFIPEYKIVHQWSIPLGDHTAQLAEIAAVEFACKKALKISGPVLIVTDSFYVAESANKELPYWKSNGFLNNKKKPLRHVSKWKSIAECLQLKPDIIIMHEKGHQQPMTTLHTEGNNLADKLATQGSYVVHAGKRTADGSEFEKRTADGSEFESPKKKAKVE

SEQ ID NO: 486 - protein, 2176 aa, synthetic construct
  source 1..2176: note = Description of Artificial Sequence: Synthetic polypeptide
MPAAKRVKLDGGDKKYSIGLDIGTNSVGWAVITDEYKVPSKKFKVLGNTDRHSIKKNLIGALLFDSGETAEATRLKRTARRRYTRRKNRICYLQEIFSNEMAKVDDSFFHRLEESFLVEEDKKHERHPIFGNIVDEVAYHEKYPTIYHLRKKLVDSTDKADLRLIYLALAHMIKFRGHFLIEGDLNPDNSDVDKLFIQLVQTYNQLFEENPINASGVDAKAILSARLSKSRRLENLIAQLPGEKKNGLFGNLIALSLGLTPNFKSNFDLAEDAKLQLSKDTYDDDLDNLLAQIGDQYADLFLAAKNLSDAILLSDILRVNTEITKAPLSASMIKRYDEHHQDLTLLKALVRQQLPEKYKEIFFDQSKNGYAGYIDGGASQEEFYKFIKPILEKMDGTEELLVKLNREDLLRKQRTFDNGSIPHQIHLGELHAILRRQEDFYPFLKDNREKIEKILTFRIPYYVGPLARGNSRFAWMTRKSEETITPWNFEEVVDKGASAQSFIERMTNFDKNLPNEKVLPKHSLLYEYFTVYNELTKVKYVTEGMRKPAFLSGEQKKAIVDLLFKTNRKVTVKQLKEDYFKKIECFDSVEISGVEDRFNASLGTYHDLLKIIKDKDFLDNEENEDILEDIVLTLTLFEDREMIEERLKTYAHLFDDKVMKQLKRRRYTGWGRLSRKLINGIRDKQSGKTILDFLKSDGFANRNFMQLIHDDSLTFKEDIQKAQVSGQGDSLHEHIANLAGSPAIKKGILQTVKVVDELVKVMGRHKPENIVIEMARENQTTQKGQKNSRERMKRIEEGIKELGSQILKEHPVENTQLQNEKLYLYYLQNGRDMYVDQELDINRLSDYDVDHIVPQSFLKDDSIDNKVLTRSDKARGKSDNVPSEEVVKKMKNYWRQLLNAKLITQRKFDNLTKAERGGLSELDKAGFIKRQLVETRQITKHVAQILDSRMNTKYDENDKLIREVKVITLKSKLVSDFRKDFQFYKVREINNYHHAHDAYLNAVVGTALIKKYPKLESEFVYGDYKVYDVRKMIAKSEQEIGKATAKYFFYSNIMNFFKTEITLANGEIRKRPLIETNGETGEIVWDKGRDFATVRKVLSMPQVNIVKKTEVQTGGFSKESILPKRNSDKLIARKKDWDPKKYGGFDSPTVAYSVLVVAKVEKGKSKKLKSVKELLGITIMERSSFEKNPIDFLEAKGYKEVKKDLIIKLPKYSLFELENGRKRMLASAGELQKGNELALPSKYVNFLYLASHYEKLKGSPEDNEQKQLFVEQHKHYLDEIIEQISEFSKRVILADANLDKVLSAYNKHRDKPIREQAENIIHLFTLTNLGAPAAFKYFDTTIDRKRYTSTKEVLDATLIHQSITGLYETRIDLSQLGGDGGPAPAPAPAPAPGGMDPLQLLQPLEAEIKGTKLKAHWNSGATITCVPEAFLEDERPIQTMLIKTIHGEKQQDVYYLTFKVQGRKVEAEVLASPYDYILLNPSDVPWLMKKPLQLTVLVPLHEYQERLLQQTALPKEQKELLQKLFLKYDALWQHWENQVGHRRIKPHNIATGTLAPRPQKQYPINPKAKPSIQIVIDDLLKQGVLIQQNSTMNTPVYPVPKPDGKWRMVLDYREVNKTIPLIAAQNQHSAGILSSIYRGKYKTTLDLTNGFWAHPITPESYWLTAFTWQGKQYCWTRLPQGFLNSPALFNADVVDLLKEIPNVQAYVDDIYISHDDPQEHLEQLEKIFSILLNAGYVVSLKKSEIAQREVEFLGFNITKEGRGLTDTFKQKLLNITPPKDLKQLQSILGKLNFARNFIPNYSELVKPLYTIVAPANGKFISWTEDNSNQLQHIISVLNQADNLEERNPETRLIIKVNSSPSAGYIRYYNEGSKRPIMYVNYIFSKAEAKFTQTEKLLTTMHKGLIKAMDLAMGQEILVYSPIVSMTKIQRTPLPERKALPVRWITWMTYLEDPRIQFHYDKSLPELQQIPNVTEDVIAKTKHPSEFAMVFYTDGSAIKHPDVNKSHSAGMGIAQVQFIPEYKIVHQWSIPLGDHTAQLAEIAAVEFACKKALKISGPVLIVTDSFYVAESANKELPYWKSNGFLNNKKKPLRHVSKWKSIAECLQLKPDIIIMHEKGHQQPMTTLHTEGNNLADKLATQGSYVVHAGKRTADGSEFEKRTADGSEFESPKKKAKVE

SEQ ID NO: 487 - protein, 2177 aa, synthetic construct
  source 1..2177: note = Description of Artificial Sequence: Synthetic polypeptide
MPAAKRVKLDGGDKKYSIGLDIGTNSVGWAVITDEYKVPSKKFKVLGNTDRHSIKKNLIGALLFDSGETAEATRLKRTARRRYTRRKNRICYLQEIFSNEMAKVDDSFFHRLEESFLVEEDKKHERHPIFGNIVDEVAYHEKYPTIYHLRKKLVDSTDKADLRLIYLALAHMIKFRGHFLIEGDLNPDNSDVDKLFIQLVQTYNQLFEENPINASGVDAKAILSARLSKSRRLENLIAQLPGEKKNGLFGNLIALSLGLTPNFKSNFDLAEDAKLQLSKDTYDDDLDNLLAQIGDQYADLFLAAKNLSDAILLSDILRVNTEITKAPLSASMIKRYDEHHQDLTLLKALVRQQLPEKYKEIFFDQSKNGYAGYIDGGASQEEFYKFIKPILEKMDGTEELLVKLNREDLLRKQRTFDNGSIPHQIHLGELHAILRRQEDFYPFLKDNREKIEKILTFRIPYYVGPLARGNSRFAWMTRKSEETITPWNFEEVVDKGASAQSFIERMTNFDKNLPNEKVLPKHSLLYEYFTVYNELTKVKYVTEGMRKPAFLSGEQKKAIVDLLFKTNRKVTVKQLKEDYFKKIECFDSVEISGVEDRFNASLGTYHDLLKIIKDKDFLDNEENEDILEDIVLTLTLFEDREMIEERLKTYAHLFDDKVMKQLKRRRYTGWGRLSRKLINGIRDKQSGKTILDFLKSDGFANRNFMQLIHDDSLTFKEDIQKAQVSGQGDSLHEHIANLAGSPAIKKGILQTVKVVDELVKVMGRHKPENIVIEMARENQTTQKGQKNSRERMKRIEEGIKELGSQILKEHPVENTQLQNEKLYLYYLQNGRDMYVDQELDINRLSDYDVDHIVPQSFLKDDSIDNKVLTRSDKARGKSDNVPSEEVVKKMKNYWRQLLNAKLITQRKFDNLTKAERGGLSELDKAGFIKRQLVETRQITKHVAQILDSRMNTKYDENDKLIREVKVITLKSKLVSDFRKDFQFYKVREINNYHHAHDAYLNAVVGTALIKKYPKLESEFVYGDYKVYDVRKMIAKSEQEIGKATAKYFFYSNIMNFFKTEITLANGEIRKRPLIETNGETGEIVWDKGRDFATVRKVLSMPQVNIVKKTEVQTGGFSKESILPKRNSDKLIARKKDWDPKKYGGFDSPTVAYSVLVVAKVEKGKSKKLKSVKELLGITIMERSSFEKNPIDFLEAKGYKEVKKDLIIKLPKYSLFELENGRKRMLASAGELQKGNELALPSKYVNFLYLASHYEKLKGSPEDNEQKQLFVEQHKHYLDEIIEQISEFSKRVILADANLDKVLSAYNKHRDKPIREQAENIIHLFTLTNLGAPAAFKYFDTTIDRKRYTSTKEVLDATLIHQSITGLYETRIDLSQLGGDGGGGSGGSGGSGGSGGMDPLQLLQPLEAEIKGTKLKAHWNSGATITCVPEAFLEDERPIQTMLIKTIHGEKQQDVYYLTFKVQGRKVEAEVLASPYDYILLNPSDVPWLMKKPLQLTVLVPLHEYQERLLQQTALPKEQKELLQKLFLKYDALWQHWENQVGHRRIKPHNIATGTLAPRPQKQYPINPKAKPSIQIVIDDLLKQGVLIQQNSTMNTPVYPVPKPDGKWRMVLDYREVNKTIPLIAAQNQHSAGILSSIYRGKYKTTLDLTNGFWAHPITPESYWLTAFTWQGKQYCWTRLPQGFLNSPALFNADVVDLLKEIPNVQAYVDDIYISHDDPQEHLEQLEKIFSILLNAGYVVSLKKSEIAQREVEFLGFNITKEGRGLTDTFKQKLLNITPPKDLKQLQSILGKLNFARNFIPNYSELVKPLYTIVAPANGKFISWTEDNSNQLQHIISVLNQADNLEERNPETRLIIKVNSSPSAGYIRYYNEGSKRPIMYVNYIFSKAEAKFTQTEKLLTTMHKGLIKAMDLAMGQEILVYSPIVSMTKIQRTPLPERKALPVRWITWMTYLEDPRIQFHYDKSLPELQQIPNVTEDVIAKTKHPSEFAMVFYTDGSAIKHPDVNKSHSAGMGIAQVQFIPEYKIVHQWSIPLGDHTAQLAEIAAVEFACKKALKISGPVLIVTDSFYVAESANKELPYWKSNGFLNNKKKPLRHVSKWKSIAECLQLKPDIIIMHEKGHQQPMTTLHTEGNNLADKLATQGSYVVHAGKRTADGSEFEKRTADGSEFESPKKKAKVE

SEQ ID NO: 488 - protein, 2171 aa, synthetic construct
  source 1..2171: note = Description of Artificial Sequence: Synthetic polypeptide
MPAAKRVKLDGGDKKYSIGLDIGTNSVGWAVITDEYKVPSKKFKVLGNTDRHSIKKNLIGALLFDSGETAEATRLKRTARRRYTRRKNRICYLQEIFSNEMAKVDDSFFHRLEESFLVEEDKKHERHPIFGNIVDEVAYHEKYPTIYHLRKKLVDSTDKADLRLIYLALAHMIKFRGHFLIEGDLNPDNSDVDKLFIQLVQTYNQLFEENPINASGVDAKAILSARLSKSRRLENLIAQLPGEKKNGLFGNLIALSLGLTPNFKSNFDLAEDAKLQLSKDTYDDDLDNLLAQIGDQYADLFLAAKNLSDAILLSDILRVNTEITKAPLSASMIKRYDEHHQDLTLLKALVRQQLPEKYKEIFFDQSKNGYAGYIDGGASQEEFYKFIKPILEKMDGTEELLVKLNREDLLRKQRTFDNGSIPHQIHLGELHAILRRQEDFYPFLKDNREKIEKILTFRIPYYVGPLARGNSRFAWMTRKSEETITPWNFEEVVDKGASAQSFIERMTNFDKNLPNEKVLPKHSLLYEYFTVYNELTKVKYVTEGMRKPAFLSGEQKKAIVDLLFKTNRKVTVKQLKEDYFKKIECFDSVEISGVEDRFNASLGTYHDLLKIIKDKDFLDNEENEDILEDIVLTLTLFEDREMIEERLKTYAHLFDDKVMKQLKRRRYTGWGRLSRKLINGIRDKQSGKTILDFLKSDGFANRNFMQLIHDDSLTFKEDIQKAQVSGQGDSLHEHIANLAGSPAIKKGILQTVKVVDELVKVMGRHKPENIVIEMARENQTTQKGQKNSRERMKRIEEGIKELGSQILKEHPVENTQLQNEKLYLYYLQNGRDMYVDQELDINRLSDYDVDHIVPQSFLKDDSIDNKVLTRSDKARGKSDNVPSEEVVKKMKNYWRQLLNAKLITQRKFDNLTKAERGGLSELDKAGFIKRQLVETRQITKHVAQILDSRMNTKYDENDKLIREVKVITLKSKLVSDFRKDFQFYKVREINNYHHAHDAYLNAVVGTALIKKYPKLESEFVYGDYKVYDVRKMIAKSEQEIGKATAKYFFYSNIMNFFKTEITLANGEIRKRPLIETNGETGEIVWDKGRDFATVRKVLSMPQVNIVKKTEVQTGGFSKESILPKRNSDKLIARKKDWDPKKYGGFDSPTVAYSVLVVAKVEKGKSKKLKSVKELLGITIMERSSFEKNPIDFLEAKGYKEVKKDLIIKLPKYSLFELENGRKRMLASAGELQKGNELALPSKYVNFLYLASHYEKLKGSPEDNEQKQLFVEQHKHYLDEIIEQISEFSKRVILADANLDKVLSAYNKHRDKPIREQAENIIHLFTLTNLGAPAAFKYFDTTIDRKRYTSTKEVLDATLIHQSITGLYETRIDLSQLGGDGGGGGGGSGGMDPLQLLQPLEAEIKGTKLKAHWNSGATITCVPEAFLEDERPIQTMLIKTIHGEKQQDVYYLTFKVQGRKVEAEVLASPYDYILLNPSDVPWLMKKPLQLTVLVPLHEYQERLLQQTALPKEQKELLQKLFLKYDALWQHWENQVGHRRIKPHNIATGTLAPRPQKQYPINPKAKPSIQIVIDDLLKQGVLIQQNSTMNTPVYPVPKPDGKWRMVLDYREVNKTIPLIAAQNQHSAGILSSIYRGKYKTTLDLTNGFWAHPITPESYWLTAFTWQGKQYCWTRLPQGFLNSPALFNADVVDLLKEIPNVQAYVDDIYISHDDPQEHLEQLEKIFSILLNAGYVVSLKKSEIAQREVEFLGFNITKEGRGLTDTFKQKLLNITPPKDLKQLQSILGKLNFARNFIPNYSELVKPLYTIVAPANGKFISWTEDNSNQLQHIISVLNQADNLEERNPETRLIIKVNSSPSAGYIRYYNEGSKRPIMYVNYIFSKAEAKFTQTEKLLTTMHKGLIKAMDLAMGQEILVYSPIVSMTKIQRTPLPERKALPVRWITWMTYLEDPRIQFHYDKSLPELQQIPNVTEDVIAKTKHPSEFAMVFYTDGSAIKHPDVNKSHSAGMGIAQVQFIPEYKIVHQWSIPLGDHTAQLAEIAAVEFACKKALKISGPVLIVTDSFYVAESANKELPYWKSNGFLNNKKKPLRHVSKWKSIAECLQLKPDIIIMHEKGHQQPMTTLHTEGNNLADKLATQGSYVVHAGKRTADGSEFEKRTADGSEFESPKKKAKVE

SEQ ID NO: 489 - protein, 2211 aa, synthetic construct
  source 1..2211: note = Description of Artificial Sequence: Synthetic polypeptide
MPAAKRVKLDGGDKKYSIGLDIGTNSVGWAVITDEYKVPSKKFKVLGNTDRHSIKKNLIGALLFDSGETAEATRLKRTARRRYTRRKNRICYLQEIFSNEMAKVDDSFFHRLEESFLVEEDKKHERHPIFGNIVDEVAYHEKYPTIYHLRKKLVDSTDKADLRLIYLALAHMIKFRGHFLIEGDLNPDNSDVDKLFIQLVQTYNQLFEENPINASGVDAKAILSARLSKSRRLENLIAQLPGEKKNGLFGNLIALSLGLTPNFKSNFDLAEDAKLQLSKDTYDDDLDNLLAQIGDQYADLFLAAKNLSDAILLSDILRVNTEITKAPLSASMIKRYDEHHQDLTLLKALVRQQLPEKYKEIFFDQSKNGYAGYIDGGASQEEFYKFIKPILEKMDGTEELLVKLNREDLLRKQRTFDNGSIPHQIHLGELHAILRRQEDFYPFLKDNREKIEKILTFRIPYYVGPLARGNSRFAWMTRKSEETITPWNFEEVVDKGASAQSFIERMTNFDKNLPNEKVLPKHSLLYEYFTVYNELTKVKYVTEGMRKPAFLSGEQKKAIVDLLFKTNRKVTVKQLKEDYFKKIECFDSVEISGVEDRFNASLGTYHDLLKIIKDKDFLDNEENEDILEDIVLTLTLFEDREMIEERLKTYAHLFDDKVMKQLKRRRYTGWGRLSRKLINGIRDKQSGKTILDFLKSDGFANRNFMQLIHDDSLTFKEDIQKAQVSGQGDSLHEHIANLAGSPAIKKGILQTVKVVDELVKVMGRHKPENIVIEMARENQTTQKGQKNSRERMKRIEEGIKELGSQILKEHPVENTQLQNEKLYLYYLQNGRDMYVDQELDINRLSDYDVDHIVPQSFLKDDSIDNKVLTRSDKARGKSDNVPSEEVVKKMKNYWRQLLNAKLITQRKFDNLTKAERGGLSELDKAGFIKRQLVETRQITKHVAQILDSRMNTKYDENDKLIREVKVITLKSKLVSDFRKDFQFYKVREINNYHHAHDAYLNAVVGTALIKKYPKLESEFVYGDYKVYDVRKMIAKSEQEIGKATAKYFFYSNIMNFFKTEITLANGEIRKRPLIETNGETGEIVWDKGRDFATVRKVLSMPQVNIVKKTEVQTGGFSKESILPKRNSDKLIARKKDWDPKKYGGFDSPTVAYSVLVVAKVEKGKSKKLKSVKELLGITIMERSSFEKNPIDFLEAKGYKEVKKDLIIKLPKYSLFELENGRKRMLASAGELQKGNELALPSKYVNFLYLASHYEKLKGSPEDNEQKQLFVEQHKHYLDEIIEQISEFSKRVILADANLDKVLSAYNKHRDKPIREQAENIIHLFTLTNLGAPAAFKYFDTTIDRKRYTSTKEVLDATLIHQSITGLYETRIDLSQLGGDGGAEAAAKEAAAKEAAAKEAAAKALEAEAAAKEAAAKEAAAKEAAAKAGGMDPLQLLQPLEAEIKGTKLKAHWNSGATITCVPQAFLEEEVPIKNIWIKTIHGEKEQPVYYLTFKIQGRKVEAEVISSPYDYILVSPSDIPWLMKKPLQLTTLVPLQEYEERLLKQTMLTGSYKEKLQSLFLKYDALWQHWENQVGHRRIKPHHIATGTVNPRPQKQYPINPKAKASIQTVINDLLKQGVLIQQNSIMNTPVYPVPKPDGKWRMVLDYREVNKTIPLIAAQNQHSAGILSSIFRGKYKTTLDLSNGFWAHSITPESYWLTAFTWLGQQYCWTRLPQGFLNSPALFTADVVDLLKEVPNVQVYVDDIYISHDDPREHLEQLEKVFSLLLNAGYVVSLKKSEIAQHEVEFLGFNITKEGRGLTETFKQKLLNITPPRDLKQLQSILGLLNFARNFIPNFSELVKPLYNIIATANGKYITWTTDNSQQLQNIISMLNSAENLEERNPEVRLIMKVNTSPSAGYIRFYNEFAKRPIMYLNYVYTKAEVKFTNTEKLLTTIHKGLIKALDLGMGQEILVYSPIVSMTKIQKTPLPERKALPIRWITWMSYLEDPRIQFHYDKTLPELQQVPTVTDDIIAKIKHPSEFSMVFYTDGSAIKHPNVNKSHNAGMGIAQVQFKPEFTVINTWSIPLGDHTAQLAEVAAVEFACKKALKIDGPVLIVTDSFYVAESVNKELPYWQSNGFFNNKKKPLKHVSKWKSIADCIQLKPDIIIIHEKGHQPTASTFHTEGNNLADKLATQGSYVVNAGKRTADGSEFEKRTADGSEFESPKKKAKVE

SEQ ID NO: 490 - protein, 2190 aa, synthetic construct
  source 1..2190: note = Description of Artificial Sequence: Synthetic polypeptide
MPAAKRVKLDGGDKKYSIGLDIGTNSVGWAVITDEYKVPSKKFKVLGNTDRHSIKKNLIGALLFDSGETAEATRLKRTARRRYTRRKNRICYLQEIFSNEMAKVDDSFFHRLEESFLVEEDKKHERHPIFGNIVDEVAYHEKYPTIYHLRKKLVDSTDKADLRLIYLALAHMIKFRGHFLIEGDLNPDNSDVDKLFIQLVQTYNQLFEENPINASGVDAKAILSARLSKSRRLENLIAQLPGEKKNGLFGNLIALSLGLTPNFKSNFDLAEDAKLQLSKDTYDDDLDNLLAQIGDQYADLFLAAKNLSDAILLSDILRVNTEITKAPLSASMIKRYDEHHQDLTLLKALVRQQLPEKYKEIFFDQSKNGYAGYIDGGASQEEFYKFIKPILEKMDGTEELLVKLNREDLLRKQRTFDNGSIPHQIHLGELHAILRRQEDFYPFLKDNREKIEKILTFRIPYYVGPLARGNSRFAWMTRKSEETITPWNFEEVVDKGASAQSFIERMTNFDKNLPNEKVLPKHSLLYEYFTVYNELTKVKYVTEGMRKPAFLSGEQKKAIVDLLFKTNRKVTVKQLKEDYFKKIECFDSVEISGVEDRFNASLGTYHDLLKIIKDKDFLDNEENEDILEDIVLTLTLFEDREMIEERLKTYAHLFDDKVMKQLKRRRYTGWGRLSRKLINGIRDKQSGKTILDFLKSDGFANRNFMQLIHDDSLTFKEDIQKAQVSGQGDSLHEHIANLAGSPAIKKGILQTVKVVDELVKVMGRHKPENIVIEMARENQTTQKGQKNSRERMKRIEEGIKELGSQILKEHPVENTQLQNEKLYLYYLQNGRDMYVDQELDINRLSDYDVDHIVPQSFLKDDSIDNKVLTRSDKARGKSDNVPSEEVVKKMKNYWRQLLNAKLITQRKFDNLTKAERGGLSELDKAGFIKRQLVETRQITKHVAQILDSRMNTKYDENDKLIREVKVITLKSKLVSDFRKDFQFYKVREINNYHHAHDAYLNAVVGTALIKKYPKLESEFVYGDYKVYDVRKMIAKSEQEIGKATAKYFFYSNIMNFFKTEITLANGEIRKRPLIETNGETGEIVWDKGRDFATVRKVLSMPQVNIVKKTEVQTGGFSKESILPKRNSDKLIARKKDWDPKKYGGFDSPTVAYSVLVVAKVEKGKSKKLKSVKELLGITIMERSSFEKNPIDFLEAKGYKEVKKDLIIKLPKYSLFELENGRKRMLASAGELQKGNELALPSKYVNFLYLASHYEKLKGSPEDNEQKQLFVEQHKHYLDEIIEQISEFSKRVILADANLDKVLSAYNKHRDKPIREQAENIIHLFTLTNLGAPAAFKYFDTTIDRKRYTSTKEVLDATLIHQSITGLYETRIDLSQLGGDGGEAAAKEAAAKEAAAKEAAAKEAAAKGGMDPLQLLQPLEAEIKGTKLKAHWNSGATITCVPQAFLEEEVPIKNIWIKTIHGEKEQPVYYLTFKIQGRKVEAEVISSPYDYILVSPSDIPWLMKKPLQLTTLVPLQEYEERLLKQTMLTGSYKEKLQSLFLKYDALWQHWENQVGHRRIKPHHIATGTVNPRPQKQYPINPKAKASIQTVINDLLKQGVLIQQNSIMNTPVYPVPKPDGKWRMVLDYREVNKTIPLIAAQNQHSAGILSSIFRGKYKTTLDLSNGFWAHSITPESYWLTAFTWLGQQYCWTRLPQGFLNSPALFTADVVDLLKEVPNVQVYVDDIYISHDDPREHLEQLEKVFSLLLNAGYVVSLKKSEIAQHEVEFLGFNITKEGRGLTETFKQKLLNITPPRDLKQLQSILGLLNFARNFIPNFSELVKPLYNIIATANGKYITWTTDNSQQLQNIISMLNSAENLEERNPEVRLIMKVNTSPSAGYIRFYNEFAKRPIMYLNYVYTKAEVKFTNTEKLLTTIHKGLIKALDLGMGQEILVYSPIVSMTKIQKTPLPERKALPIRWITWMSYLEDPRIQFHYDKTLPELQQVPTVTDDIIAKIKHPSEFSMVFYTDGSAIKHPNVNKSHNAGMGIAQVQFKPEFTVINTWSIPLGDHTAQLAEVAAVEFACKKALKIDGPVLIVTDSFYVAESVNKELPYWQSNGFFNNKKKPLKHVSKWKSIADCIQLKPDIIIIHEKGHQPTASTFHTEGNNLADKLATQGSYVVNAGKRTADGSEFEKRTADGSEFESPKKKAKVE

SEQ ID NO: 491 - protein, 2176 aa, synthetic construct
  source 1..2176: note = Description of Artificial Sequence: Synthetic polypeptide
MPAAKRVKLDGGDKKYSIGLDIGTNSVGWAVITDEYKVPSKKFKVLGNTDRHSIKKNLIGALLFDSGETAEATRLKRTARRRYTRRKNRICYLQEIFSNEMAKVDDSFFHRLEESFLVEEDKKHERHPIFGNIVDEVAYHEKYPTIYHLRKKLVDSTDKADLRLIYLALAHMIKFRGHFLIEGDLNPDNSDVDKLFIQLVQTYNQLFEENPINASGVDAKAILSARLSKSRRLENLIAQLPGEKKNGLFGNLIALSLGLTPNFKSNFDLAEDAKLQLSKDTYDDDLDNLLAQIGDQYADLFLAAKNLSDAILLSDILRVNTEITKAPLSASMIKRYDEHHQDLTLLKALVRQQLPEKYKEIFFDQSKNGYAGYIDGGASQEEFYKFIKPILEKMDGTEELLVKLNREDLLRKQRTFDNGSIPHQIHLGELHAILRRQEDFYPFLKDNREKIEKILTFRIPYYVGPLARGNSRFAWMTRKSEETITPWNFEEVVDKGASAQSFIERMTNFDKNLPNEKVLPKHSLLYEYFTVYNELTKVKYVTEGMRKPAFLSGEQKKAIVDLLFKTNRKVTVKQLKEDYFKKIECFDSVEISGVEDRFNASLGTYHDLLKIIKDKDFLDNEENEDILEDIVLTLTLFEDREMIEERLKTYAHLFDDKVMKQLKRRRYTGWGRLSRKLINGIRDKQSGKTILDFLKSDGFANRNFMQLIHDDSLTFKEDIQKAQVSGQGDSLHEHIANLAGSPAIKKGILQTVKVVDELVKVMGRHKPENIVIEMARENQTTQKGQKNSRERMKRIEEGIKELGSQILKEHPVENTQLQNEKLYLYYLQNGRDMYVDQELDINRLSDYDVDHIVPQSFLKDDSIDNKVLTRSDKARGKSDNVPSEEVVKKMKNYWRQLLNAKLITQRKFDNLTKAERGGLSELDKAGFIKRQLVETRQITKHVAQILDSRMNTKYDENDKLIREVKVITLKSKLVSDFRKDFQFYKVREINNYHHAHDAYLNAVVGTALIKKYPKLESEFVYGDYKVYDVRKMIAKSEQEIGKATAKYFFYSNIMNFFKTEITLANGEIRKRPLIETNGETGEIVWDKGRDFATVRKVLSMPQVNIVKKTEVQTGGFSKESILPKRNSDKLIARKKDWDPKKYGGFDSPTVAYSVLVVAKVEKGKSKKLKSVKELLGITIMERSSFEKNPIDFLEAKGYKEVKKDLIIKLPKYSLFELENGRKRMLASAGELQKGNELALPSKYVNFLYLASHYEKLKGSPEDNEQKQLFVEQHKHYLDEIIEQISEFSKRVILADANLDKVLSAYNKHRDKPIREQAENIIHLFTLTNLGAPAAFKYFDTTIDRKRYTSTKEVLDATLIHQSITGLYETRIDLSQLGGDGGEAAAKGGGPAPGGMDPLQLLQPLEAEIKGTKLKAHWNSGATITCVPQAFLEEEVPIKNIWIKTIHGEKEQPVYYLTFKIQGRKVEAEVISSPYDYILVSPSDIPWLMKKPLQLTTLVPLQEYEERLLKQTMLTGSYKEKLQSLFLKYDALWQHWENQVGHRRIKPHHIATGTVNPRPQKQYPINPKAKASIQTVINDLLKQGVLIQQNSIMNTPVYPVPKPDGKWRMVLDYREVNKTIPLIAAQNQHSAGILSSIFRGKYKTTLDLSNGFWAHSITPESYWLTAFTWLGQQYCWTRLPQGFLNSPALFTADVVDLLKEVPNVQVYVDDIYISHDDPREHLEQLEKVFSLLLNAGYVVSLKKSEIAQHEVEFLGFNITKEGRGLTETFKQKLLNITPPRDLKQLQSILGLLNFARNFIPNFSELVKPLYNIIATANGKYITWTTDNSQQLQNIISMLNSAENLEERNPEVRLIMKVNTSPSAGYIRFYNEFAKRPIMYLNYVYTKAEVKFTNTEKLLTTIHKGLIKALDLGMGQEILVYSPIVSMTKIQKTPLPERKALPIRWITWMSYLEDPRIQFHYDKTLPELQQVPTVTDDIIAKIKHPSEFSMVFYTDGSAIKHPNVNKSHNAGMGIAQVQFKPEFTVINTWSIPLGDHTAQLAEVAAVEFACKKALKIDGPVLIVTDSFYVAESVNKELPYWQSNGFFNNKKKPLKHVSKWKSIADCIQLKPDIIIIHEKGHQPTASTFHTEGNNLADKLATQGSYVVNAGKRTADGSEFEKRTADGSEFESPKKKAKVE

SEQ ID NO: 492 - protein, 2180 aa, synthetic construct
  source 1..2180: note = Description of Artificial Sequence: Synthetic polypeptide
MPAAKRVKLDGGDKKYSIGLDIGTNSVGWAVITDEYKVPSKKFKVLGNTDRHSIKKNLIGALLFDSGETAEATRLKRTARRRYTRRKNRICYLQEIFSNEMAKVDDSFFHRLEESFLVEEDKKHERHPIFGNIVDEVAYHEKYPTIYHLRKKLVDSTDKADLRLIYLALAHMIKFRGHFLIEGDLNPDNSDVDKLFIQLVQTYNQLFEENPINASGVDAKAILSARLSKSRRLENLIAQLPGEKKNGLFGNLIALSLGLTPNFKSNFDLAEDAKLQLSKDTYDDDLDNLLAQIGDQYADLFLAAKNLSDAILLSDILRVNTEITKAPLSASMIKRYDEHHQDLTLLKALVRQQLPEKYKEIFFDQSKNGYAGYIDGGASQEEFYKFIKPILEKMDGTEELLVKLNREDLLRKQRTFDNGSIPHQIHLGELHAILRRQEDFYPFLKDNREKIEKILTFRIPYYVGPLARGNSRFAWMTRKSEETITPWNFEEVVDKGASAQSFIERMTNFDKNLPNEKVLPKHSLLYEYFTVYNELTKVKYVTEGMRKPAFLSGEQKKAIVDLLFKTNRKVTVKQLKEDYFKKIECFDSVEISGVEDRFNASLGTYHDLLKIIKDKDFLDNEENEDILEDIVLTLTLFEDREMIEERLKTYAHLFDDKVMKQLKRRRYTGWGRLSRKLINGIRDKQSGKTILDFLKSDGFANRNFMQLIHDDSLTFKEDIQKAQVSGQGDSLHEHIANLAGSPAIKKGILQTVKVVDELVKVMGRHKPENIVIEMARENQTTQKGQKNSRERMKRIEEGIKELGSQILKEHPVENTQLQNEKLYLYYLQNGRDMYVDQELDINRLSDYDVDHIVPQSFLKDDSIDNKVLTRSDKARGKSDNVPSEEVVKKMKNYWRQLLNAKLITQRKFDNLTKAERGGLSELDKAGFIKRQLVETRQITKHVAQILDSRMNTKYDENDKLIREVKVITLKSKLVSDFRKDFQFYKVREINNYHHAHDAYLNAVVGTALIKKYPKLESEFVYGDYKVYDVRKMIAKSEQEIGKATAKYFFYSNIMNFFKTEITLANGEIRKRPLIETNGETGEIVWDKGRDFATVRKVLSMPQVNIVKKTEVQTGGFSKESILPKRNSDKLIARKKDWDPKKYGGFDSPTVAYSVLVVAKVEKGKSKKLKSVKELLGITIMERSSFEKNPIDFLEAKGYKEVKKDLIIKLPKYSLFELENGRKRMLASAGELQKGNELALPSKYVNFLYLASHYEKLKGSPEDNEQKQLFVEQHKHYLDEIIEQISEFSKRVILADANLDKVLSAYNKHRDKPIREQAENIIHLFTLTNLGAPAAFKYFDTTIDRKRYTSTKEVLDATLIHQSITGLYETRIDLSQLGGDGGGSSGSSGSSGSSGSSGGMDPLQLLQPLEAEIKGTKLKAHWNSGATITCVPQAFLEEEVPIKNIWIKTIHGEKEQPVYYLTFKIQGRKVEAEVISSPYDYILVSPSDIPWLMKKPLQLTTLVPLQEYEERLLKQTMLTGSYKEKLQSLFLKYDALWQHWENQVGHRRIKPHHIATGTVNPRPQKQYPINPKAKASIQTVINDLLKQGVLIQQNSIMNTPVYPVPKPDGKWRMVLDYREVNKTIPLIAAQNQHSAGILSSIFRGKYKTTLDLSNGFWAHSITPESYWLTAFTWLGQQYCWTRLPQGFLNSPALFTADVVDLLKEVPNVQVYVDDIYISHDDPREHLEQLEKVFSLLLNAGYVVSLKKSEIAQHEVEFLGFNITKEGRGLTETFKQKLLNITPPRDLKQLQSILGLLNFARNFIPNFSELVKPLYNIIATANGKYITWTTDNSQQLQNIISMLNSAENLEERNPEVRLIMKVNTSPSAGYIRFYNEFAKRPIMYLNYVYTKAEVKFTNTEKLLTTIHKGLIKALDLGMGQEILVYSPIVSMTKIQKTPLPERKALPIRWITWMSYLEDPRIQFHYDKTLPELQQVPTVTDDIIAKIKHPSEFSMVFYTDGSAIKHPNVNKSHNAGMGIAQVQFKPEFTVINTWSIPLGDHTAQLAEVAAVEFACKKALKIDGPVLIVTDSFYVAESVNKELPYWQSNGFFNNKKKPLKHVSKWKSIADCIQLKPDIIIIHEKGHQPTASTFHTEGNNLADKLATQGSYVVNAGKRTADGSEFEKRTADGSEFESPKKKAKVE

SEQ ID NO: 493 - protein, 2176 aa, synthetic construct
  source 1..2176: note = Description of Artificial Sequence: Synthetic polypeptide
MPAAKRVKLDGGDKKYSIGLDIGTNSVGWAVITDEYKVPSKKFKVLGNTDRHSIKKNLIGALLFDSGETAEATRLKRTARRRYTRRKNRICYLQEIFSNEMAKVDDSFFHRLEESFLVEEDKKHERHPIFGNIVDEVAYHEKYPTIYHLRKKLVDSTDKADLRLIYLALAHMIKFRGHFLIEGDLNPDNSDVDKLFIQLVQTYNQLFEENPINASGVDAKAILSARLSKSRRLENLIAQLPGEKKNGLFGNLIALSLGLTPNFKSNFDLAEDAKLQLSKDTYDDDLDNLLAQIGDQYADLFLAAKNLSDAILLSDILRVNTEITKAPLSASMIKRYDEHHQDLTLLKALVRQQLPEKYKEIFFDQSKNGYAGYIDGGASQEEFYKFIKPILEKMDGTEELLVKLNREDLLRKQRTFDNGSIPHQIHLGELHAILRRQEDFYPFLKDNREKIEKILTFRIPYYVGPLARGNSRFAWMTRKSEETITPWNFEEVVDKGASAQSFIERMTNFDKNLPNEKVLPKHSLLYEYFTVYNELTKVKYVTEGMRKPAFLSGEQKKAIVDLLFKTNRKVTVKQLKEDYFKKIECFDSVEISGVEDRFNASLGTYHDLLKIIKDKDFLDNEENEDILEDIVLTLTLFEDREMIEERLKTYAHLFDDKVMKQLKRRRYTGWGRLSRKLINGIRDKQSGKTILDFLKSDGFANRNFMQLIHDDSLTFKEDIQKAQVSGQGDSLHEHIANLAGSPAIKKGILQTVKVVDELVKVMGRHKPENIVIEMARENQTTQKGQKNSRERMKRIEEGIKELGSQILKEHPVENTQLQNEKLYLYYLQNGRDMYVDQELDINRLSDYDVDHIVPQSFLKDDSIDNKVLTRSDKARGKSDNVPSEEVVKKMKNYWRQLLNAKLITQRKFDNLTKAERGGLSELDKAGFIKRQLVETRQITKHVAQILDSRMNTKYDENDKLIREVKVITLKSKLVSDFRKDFQFYKVREINNYHHAHDAYLNAVVGTALIKKYPKLESEFVYGDYKVYDVRKMIAKSEQEIGKATAKYFFYSNIMNFFKTEITLANGEIRKRPLIETNGETGEIVWDKGRDFATVRKVLSMPQVNIVKKTEVQTGGFSKESILPKRNSDKLIARKKDWDPKKYGGFDSPTVAYSVLVVAKVEKGKSKKLKSVKELLGITIMERSSFEKNPIDFLEAKGYKEVKKDLIIKLPKYSLFELENGRKRMLASAGELQKGNELALPSKYVNFLYLASHYEKLKGSPEDNEQKQLFVEQHKHYLDEIIEQISEFSKRVILADANLDKVLSAYNKHRDKPIREQAENIIHLFTLTNLGAPAAFKYFDTTIDRKRYTSTKEVLDATLIHQSITGLYETRIDLSQLGGDGGEAAAKGGSPAPGGMDPLQLLQPLEAEIKGTKLKAHWNSGATITCVPQAFLEEEVPIKNIWIKTIHGEKEQPVYYLTFKIQGRKVEAEVISSPYDYILVSPSDIPWLMKKPLQLTTLVPLQEYEERLLKQTMLTGSYKEKLQSLFLKYDALWQHWENQVGHRRIKPHHIATGTVNPRPQKQYPINPKAKASIQTVINDLLKQGVLIQQNSIMNTPVYPVPKPDGKWRMVLDYREVNKTIPLIAAQNQHSAGILSSIFRGKYKTTLDLSNGFWAHSITPESYWLTAFTWLGQQYCWTRLPQGFLNSPALFTADVVDLLKEVPNVQVYVDDIYISHDDPREHLEQLEKVFSLLLNAGYVVSLKKSEIAQHEVEFLGFNITKEGRGLTETFKQKLLNITPPRDLKQLQSILGLLNFARNFIPNFSELVKPLYNIIATANGKYITWTTDNSQQLQNIISMLNSAENLEERNPEVRLIMKVNTSPSAGYIRFYNEFAKRPIMYLNYVYTKAEVKFTNTEKLLTTIHKGLIKALDLGMGQEILVYSPIVSMTKIQKTPLPERKALPIRWITWMSYLEDPRIQFHYDKTLPELQQVPTVTDDIIAKIKHPSEFSMVFYTDGSAIKHPNVNKSHNAGMGIAQVQFKPEFTVINTWSIPLGDHTAQLAEVAAVEFACKKALKIDGPVLIVTDSFYVAESVNKELPYWQSNGFFNNKKKPLKHVSKWKSIADCIQLKPDIIIIHEKGHQPTASTFHTEGNNLADKLATQGSYVVNAGKRTADGSEFEKRTADGSEFESPKKKAKVE

SEQ ID NO: 494 - protein, 2181 aa, synthetic construct
  source 1..2181: note = Description of Artificial Sequence: Synthetic polypeptide
MPAAKRVKLDGGDKKYSIGLDIGTNSVGWAVITDEYKVPSKKFKVLGNTDRHSIKKNLIGALLFDSGETAEATRLKRTARRRYTRRKNRICYLQEIFSNEMAKVDDSFFHRLEESFLVEEDKKHERHPIFGNIVDEVAYHEKYPTIYHLRKKLVDSTDKADLRLIYLALAHMIKFRGHFLIEGDLNPDNSDVDKLFIQLVQTYNQLFEENPINASGVDAKAILSARLSKSRRLENLIAQLPGEKKNGLFGNLIALSLGLTPNFKSNFDLAEDAKLQLSKDTYDDDLDNLLAQIGDQYADLFLAAKNLSDAILLSDILRVNTEITKAPLSASMIKRYDEHHQDLTLLKALVRQQLPEKYKEIFFDQSKNGYAGYIDGGASQEEFYKFIKPILEKMDGTEELLVKLNREDLLRKQRTFDNGSIPHQIHLGELHAILRRQEDFYPFLKDNREKIEKILTFRIPYYVGPLARGNSRFAWMTRKSEETITPWNFEEVVDKGASAQSFIERMTNFDKNLPNEKVLPKHSLLYEYFTVYNELTKVKYVTEGMRKPAFLSGEQKKAIVDLLFKTNRKVTVKQLKEDYFKKIECFDSVEISGVEDRFNASLGTYHDLLKIIKDKDFLDNEENEDILEDIVLTLTLFEDREMIEERLKTYAHLFDDKVMKQLKRRRYTGWGRLSRKLINGIRDKQSGKTILDFLKSDGFANRNFMQLIHDDSLTFKEDIQKAQVSGQGDSLHEHIANLAGSPAIKKGILQTVKVVDELVKVMGRHKPENIVIEMARENQTTQKGQKNSRERMKRIEEGIKELGSQILKEHPVENTQLQNEKLYLYYLQNGRDMYVDQELDINRLSDYDVDHIVPQSFLKDDSIDNKVLTRSDKARGKSDNVPSEEVVKKMKNYWRQLLNAKLITQRKFDNLTKAERGGLSELDKAGFIKRQLVETRQITKHVAQILDSRMNTKYDENDKLIREVKVITLKSKLVSDFRKDFQFYKVREINNYHHAHDAYLNAVVGTALIKKYPKLESEFVYGDYKVYDVRKMIAKSEQEIGKATAKYFFYSNIMNFFKTEITLANGEIRKRPLIETNGETGEIVWDKGRDFATVRKVLSMPQVNIVKKTEVQTGGFSKESILPKRNSDKLIARKKDWDPKKYGGFDSPTVAYSVLVVAKVEKGKSKKLKSVKELLGITIMERSSFEKNPIDFLEAKGYKEVKKDLIIKLPKYSLFELENGRKRMLASAGELQKGNELALPSKYVNFLYLASHYEKLKGSPEDNEQKQLFVEQHKHYLDEIIEQISEFSKRVILADANLDKVLSAYNKHRDKPIREQAENIIHLFTLTNLGAPAAFKYFDTTIDRKRYTSTKEVLDATLIHQSITGLYETRIDLSQLGGDGGSGSETPGTSESATPESGGMDPLQLLQPLEAEIKGTKLKAHWNSGATITCVPQAFLEEEVPIKNIWIKTIHGEKEQPVYYLTFKIQGRKVEAEVISSPYDYILVSPSDIPWLMKKPLQLTTLVPLQEYEERLLKQTMLTGSYKEKLQSLFLKYDALWQHWENQVGHRRIKPHHIATGTVNPRPQKQYPINPKAKASIQTVINDLLKQGVLIQQNSIMNTPVYPVPKPDGKWRMVLDYREVNKTIPLIAAQNQHSAGILSSIFRGKYKTTLDLSNGFWAHSITPESYWLTAFTWLGQQYCWTRLPQGFLNSPALFTADVVDLLKEVPNVQVYVDDIYISHDDPREHLEQLEKVFSLLLNAGYVVSLKKSEIAQHEVEFLGFNITKEGRGLTETFKQKLLNITPPRDLKQLQSILGLLNFARNFIPNFSELVKPLYNIIATANGKYITWTTDNSQQLQNIISMLNSAENLEERNPEVRLIMKVNTSPSAGYIRFYNEFAKRPIMYLNYVYTKAEVKFTNTEKLLTTIHKGLIKALDLGMGQEILVYSPIVSMTKIQKTPLPERKALPIRWITWMSYLEDPRIQFHYDKTLPELQQVPTVTDDIIAKIKHPSEFSMVFYTDGSAIKHPNVNKSHNAGMGIAQVQFKPEFTVINTWSIPLGDHTAQLAEVAAVEFACKKALKIDGPVLIVTDSFYVAESVNKELPYWQSNGFFNNKKKPLKHVSKWKSIADCIQLKPDIIIIHEKGHQPTASTFHTEGNNLADKLATQGSYVVNAGKRTADGSEFEKRTADGSEFESPKKKAKVE

SEQ ID NO: 495 - protein, 2176 aa, synthetic construct
  source 1..2176: note = Description of Artificial Sequence: Synthetic polypeptide
MPAAKRVKLDGGDKKYSIGLDIGTNSVGWAVITDEYKVPSKKFKVLGNTDRHSIKKNLIGALLFDSGETAEATRLKRTARRRYTRRKNRICYLQEIFSNEMAKVDDSFFHRLEESFLVEEDKKHERHPIFGNIVDEVAYHEKYPTIYHLRKKLVDSTDKADLRLIYLALAHMIKFRGHFLIEGDLNPDNSDVDKLFIQLVQTYNQLFEENPINASGVDAKAILSARLSKSRRLENLIAQLPGEKKNGLFGNLIALSLGLTPNFKSNFDLAEDAKLQLSKDTYDDDLDNLLAQIGDQYADLFLAAKNLSDAILLSDILRVNTEITKAPLSASMIKRYDEHHQDLTLLKALVRQQLPEKYKEIFFDQSKNGYAGYIDGGASQEEFYKFIKPILEKMDGTEELLVKLNREDLLRKQRTFDNGSIPHQIHLGELHAILRRQEDFYPFLKDNREKIEKILTFRIPYYVGPLARGNSRFAWMTRKSEETITPWNFEEVVDKGASAQSFIERMTNFDKNLPNEKVLPKHSLLYEYFTVYNELTKVKYVTEGMRKPAFLSGEQKKAIVDLLFKTNRKVTVKQLKEDYFKKIECFDSVEISGVEDRFNASLGTYHDLLKIIKDKDFLDNEENEDILEDIVLTLTLFEDREMIEERLKTYAHLFDDKVMKQLKRRRYTGWGRLSRKLINGIRDKQSGKTILDFLKSDGFANRNFMQLIHDDSLTFKEDIQKAQVSGQGDSLHEHIANLAGSPAIKKGILQTVKVVDELVKVMGRHKPENIVIEMARENQTTQKGQKNSRERMKRIEEGIKELGSQILKEHPVENTQLQNEKLYLYYLQNGRDMYVDQELDINRLSDYDVDHIVPQSFLKDDSIDNKVLTRSDKARGKSDNVPSEEVVKKMKNYWRQLLNAKLITQRKFDNLTKAERGGLSELDKAGFIKRQLVETRQITKHVAQILDSRMNTKYDENDKLIREVKVITLKSKLVSDFRKDFQFYKVREINNYHHAHDAYLNAVVGTALIKKYPKLESEFVYGDYKVYDVRKMIAKSEQEIGKATAKYFFYSNIMNFFKTEITLANGEIRKRPLIETNGETGEIVWDKGRDFATVRKVLSMPQVNIVKKTEVQTGGFSKESILPKRNSDKLIARKKDWDPKKYGGFDSPTVAYSVLVVAKVEKGKSKKLKSVKELLGITIMERSSFEKNPIDFLEAKGYKEVKKDLIIKLPKYSLFELENGRKRMLASAGELQKGNELALPSKYVNFLYLASHYEKLKGSPEDNEQKQLFVEQHKHYLDEIIEQISEFSKRVILADANLDKVLSAYNKHRDKPIREQAENIIHLFTLTNLGAPAAFKYFDTTIDRKRYTSTKEVLDATLIHQSITGLYETRIDLSQLGGDGGEAAAKPAPGSSGGMDPLQLLQPLEAEIKGTKLKAHWNSGATITCVPQAFLEEEVPIKNIWIKTIHGEKEQPVYYLTFKIQGRKVEAEVISSPYDYILVSPSDIPWLMKKPLQLTTLVPLQEYEERLLKQTMLTGSYKEKLQSLFLKYDALWQHWENQVGHRRIKPHHIATGTVNPRPQKQYPINPKAKASIQTVINDLLKQGVLIQQNSIMNTPVYPVPKPDGKWRMVLDYREVNKTIPLIAAQNQHSAGILSSIFRGKYKTTLDLSNGFWAHSITPESYWLTAFTWLGQQYCWTRLPQGFLNSPALFTADVVDLLKEVPNVQVYVDDIYISHDDPREHLEQLEKVFSLLLNAGYVVSLKKSEIAQHEVEFLGFNITKEGRGLTETFKQKLLNITPPRDLKQLQSILGLLNFARNFIPNFSELVKPLYNIIATANGKYITWTTDNSQQLQNIISMLNSAENLEERNPEVRLIMKVNTSPSAGYIRFYNEFAKRPIMYLNYVYTKAEVKFTNTEKLLTTIHKGLIKALDLGMGQEILVYSPIVSMTKIQKTPLPERKALPIRWITWMSYLEDPRIQFHYDKTLPELQQVPTVTDDIIAKIKHPSEFSMVFYTDGSAIKHPNVNKSHNAGMGIAQVQFKPEFTVINTWSIPLGDHTAQLAEVAAVEFACKKALKIDGPVLIVTDSFYVAESVNKELPYWQSNGFFNNKKKPLKHVSKWKSIADCIQLKPDIIIIHEKGHQPTASTFHTEGNNLADKLATQGSYVVNAGKRTADGSEFEKRTADGSEFESPKKKAKVE

SEQ ID NO: 496 - protein, 2176 aa, synthetic construct
  source 1..2176: note = Description of Artificial Sequence: Synthetic polypeptide
MPAAKRVKLDGGDKKYSIGLDIGTNSVGWAVITDEYKVPSKKFKVLGNTDRHSIKKNLIGALLFDSGETAEATRLKRTARRRYTRRKNRICYLQEIFSNEMAKVDDSFFHRLEESFLVEEDKKHERHPIFGNIVDEVAYHEKYPTIYHLRKKLVDSTDKADLRLIYLALAHMIKFRGHFLIEGDLNPDNSDVDKLFIQLVQTYNQLFEENPINASGVDAKAILSARLSKSRRLENLIAQLPGEKKNGLFGNLIALSLGLTPNFKSNFDLAEDAKLQLSKDTYDDDLDNLLAQIGDQYADLFLAAKNLSDAILLSDILRVNTEITKAPLSASMIKRYDEHHQDLTLLKALVRQQLPEKYKEIFFDQSKNGYAGYIDGGASQEEFYKFIKPILEKMDGTEELLVKLNREDLLRKQRTFDNGSIPHQIHLGELHAILRRQEDFYPFLKDNREKIEKILTFRIPYYVGPLARGNSRFAWMTRKSEETITPWNFEEVVDKGASAQSFIERMTNFDKNLPNEKVLPKHSLLYEYFTVYNELTKVKYVTEGMRKPAFLSGEQKKAIVDLLFKTNRKVTVKQLKEDYFKKIECFDSVEISGVEDRFNASLGTYHDLLKIIKDKDFLDNEENEDILEDIVLTLTLFEDREMIEERLKTYAHLFDDKVMKQLKRRRYTGWGRLSRKLINGIRDKQSGKTILDFLKSDGFANRNFMQLIHDDSLTFKEDIQKAQVSGQGDSLHEHIANLAGSPAIKKGILQTVKVVDELVKVMGRHKPENIVIEMARENQTTQKGQKNSRERMKRIEEGIKELGSQILKEHPVENTQLQNEKLYLYYLQNGRDMYVDQELDINRLSDYDVDHIVPQSFLKDDSIDNKVLTRSDKARGKSDNVPSEEVVKKMKNYWRQLLNAKLITQRKFDNLTKAERGGLSELDKAGFIKRQLVETRQITKHVAQILDSRMNTKYDENDKLIREVKVITLKSKLVSDFRKDFQFYKVREINNYHHAHDAYLNAVVGTALIKKYPKLESEFVYGDYKVYDVRKMIAKSEQEIGKATAKYFFYSNIMNFFKTEITLANGEIRKRPLIETNGETGEIVWDKGRDFATVRKVLSMPQVNIVKKTEVQTGGFSKESILPKRNSDKLIARKKDWDPKKYGGFDSPTVAYSVLVVAKVEKGKSKKLKSVKELLGITIMERSSFEKNPIDFLEAKGYKEVKKDLIIKLPKYSLFELENGRKRMLASAGELQKGNELALPSKYVNFLYLASHYEKLKGSPEDNEQKQLFVEQHKHYLDEIIEQISEFSKRVILADANLDKVLSAYNKHRDKPIREQAENIIHLFTLTNLGAPAAFKYFDTTIDRKRYTSTKEVLDATLIHQSITGLYETRIDLSQLGGDGGEAAAKGSSPAPGGMDPLQLLQPLEAEIKGTKLKAHWNSGATITCVPQAFLEEEVPIKNIWIKTIHGEKEQPVYYLTFKIQGRKVEAEVISSPYDYILVSPSDIPWLMKKPLQLTTLVPLQEYEERLLKQTMLTGSYKEKLQSLFLKYDALWQHWENQVGHRRIKPHHIATGTVNPRPQKQYPINPKAKASIQTVINDLLKQGVLIQQNSIMNTPVYPVPKPDGKWRMVLDYREVNKTIPLIAAQNQHSAGILSSIFRGKYKTTLDLSNGFWAHSITPESYWLTAFTWLGQQYCWTRLPQGFLNSPALFTADVVDLLKEVPNVQVYVDDIYISHDDPREHLEQLEKVFSLLLNAGYVVSLKKSEIAQHEVEFLGFNITKEGRGLTETFKQKLLNITPPRDLKQLQSILGLLNFARNFIPNFSELVKPLYNIIATANGKYITWTTDNSQQLQNIISMLNSAENLEERNPEVRLIMKVNTSPSAGYIRFYNEFAKRPIMYLNYVYTKAEVKFTNTEKLLTTIHKGLIKALDLGMGQEILVYSPIVSMTKIQKTPLPERKALPIRWITWMSYLEDPRIQFHYDKTLPELQQVPTVTDDIIAKIKHPSEFSMVFYTDGSAIKHPNVNKSHNAGMGIAQVQFKPEFTVINTWSIPLGDHTAQLAEVAAVEFACKKALKIDGPVLIVTDSFYVAESVNKELPYWQSNGFFNNKKKPLKHVSKWKSIADCIQLKPDIIIIHEKGHQPTASTFHTEGNNLADKLATQGSYVVNAGKRTADGSEFEKRTADGSEFESPKKKAKVE

SEQ ID NO: 497 - protein, 2176 aa, synthetic construct
  source 1..2176: note = Description of Artificial Sequence: Synthetic polypeptide
MPAAKRVKLDGGDKKYSIGLDIGTNSVGWAVITDEYKVPSKKFKVLGNTDRHSIKKNLIGALLFDSGETAEATRLKRTARRRYTRRKNRICYLQEIFSNEMAKVDDSFFHRLEESFLVEEDKKHERHPIFGNIVDEVAYHEKYPTIYHLRKKLVDSTDKADLRLIYLALAHMIKFRGHFLIEGDLNPDNSDVDKLFIQLVQTYNQLFEENPINASGVDAKAILSARLSKSRRLENLIAQLPGEKKNGLFGNLIALSLGLTPNFKSNFDLAEDAKLQLSKDTYDDDLDNLLAQIGDQYADLFLAAKNLSDAILLSDILRVNTEITKAPLSASMIKRYDEHHQDLTLLKALVRQQLPEKYKEIFFDQSKNGYAGYIDGGASQEEFYKFIKPILEKMDGTEELLVKLNREDLLRKQRTFDNGSIPHQIHLGELHAILRRQEDFYPFLKDNREKIEKILTFRIPYYVGPLARGNSRFAWMTRKSEETITPWNFEEVVDKGASAQSFIERMTNFDKNLPNEKVLPKHSLLYEYFTVYNELTKVKYVTEGMRKPAFLSGEQKKAIVDLLFKTNRKVTVKQLKEDYFKKIECFDSVEISGVEDRFNASLGTYHDLLKIIKDKDFLDNEENEDILEDIVLTLTLFEDREMIEERLKTYAHLFDDKVMKQLKRRRYTGWGRLSRKLINGIRDKQSGKTILDFLKSDGFANRNFMQLIHDDSLTFKEDIQKAQVSGQGDSLHEHIANLAGSPAIKKGILQTVKVVDELVKVMGRHKPENIVIEMARENQTTQKGQKNSRERMKRIEEGIKELGSQILKEHPVENTQLQNEKLYLYYLQNGRDMYVDQELDINRLSDYDVDHIVPQSFLKDDSIDNKVLTRSDKARGKSDNVPSEEVVKKMKNYWRQLLNAKLITQRKFDNLTKAERGGLSELDKAGFIKRQLVETRQITKHVAQILDSRMNTKYDENDKLIREVKVITLKSKLVSDFRKDFQFYKVREINNYHHAHDAYLNAVVGTALIKKYPKLESEFVYGDYKVYDVRKMIAKSEQEIGKATAKYFFYSNIMNFFKTEITLANGEIRKRPLIETNGETGEIVWDKGRDFATVRKVLSMPQVNIVKKTEVQTGGFSKESILPKRNSDKLIARKKDWDPKKYGGFDSPTVAYSVLVVAKVEKGKSKKLKSVKELLGITIMERSSFEKNPIDFLEAKGYKEVKKDLIIKLPKYSLFELENGRKRMLASAGELQKGNELALPSKYVNFLYLASHYEKLKGSPEDNEQKQLFVEQHKHYLDEIIEQISEFSKRVILADANLDKVLSAYNKHRDKPIREQAENIIHLFTLTNLGAPAAFKYFDTTIDRKRYTSTKEVLDATLIHQSITGLYETRIDLSQLGGDGGPAPGGGEAAAKGGMDPLQLLQPLEAEIKGTKLKAHWNSGATITCVPQAFLEEEVPIKNIWIKTIHGEKEQPVYYLTFKIQGRKVEAEVISSPYDYILVSPSDIPWLMKKPLQLTTLVPLQEYEERLLKQTMLTGSYKEKLQSLFLKYDALWQHWENQVGHRRIKPHHIATGTVNPRPQKQYPINPKAKASIQTVINDLLKQGVLIQQNSIMNTPVYPVPKPDGKWRMVLDYREVNKTIPLIAAQNQHSAGILSSIFRGKYKTTLDLSNGFWAHSITPESYWLTAFTWLGQQYCWTRLPQGFLNSPALFTADVVDLLKEVPNVQVYVDDIYISHDDPREHLEQLEKVFSLLLNAGYVVSLKKSEIAQHEVEFLGFNITKEGRGLTETFKQKLLNITPPRDLKQLQSILGLLNFARNFIPNFSELVKPLYNIIATANGKYITWTTDNSQQLQNIISMLNSAENLEERNPEVRLIMKVNTSPSAGYIRFYNEFAKRPIMYLNYVYTKAEVKFTNTEKLLTTIHKGLIKALDLGMGQEILVYSPIVSMTKIQKTPLPERKALPIRWITWMSYLEDPRIQFHYDKTLPELQQVPTVTDDIIAKIKHPSEFSMVFYTDGSAIKHPNVNKSHNAGMGIAQVQFKPEFTVINTWSIPLGDHTAQLAEVAAVEFACKKALKIDGPVLIVTDSFYVAESVNKELPYWQSNGFFNNKKKPLKHVSKWKSIADCIQLKPDIIIIHEKGHQPTASTFHTEGNNLADKLATQGSYVVNAGKRTADGSEFEKRTADGSEFESPKKKAKVE

SEQ ID NO: 498 - protein, 2180 aa, synthetic construct
  source 1..2180: note = Description of Artificial Sequence: Synthetic polypeptide
MPAAKRVKLDGGDKKYSIGLDIGTNSVGWAVITDEYKVPSKKFKVLGNTDRHSIKKNLIGALLFDSGETAEATRLKRTARRRYTRRKNRICYLQEIFSNEMAKVDDSFFHRLEESFLVEEDKKHERHPIFGNIVDEVAYHEKYPTIYHLRKKLVDSTDKADLRLIYLALAHMIKFRGHFLIEGDLNPDNSDVDKLFIQLVQTYNQLFEENPINASGVDAKAILSARLSKSRRLENLIAQLPGEKKNGLFGNLIALSLGLTPNFKSNFDLAEDAKLQLSKDTYDDDLDNLLAQIGDQYADLFLAAKNLSDAILLSDILRVNTEITKAPLSASMIKRYDEHHQDLTLLKALVRQQLPEKYKEIFFDQSKNGYAGYIDGGASQEEFYKFIKPILEKMDGTEELLVKLNREDLLRKQRTFDNGSIPHQIHLGELHAILRRQEDFYPFLKDNREKIEKILTFRIPYYVGPLARGNSRFAWMTRKSEETITPWNFEEVVDKGASAQSFIERMTNFDKNLPNEKVLPKHSLLYEYFTVYNELTKVKYVTEGMRKPAFLSGEQKKAIVDLLFKTNRKVTVKQLKEDYFKKIECFDSVEISGVEDRFNASLGTYHDLLKIIKDKDFLDNEENEDILEDIVLTLTLFEDREMIEERLKTYAHLFDDKVMKQLKRRRYTGWGRLSRKLINGIRDKQSGKTILDFLKSDGFANRNFMQLIHDDSLTFKEDIQKAQVSGQGDSLHEHIANLAGSPAIKKGILQTVKVVDELVKVMGRHKPENIVIEMARENQTTQKGQKNSRERMKRIEEGIKELGSQILKEHPVENTQLQNEKLYLYYLQNGRDMYVDQELDINRLSDYDVDHIVPQSFLKDDSIDNKVLTRSDKARGKSDNVPSEEVVKKMKNYWRQLLNAKLITQRKFDNLTKAERGGLSELDKAGFIKRQLVETRQITKHVAQILDSRMNTKYDENDKLIREVKVITLKSKLVSDFRKDFQFYKVREINNYHHAHDAYLNAVVGTALIKKYPKLESEFVYGDYKVYDVRKMIAKSEQEIGKATAKYFFYSNIMNFFKTEITLANGEIRKRPLIETNGETGEIVWDKGRDFATVRKVLSMPQVNIVKKTEVQTGGFSKESILPKRNSDKLIARKKDWDPKKYGGFDSPTVAYSVLVVAKVEKGKSKKLKSVKELLGITIMERSSFEKNPIDFLEAKGYKEVKKDLIIKLPKYSLFELENGRKRMLASAGELQKGNELALPSKYVNFLYLASHYEKLKGSPEDNEQKQLFVEQHKHYLDEIIEQISEFSKRVILADANLDKVLSAYNKHRDKPIREQAENIIHLFTLTNLGAPAAFKYFDTTIDRKRYTSTKEVLDATLIHQSITGLYETRIDLSQLGGDGGEAAAKEAAAKEAAAKGGMDPLQLLQPLEAEIKGTKLKAHWNSGATITCVPQAFLEEEVPIKNIWIKTIHGEKEQPVYYLTFKIQGRKVEAEVISSPYDYILVSPSDIPWLMKKPLQLTTLVPLQEYEERLLKQTMLTGSYKEKLQSLFLKYDALWQHWENQVGHRRIKPHHIATGTVNPRPQKQYPINPKAKASIQTVINDLLKQGVLIQQNSIMNTPVYPVPKPDGKWRMVLDYREVNKTIPLIAAQNQHSAGILSSIFRGKYKTTLDLSNGFWAHSITPESYWLTAFTWLGQQYCWTRLPQGFLNSPALFTADVVDLLKEVPNVQVYVDDIYISHDDPREHLEQLEKVFSLLLNAGYVVSLKKSEIAQHEVEFLGFNITKEGRGLTETFKQKLLNITPPRDLKQLQSILGLLNFARNFIPNFSELVKPLYNIIATANGKYITWTTDNSQQLQNIISMLNSAENLEERNPEVRLIMKVNTSPSAGYIRFYNEFAKRPIMYLNYVYTKAEVKFTNTEKLLTTIHKGLIKALDLGMGQEILVYSPIVSMTKIQKTPLPERKALPIRWITWMSYLEDPRIQFHYDKTLPELQQVPTVTDDIIAKIKHPSEFSMVFYTDGSAIKHPNVNKSHNAGMGIAQVQFKPEFTVINTWSIPLGDHTAQLAEVAAVEFACKKALKIDGPVLIVTDSFYVAESVNKELPYWQSNGFFNNKKKPLKHVSKWKSIADCIQLKPDIIIIHEKGHQPTASTFHTEGNNLADKLATQGSYVVNAGKRTADGSEFEKRTADGSEFESPKKKAKVE

SEQ ID NO: 499 - protein, 2176 aa, synthetic construct
  source 1..2176: note = Description of Artificial Sequence: Synthetic polypeptide
MPAAKRVKLDGGDKKYSIGLDIGTNSVGWAVITDEYKVPSKKFKVLGNTDRHSIKKNLIGALLFDSGETAEATRLKRTARRRYTRRKNRICYLQEIFSNEMAKVDDSFFHRLEESFLVEEDKKHERHPIFGNIVDEVAYHEKYPTIYHLRKKLVDSTDKADLRLIYLALAHMIKFRGHFLIEGDLNPDNSDVDKLFIQLVQTYNQLFEENPINASGVDAKAILSARLSKSRRLENLIAQLPGEKKNGLFGNLIALSLGLTPNFKSNFDLAEDAKLQLSKDTYDDDLDNLLAQIGDQYADLFLAAKNLSDAILLSDILRVNTEITKAPLSASMIKRYDEHHQDLTLLKALVRQQLPEKYKEIFFDQSKNGYAGYIDGGASQEEFYKFIKPILEKMDGTEELLVKLNREDLLRKQRTFDNGSIPHQIHLGELHAILRRQEDFYPFLKDNREKIEKILTFRIPYYVGPLARGNSRFAWMTRKSEETITPWNFEEVVDKGASAQSFIERMTNFDKNLPNEKVLPKHSLLYEYFTVYNELTKVKYVTEGMRKPAFLSGEQKKAIVDLLFKTNRKVTVKQLKEDYFKKIECFDSVEISGVEDRFNASLGTYHDLLKIIKDKDFLDNEENEDILEDIVLTLTLFEDREMIEERLKTYAHLFDDKVMKQLKRRRYTGWGRLSRKLINGIRDKQSGKTILDFLKSDGFANRNFMQLIHDDSLTFKEDIQKAQVSGQGDSLHEHIANLAGSPAIKKGILQTVKVVDELVKVMGRHKPENIVIEMARENQTTQKGQKNSRERMKRIEEGIKELGSQILKEHPVENTQLQNEKLYLYYLQNGRDMYVDQELDINRLSDYDVDHIVPQSFLKDDSIDNKVLTRSDKARGKSDNVPSEEVVKKMKNYWRQLLNAKLITQRKFDNLTKAERGGLSELDKAGFIKRQLVETRQITKHVAQILDSRMNTKYDENDKLIREVKVITLKSKLVSDFRKDFQFYKVREINNYHHAHDAYLNAVVGTALIKKYPKLESEFVYGDYKVYDVRKMIAKSEQEIGKATAKYFFYSNIMNFFKTEITLANGEIRKRPLIETNGETGEIVWDKGRDFATVRKVLSMPQVNIVKKTEVQTGGFSKESILPKRNSDKLIARKKDWDPKKYGGFDSPTVAYSVLVVAKVEKGKSKKLKSVKELLGITIMERSSFEKNPIDFLEAKGYKEVKKDLIIKLPKYSLFELENGRKRMLASAGELQKGNELALPSKYVNFLYLASHYEKLKGSPEDNEQKQLFVEQHKHYLDEIIEQISEFSKRVILADANLDKVLSAYNKHRDKPIREQAENIIHLFTLTNLGAPAAFKYFDTTIDRKRYTSTKEVLDATLIHQSITGLYETRIDLSQLGGDGGEAAAKPAPGGSGGMDPLQLLQPLEAEIKGTKLKAHWNSGATITCVPQAFLEEEVPIKNIWIKTIHGEKEQPVYYLTFKIQGRKVEAEVISSPYDYILVSPSDIPWLMKKPLQLTTLVPLQEYEERLLKQTMLTGSYKEKLQSLFLKYDALWQHWENQVGHRRIKPHHIATGTVNPRPQKQYPINPKAKASIQTVINDLLKQGVLIQQNSIMNTPVYPVPKPDGKWRMVLDYREVNKTIPLIAAQNQHSAGILSSIFRGKYKTTLDLSNGFWAHSITPESYWLTAFTWLGQQYCWTRLPQGFLNSPALFTADVVDLLKEVPNVQVYVDDIYISHDDPREHLEQLEKVFSLLLNAGYVVSLKKSEIAQHEVEFLGFNITKEGRGLTETFKQKLLNITPPRDLKQLQSILGLLNFARNFIPNFSELVKPLYNIIATANGKYITWTTDNSQQLQNIISMLNSAENLEERNPEVRLIMKVNTSPSAGYIRFYNEFAKRPIMYLNYVYTKAEVKFTNTEKLLTTIHKGLIKALDLGMGQEILVYSPIVSMTKIQKTPLPERKALPIRWITWMSYLEDPRIQFHYDKTLPELQQVPTVTDDIIAKIKHPSEFSMVFYTDGSAIKHPNVNKSHNAGMGIAQVQFKPEFTVINTWSIPLGDHTAQLAEVAAVEFACKKALKIDGPVLIVTDSFYVAESVNKELPYWQSNGFFNNKKKPLKHVSKWKSIADCIQLKPDIIIIHEKGHQPTASTFHTEGNNLADKLATQGSYVVNAGKRTADGSEFEKRTADGSEFESPKKKAKVE

SEQ ID NO: 500 - protein, 2178 aa, synthetic construct
  source 1..2178: note = Description of Artificial Sequence: Synthetic polypeptide
MPAAKRVKLDGGDKKYSIGLDIGTNSVGWAVITDEYKVPSKKFKVLGNTDRHSIKKNLIGALLFDSGETAEATRLKRTARRRYTRRKNRICYLQEIFSNEMAKVDDSFFHRLEESFLVEEDKKHERHPIFGNIVDEVAYHEKYPTIYHLRKKLVDSTDKADLRLIYLALAHMIKFRGHFLIEGDLNPDNSDVDKLFIQLVQTYNQLFEENPINASGVDAKAILSARLSKSRRLENLIAQLPGEKKNGLFGNLIALSLGLTPNFKSNFDLAEDAKLQLSKDTYDDDLDNLLAQIGDQYADLFLAAKNLSDAILLSDILRVNTEITKAPLSASMIKRYDEHHQDLTLLKALVRQQLPEKYKEIFFDQSKNGYAGYIDGGASQEEFYKFIKPILEKMDGTEELLVKLNREDLLRKQRTFDNGSIPHQIHLGELHAILRRQEDFYPFLKDNREKIEKILTFRIPYYVGPLARGNSRFAWMTRKSEETITPWNFEEVVDKGASAQSFIERMTNFDKNLPNEKVLPKHSLLYEYFTVYNELTKVKYVTEGMRKPAFLSGEQKKAIVDLLFKTNRKVTVKQLKEDYFKKIECFDSVEISGVEDRFNASLGTYHDLLKIIKDKDFLDNEENEDILEDIVLTLTLFEDREMIEERLKTYAHLFDDKVMKQLKRRRYTGWGRLSRKLINGIRDKQSGKTILDFLKSDGFANRNFMQLIHDDSLTFKEDIQKAQVSGQGDSLHEHIANLAGSPAIKKGILQTVKVVDELVKVMGRHKPENIVIEMARENQTTQKGQKNSRERMKRIEEGIKELGSQILKEHPVENTQLQNEKLYLYYLQNGRDMYVDQELDINRLSDYDVDHIVPQSFLKDDSIDNKVLTRSDKARGKSDNVPSEEVVKKMKNYWRQLLNAKLITQRKFDNLTKAERGGLSELDKAGFIKRQLVETRQITKHVAQILDSRMNTKYDENDKLIREVKVITLKSKLVSDFRKDFQFYKVREINNYHHAHDAYLNAVVGTALIKKYPKLESEFVYGDYKVYDVRKMIAKSEQEIGKATAKYFFYSNIMNFFKTEITLANGEIRKRPLIETNGETGEIVWDKGRDFATVRKVLSMPQVNIVKKTEVQTGGFSKESILPKRNSDKLIARKKDWDPKKYGGFDSPTVAYSVLVVAKVEKGKSKKLKSVKELLGITIMERSSFEKNPIDFLEAKGYKEVKKDLIIKLPKYSLFELENGRKRMLASAGELQKGNELALPSKYVNFLYLASHYEKLKGSPEDNEQKQLFVEQHKHYLDEIIEQISEFSKRVILADANLDKVLSAYNKHRDKPIREQAENIIHLFTLTNLGAPAAFKYFDTTIDRKRYTSTKEVLDATLIHQSITGLYETRIDLSQLGGDGGPAPAPAPAPAPAPGGMDPLQLLQPLEAEIKGTKLKAHWNSGATITCVPQAFLEEEVPIKNIWIKTIHGEKEQPVYYLTFKIQGRKVEAEVISSPYDYILVSPSDIPWLMKKPLQLTTLVPLQEYEERLLKQTMLTGSYKEKLQSLFLKYDALWQHWENQVGHRRIKPHHIATGTVNPRPQKQYPINPKAKASIQTVINDLLKQGVLIQQNSIMNTPVYPVPKPDGKWRMVLDYREVNKTIPLIAAQNQHSAGILSSIFRGKYKTTLDLSNGFWAHSITPESYWLTAFTWLGQQYCWTRLPQGFLNSPALFTADVVDLLKEVPNVQVYVDDIYISHDDPREHLEQLEKVFSLLLNAGYVVSLKKSEIAQHEVEFLGFNITKEGRGLTETFKQKLLNITPPRDLKQLQSILGLLNFARNFIPNFSELVKPLYNIIATANGKYITWTTDNSQQLQNIISMLNSAENLEERNPEVRLIMKVNTSPSAGYIRFYNEFAKRPIMYLNYVYTKAEVKFTNTEKLLTTIHKGLIKALDLGMGQEILVYSPIVSMTKIQKTPLPERKALPIRWITWMSYLEDPRIQFHYDKTLPELQQVPTVTDDIIAKIKHPSEFSMVFYTDGSAIKHPNVNKSHNAGMGIAQVQFKPEFTVINTWSIPLGDHTAQLAEVAAVEFACKKALKIDGPVLIVTDSFYVAESVNKELPYWQSNGFFNNKKKPLKHVSKWKSIADCIQLKPDIIIIHEKGHQPTASTFHTEGNNLADKLATQGSYVVNAGKRTADGSEFEKRTADGSEFESPKKKAKVE

SEQ ID NO: 501 - protein, 2176 aa, synthetic construct
  source 1..2176: note = Description of Artificial Sequence: Synthetic polypeptide
MPAAKRVKLDGGDKKYSIGLDIGTNSVGWAVITDEYKVPSKKFKVLGNTDRHSIKKNLIGALLFDSGETAEATRLKRTARRRYTRRKNRICYLQEIFSNEMAKVDDSFFHRLEESFLVEEDKKHERHPIFGNIVDEVAYHEKYPTIYHLRKKLVDSTDKADLRLIYLALAHMIKFRGHFLIEGDLNPDNSDVDKLFIQLVQTYNQLFEENPINASGVDAKAILSARLSKSRRLENLIAQLPGEKKNGLFGNLIALSLGLTPNFKSNFDLAEDAKLQLSKDTYDDDLDNLLAQIGDQYADLFLAAKNLSDAILLSDILRVNTEITKAPLSASMIKRYDEHHQDLTLLKALVRQQLPEKYKEIFFDQSKNGYAGYIDGGASQEEFYKFIKPILEKMDGTEELLVKLNREDLLRKQRTFDNGSIPHQIHLGELHAILRRQEDFYPFLKDNREKIEKILTFRIPYYVGPLARGNSRFAWMTRKSEETITPWNFEEVVDKGASAQSFIERMTNFDKNLPNEKVLPKHSLLYEYFTVYNELTKVKYVTEGMRKPAFLSGEQKKAIVDLLFKTNRKVTVKQLKEDYFKKIECFDSVEISGVEDRFNASLGTYHDLLKIIKDKDFLDNEENEDILEDIVLTLTLFEDREMIEERLKTYAHLFDDKVMKQLKRRRYTGWGRLSRKLINGIRDKQSGKTILDFLKSDGFANRNFMQLIHDDSLTFKEDIQKAQVSGQGDSLHEHIANLAGSPAIKKGILQTVKVVDELVKVMGRHKPENIVIEMARENQTTQKGQKNSRERMKRIEEGIKELGSQILKEHPVENTQLQNEKLYLYYLQNGRDMYVDQELDINRLSDYDVDHIVPQSFLKDDSIDNKVLTRSDKARGKSDNVPSEEVVKKMKNYWRQLLNAKLITQRKFDNLTKAERGGLSELDKAGFIKRQLVETRQITKHVAQILDSRMNTKYDENDKLIREVKVITLKSKLVSDFRKDFQFYKVREINNYHHAHDAYLNAVVGTALIKKYPKLESEFVYGDYKVYDVRKMIAKSEQEIGKATAKYFFYSNIMNFFKTEITLANGEIRKRPLIETNGETGEIVWDKGRDFATVRKVLSMPQVNIVKKTEVQTGGFSKESILPKRNSDKLIARKKDWDPKKYGGFDSPTVAYSVLVVAKVEKGKSKKLKSVKELLGITIMERSSFEKNPIDFLEAKGYKEVKKDLIIKLPKYSLFELENGRKRMLASAGELQKGNELALPSKYVNFLYLASHYEKLKGSPEDNEQKQLFVEQHKHYLDEIIEQISEFSKRVILADANLDKVLSAYNKHRDKPIREQAENIIHLFTLTNLGAPAAFKYFDTTIDRKRYTSTKEVLDATLIHQSITGLYETRIDLSQLGGDGGGGGEAAAKGGSGGMDPLQLLQPLEAEIKGTKLKAHWNSGATITCVPQAFLEEEVPIKNIWIKTIHGEKEQPVYYLTFKIQGRKVEAEVISSPYDYILVSPSDIPWLMKKPLQLTTLVPLQEYEERLLKQTMLTGSYKEKLQSLFLKYDALWQHWENQVGHRRIKPHHIATGTVNPRPQKQYPINPKAKASIQTVINDLLKQGVLIQQNSIMNTPVYPVPKPDGKWRMVLDYREVNKTIPLIAAQNQHSAGILSSIFRGKYKTTLDLSNGFWAHSITPESYWLTAFTWLGQQYCWTRLPQGFLNSPALFTADVVDLLKEVPNVQVYVDDIYISHDDPREHLEQLEKVFSLLLNAGYVVSLKKSEIAQHEVEFLGFNITKEGRGLTETFKQKLLNITPPRDLKQLQSILGLLNFARNFIPNFSELVKPLYNIIATANGKYITWTTDNSQQLQNIISMLNSAENLEERNPEVRLIMKVNTSPSAGYIRFYNEFAKRPIMYLNYVYTKAEVKFTNTEKLLTTIHKGLIKALDLGMGQEILVYSPIVSMTKIQKTPLPERKALPIRWITWMSYLEDPRIQFHYDKTLPELQQVPTVTDDIIAKIKHPSEFSMVFYTDGSAIKHPNVNKSHNAGMGIAQVQFKPEFTVINTWSIPLGDHTAQLAEVAAVEFACKKALKIDGPVLIVTDSFYVAESVNKELPYWQSNGFFNNKKKPLKHVSKWKSIADCIQLKPDIIIIHEKGHQPTASTFHTEGNNLADKLATQGSYVVNAGKRTADGSEFEKRTADGSEFESPKKKAKVE

SEQ ID NO: 502 - protein, 2176 aa, synthetic construct
  source 1..2176: note = Description of Artificial Sequence: Synthetic polypeptide
MPAAKRVKLDGGDKKYSIGLDIGTNSVGWAVITDEYKVPSKKFKVLGNTDRHSIKKNLIGALLFDSGETAEATRLKRTARRRYTRRKNRICYLQEIFSNEMAKVDDSFFHRLEESFLVEEDKKHERHPIFGNIVDEVAYHEKYPTIYHLRKKLVDSTDKADLRLIYLALAHMIKFRGHFLIEGDLNPDNSDVDKLFIQLVQTYNQLFEENPINASGVDAKAILSARLSKSRRLENLIAQLPGEKKNGLFGNLIALSLGLTPNFKSNFDLAEDAKLQLSKDTYDDDLDNLLAQIGDQYADLFLAAKNLSDAILLSDILRVNTEITKAPLSASMIKRYDEHHQDLTLLKALVRQQLPEKYKEIFFDQSKNGYAGYIDGGASQEEFYKFIKPILEKMDGTEELLVKLNREDLLRKQRTFDNGSIPHQIHLGELHAILRRQEDFYPFLKDNREKIEKILTFRIPYYVGPLARGNSRFAWMTRKSEETITPWNFEEVVDKGASAQSFIERMTNFDKNLPNEKVLPKHSLLYEYFTVYNELTKVKYVTEGMRKPAFLSGEQKKAIVDLLFKTNRKVTVKQLKEDYFKKIECFDSVEISGVEDRFNASLGTYHDLLKIIKDKDFLDNEENEDILEDIVLTLTLFEDREMIEERLKTYAHLFDDKVMKQLKRRRYTGWGRLSRKLINGIRDKQSGKTILDFLKSDGFANRNFMQLIHDDSLTFKEDIQKAQVSGQGDSLHEHIANLAGSPAIKKGILQTVKVVDELVKVMGRHKPENIVIEMARENQTTQKGQKNSRERMKRIEEGIKELGSQILKEHPVENTQLQNEKLYLYYLQNGRDMYVDQELDINRLSDYDVDHIVPQSFLKDDSIDNKVLTRSDKARGKSDNVPSEEVVKKMKNYWRQLLNAKLITQRKFDNLTKAERGGLSELDKAGFIKRQLVETRQITKHVAQILDSRMNTKYDENDKLIREVKVITLKSKLVSDFRKDFQFYKVREINNYHHAHDAYLNAVVGTALIKKYPKLESEFVYGDYKVYDVRKMIAKSEQEIGKATAKYFFYSNIMNFFKTEITLANGEIRKRPLIETNGETGEIVWDKGRDFATVRKVLSMPQVNIVKKTEVQTGGFSKESILPKRNSDKLIARKKDWDPKKYGGFDSPTVAYSVLVVAKVEKGKSKKLKSVKELLGITIMERSSFEKNPIDFLEAKGYKEVKKDLIIKLPKYSLFELENGRKRMLASAGELQKGNELALPSKYVNFLYLASHYEKLKGSPEDNEQKQLFVEQHKHYLDEIIEQISEFSKRVILADANLDKVLSAYNKHRDKPIREQAENIIHLFTLTNLGAPAAFKYFDTTIDRKRYTSTKEVLDATLIHQSITGLYETRIDLSQLGGDGGGGSPAPEAAAKGGMDPLQLLQPLEAEIKGTKLKAHWNSGATITCVPQAFLEEEVPIKNIWIKTIHGEKEQPVYYLTFKIQGRKVEAEVISSPYDYILVSPSDIPWLMKKPLQLTTLVPLQEYEERLLKQTMLTGSYKEKLQSLFLKYDALWQHWENQVGHRRIKPHHIATGTVNPRPQKQYPINPKAKASIQTVINDLLKQGVLIQQNSIMNTPVYPVPKPDGKWRMVLDYREVNKTIPLIAAQNQHSAGILSSIFRGKYKTTLDLSNGFWAHSITPESYWLTAFTWLGQQYCWTRLPQGFLNSPALFTADVVDLLKEVPNVQVYVDDIYISHDDPREHLEQLEKVFSLLLNAGYVVSLKKSEIAQHEVEFLGFNITKEGRGLTETFKQKLLNITPPRDLKQLQSILGLLNFARNFIPNFSELVKPLYNIIATANGKYITWTTDNSQQLQNIISMLNSAENLEERNPEVRLIMKVNTSPSAGYIRFYNEFAKRPIMYLNYVYTKAEVKFTNTEKLLTTIHKGLIKALDLGMGQEILVYSPIVSMTKIQKTPLPERKALPIRWITWMSYLEDPRIQFHYDKTLPELQQVPTVTDDIIAKIKHPSEFSMVFYTDGSAIKHPNVNKSHNAGMGIAQVQFKPEFTVINTWSIPLGDHTAQLAEVAAVEFACKKALKIDGPVLIVTDSFYVAESVNKELPYWQSNGFFNNKKKPLKHVSKWKSIADCIQLKPDIIIIHEKGHQPTASTFHTEGNNLADKLATQGSYVVNAGKRTADGSEFEKRTADGSEFESPKKKAKVE

SEQ ID NO: 503 - protein, 2174 aa, synthetic construct
  source 1..2174: note = Description of Artificial Sequence: Synthetic polypeptide
MPAAKRVKLDGGDKKYSIGLDIGTNSVGWAVITDEYKVPSKKFKVLGNTDRHSIKKNLIGALLFDSGETAEATRLKRTARRRYTRRKNRICYLQEIFSNEMAKVDDSFFHRLEESFLVEEDKKHERHPIFGNIVDEVAYHEKYPTIYHLRKKLVDSTDKADLRLIYLALAHMIKFRGHFLIEGDLNPDNSDVDKLFIQLVQTYNQLFEENPINASGVDAKAILSARLSKSRRLENLIAQLPGEKKNGLFGNLIALSLGLTPNFKSNFDLAEDAKLQLSKDTYDDDLDNLLAQIGDQYADLFLAAKNLSDAILLSDILRVNTEITKAPLSASMIKRYDEHHQDLTLLKALVRQQLPEKYKEIFFDQSKNGYAGYIDGGASQEEFYKFIKPILEKMDGTEELLVKLNREDLLRKQRTFDNGSIPHQIHLGELHAILRRQEDFYPFLKDNREKIEKILTFRIPYYVGPLARGNSRFAWMTRKSEETITPWNFEEVVDKGASAQSFIERMTNFDKNLPNEKVLPKHSLLYEYFTVYNELTKVKYVTEGMRKPAFLSGEQKKAIVDLLFKTNRKVTVKQLKEDYFKKIECFDSVEISGVEDRFNASLGTYHDLLKIIKDKDFLDNEENEDILEDIVLTLTLFEDREMIEERLKTYAHLFDDKVMKQLKRRRYTGWGRLSRKLINGIRDKQSGKTILDFLKSDGFANRNFMQLIHDDSLTFKEDIQKAQVSGQGDSLHEHIANLAGSPAIKKGILQTVKVVDELVKVMGRHKPENIVIEMARENQTTQKGQKNSRERMKRIEEGIKELGSQILKEHPVENTQLQNEKLYLYYLQNGRDMYVDQELDINRLSDYDVDHIVPQSFLKDDSIDNKVLTRSDKARGKSDNVPSEEVVKKMKNYWRQLLNAKLITQRKFDNLTKAERGGLSELDKAGFIKRQLVETRQITKHVAQILDSRMNTKYDENDKLIREVKVITLKSKLVSDFRKDFQFYKVREINNYHHAHDAYLNAVVGTALIKKYPKLESEFVYGDYKVYDVRKMIAKSEQEIGKATAKYFFYSNIMNFFKTEITLANGEIRKRPLIETNGETGEIVWDKGRDFATVRKVLSMPQVNIVKKTEVQTGGFSKESILPKRNSDKLIARKKDWDPKKYGGFDSPTVAYSVLVVAKVEKGKSKKLKSVKELLGITIMERSSFEKNPIDFLEAKGYKEVKKDLIIKLPKYSLFELENGRKRMLASAGELQKGNELALPSKYVNFLYLASHYEKLKGSPEDNEQKQLFVEQHKHYLDEIIEQISEFSKRVILADANLDKVLSAYNKHRDKPIREQAENIIHLFTLTNLGAPAAFKYFDTTIDRKRYTSTKEVLDATLIHQSITGLYETRIDLSQLGGDGGPAPAPAPAPGGMDPLQLLQPLEAEIKGTKLKAHWNSGATITCVPQAFLEEEVPIKNIWIKTIHGEKEQPVYYLTFKIQGRKVEAEVISSPYDYILVSPSDIPWLMKKPLQLTTLVPLQEYEERLLKQTMLTGSYKEKLQSLFLKYDALWQHWENQVGHRRIKPHHIATGTVNPRPQKQYPINPKAKASIQTVINDLLKQGVLIQQNSIMNTPVYPVPKPDGKWRMVLDYREVNKTIPLIAAQNQHSAGILSSIFRGKYKTTLDLSNGFWAHSITPESYWLTAFTWLGQQYCWTRLPQGFLNSPALFTADVVDLLKEVPNVQVYVDDIYISHDDPREHLEQLEKVFSLLLNAGYVVSLKKSEIAQHEVEFLGFNITKEGRGLTETFKQKLLNITPPRDLKQLQSILGLLNFARNFIPNFSELVKPLYNIIATANGKYITWTTDNSQQLQNIISMLNSAENLEERNPEVRLIMKVNTSPSAGYIRFYNEFAKRPIMYLNYVYTKAEVKFTNTEKLLTTIHKGLIKALDLGMGQEILVYSPIVSMTKIQKTPLPERKALPIRWITWMSYLEDPRIQFHYDKTLPELQQVPTVTDDIIAKIKHPSEFSMVFYTDGSAIKHPNVNKSHNAGMGIAQVQFKPEFTVINTWSIPLGDHTAQLAEVAAVEFACKKALKIDGPVLIVTDSFYVAESVNKELPYWQSNGFFNNKKKPLKHVSKWKSIADCIQLKPDIIIIHEKGHQPTASTFHTEGNNLADKLATQGSYVVNAGKRTADGSEFEKRTADGSEFESPKKKAKVE

SEQ ID NO: 504 - protein, 2176 aa, synthetic construct
  source 1..2176: note = Description of Artificial Sequence: Synthetic polypeptide
MPAAKRVKLDGGDKKYSIGLDIGTNSVGWAVITDEYKVPSKKFKVLGNTDRHSIKKNLIGALLFDSGETAEATRLKRTARRRYTRRKNRICYLQEIFSNEMAKVDDSFFHRLEESFLVEEDKKHERHPIFGNIVDEVAYHEKYPTIYHLRKKLVDSTDKADLRLIYLALAHMIKFRGHFLIEGDLNPDNSDVDKLFIQLVQTYNQLFEENPINASGVDAKAILSARLSKSRRLENLIAQLPGEKKNGLFGNLIALSLGLTPNFKSNFDLAEDAKLQLSKDTYDDDLDNLLAQIGDQYADLFLAAKNLSDAILLSDILRVNTEITKAPLSASMIKRYDEHHQDLTLLKALVRQQLPEKYKEIFFDQSKNGYAGYIDGGASQEEFYKFIKPILEKMDGTEELLVKLNREDLLRKQRTFDNGSIPHQIHLGELHAILRRQEDFYPFLKDNREKIEKILTFRIPYYVGPLARGNSRFAWMTRKSEETITPWNFEEVVDKGASAQSFIERMTNFDKNLPNEKVLPKHSLLYEYFTVYNELTKVKYVTEGMRKPAFLSGEQKKAIVDLLFKTNRKVTVKQLKEDYFKKIECFDSVEISGVEDRFNASLGTYHDLLKIIKDKDFLDNEENEDILEDIVLTLTLFEDREMIEERLKTYAHLFDDKVMKQLKRRRYTGWGRLSRKLINGIRDKQSGKTILDFLKSDGFANRNFMQLIHDDSLTFKEDIQKAQVSGQGDSLHEHIANLAGSPAIKKGILQTVKVVDELVKVMGRHKPENIVIEMARENQTTQKGQKNSRERMKRIEEGIKELGSQILKEHPVENTQLQNEKLYLYYLQNGRDMYVDQELDINRLSDYDVDHIVPQSFLKDDSIDNKVLTRSDKARGKSDNVPSEEVVKKMKNYWRQLLNAKLITQRKFDNLTKAERGGLSELDKAGFIKRQLVETRQITKHVAQILDSRMNTKYDENDKLIREVKVITLKSKLVSDFRKDFQFYKVREINNYHHAHDAYLNAVVGTALIKKYPKLESEFVYGDYKVYDVRKMIAKSEQEIGKATAKYFFYSNIMNFFKTEITLANGEIRKRPLIETNGETGEIVWDKGRDFATVRKVLSMPQVNIVKKTEVQTGGFSKESILPKRNSDKLIARKKDWDPKKYGGFDSPTVAYSVLVVAKVEKGKSKKLKSVKELLGITIMERSSFEKNPIDFLEAKGYKEVKKDLIIKLPKYSLFELENGRKRMLASAGELQKGNELALPSKYVNFLYLASHYEKLKGSPEDNEQKQLFVEQHKHYLDEIIEQISEFSKRVILADANLDKVLSAYNKHRDKPIREQAENIIHLFTLTNLGAPAAFKYFDTTIDRKRYTSTKEVLDATLIHQSITGLYETRIDLSQLGGDGGGGGEAAAKGSSGGMDPLQLLQPLEAEIKGTKLKAHWNSGATITCVPQAFLEEEVPIKNIWIKTIHGEKEQPVYYLTFKIQGRKVEAEVISSPYDYILVSPSDIPWLMKKPLQLTTLVPLQEYEERLLKQTMLTGSYKEKLQSLFLKYDALWQHWENQVGHRRIKPHHIATGTVNPRPQKQYPINPKAKASIQTVINDLLKQGVLIQQNSIMNTPVYPVPKPDGKWRMVLDYREVNKTIPLIAAQNQHSAGILSSIFRGKYKTTLDLSNGFWAHSITPESYWLTAFTWLGQQYCWTRLPQGFLNSPALFTADVVDLLKEVPNVQVYVDDIYISHDDPREHLEQLEKVFSLLLNAGYVVSLKKSEIAQHEVEFLGFNITKEGRGLTETFKQKLLNITPPRDLKQLQSILGLLNFARNFIPNFSELVKPLYNIIATANGKYITWTTDNSQQLQNIISMLNSAENLEERNPEVRLIMKVNTSPSAGYIRFYNEFAKRPIMYLNYVYTKAEVKFTNTEKLLTTIHKGLIKALDLGMGQEILVYSPIVSMTKIQKTPLPERKALPIRWITWMSYLEDPRIQFHYDKTLPELQQVPTVTDDIIAKIKHPSEFSMVFYTDGSAIKHPNVNKSHNAGMGIAQVQFKPEFTVINTWSIPLGDHTAQLAEVAAVEFACKKALKIDGPVLIVTDSFYVAESVNKELPYWQSNGFFNNKKKPLKHVSKWKSIADCIQLKPDIIIIHEKGHQPTASTFHTEGNNLADKLATQGSYVVNAGKRTADGSEFEKRTADGSEFESPKKKAKVE

SEQ ID NO: 505 - protein, 2176 aa, synthetic construct
  source 1..2176: note = Description of Artificial Sequence: Synthetic polypeptide
MPAAKRVKLDGGDKKYSIGLDIGTNSVGWAVITDEYKVPSKKFKVLGNTDRHSIKKNLIGALLFDSGETAEATRLKRTARRRYTRRKNRICYLQEIFSNEMAKVDDSFFHRLEESFLVEEDKKHERHPIFGNIVDEVAYHEKYPTIYHLRKKLVDSTDKADLRLIYLALAHMIKFRGHFLIEGDLNPDNSDVDKLFIQLVQTYNQLFEENPINASGVDAKAILSARLSKSRRLENLIAQLPGEKKNGLFGNLIALSLGLTPNFKSNFDLAEDAKLQLSKDTYDDDLDNLLAQIGDQYADLFLAAKNLSDAILLSDILRVNTEITKAPLSASMIKRYDEHHQDLTLLKALVRQQLPEKYKEIFFDQSKNGYAGYIDGGASQEEFYKFIKPILEKMDGTEELLVKLNREDLLRKQRTFDNGSIPHQIHLGELHAILRRQEDFYPFLKDNREKIEKILTFRIPYYVGPLARGNSRFAWMTRKSEETITPWNFEEVVDKGASAQSFIERMTNFDKNLPNEKVLPKHSLLYEYFTVYNELTKVKYVTEGMRKPAFLSGEQKKAIVDLLFKTNRKVTVKQLKEDYFKKIECFDSVEISGVEDRFNASLGTYHDLLKIIKDKDFLDNEENEDILEDIVLTLTLFEDREMIEERLKTYAHLFDDKVMKQLKRRRYTGWGRLSRKLINGIRDKQSGKTILDFLKSDGFANRNFMQLIHDDSLTFKEDIQKAQVSGQGDSLHEHIANLAGSPAIKKGILQTVKVVDELVKVMGRHKPENIVIEMARENQTTQKGQKNSRERMKRIEEGIKELGSQILKEHPVENTQLQNEKLYLYYLQNGRDMYVDQELDINRLSDYDVDHIVPQSFLKDDSIDNKVLTRSDKARGKSDNVPSEEVVKKMKNYWRQLLNAKLITQRKFDNLTKAERGGLSELDKAGFIKRQLVETRQITKHVAQILDSRMNTKYDENDKLIREVKVITLKSKLVSDFRKDFQFYKVREINNYHHAHDAYLNAVVGTALIKKYPKLESEFVYGDYKVYDVRKMIAKSEQEIGKATAKYFFYSNIMNFFKTEITLANGEIRKRPLIETNGETGEIVWDKGRDFATVRKVLSMPQVNIVKKTEVQTGGFSKESILPKRNSDKLIARKKDWDPKKYGGFDSPTVAYSVLVVAKVEKGKSKKLKSVKELLGITIMERSSFEKNPIDFLEAKGYKEVKKDLIIKLPKYSLFELENGRKRMLASAGELQKGNELALPSKYVNFLYLASHYEKLKGSPEDNEQKQLFVEQHKHYLDEIIEQISEFSKRVILADANLDKVLSAYNKHRDKPIREQAENIIHLFTLTNLGAPAAFKYFDTTIDRKRYTSTKEVLDATLIHQSITGLYETRIDLSQLGGDGGEAAAKGGSGSSGGMDPLQLLQPLEAEIKGTKLKAHWNSGATITCVPQAFLEEEVPIKNIWIKTIHGEKEQPVYYLTFKIQGRKVEAEVISSPYDYILVSPSDIPWLMKKPLQLTTLVPLQEYEERLLKQTMLTGSYKEKLQSLFLKYDALWQHWENQVGHRRIKPHHIATGTVNPRPQKQYPINPKAKASIQTVINDLLKQGVLIQQNSIMNTPVYPVPKPDGKWRMVLDYREVNKTIPLIAAQNQHSAGILSSIFRGKYKTTLDLSNGFWAHSITPESYWLTAFTWLGQQYCWTRLPQGFLNSPALFTADVVDLLKEVPNVQVYVDDIYISHDDPREHLEQLEKVFSLLLNAGYVVSLKKSEIAQHEVEFLGFNITKEGRGLTETFKQKLLNITPPRDLKQLQSILGLLNFARNFIPNFSELVKPLYNIIATANGKYITWTTDNSQQLQNIISMLNSAENLEERNPEVRLIMKVNTSPSAGYIRFYNEFAKRPIMYLNYVYTKAEVKFTNTEKLLTTIHKGLIKALDLGMGQEILVYSPIVSMTKIQKTPLPERKALPIRWITWMSYLEDPRIQFHYDKTLPELQQVPTVTDDIIAKIKHPSEFSMVFYTDGSAIKHPNVNKSHNAGMGIAQVQFKPEFTVINTWSIPLGDHTAQLAEVAAVEFACKKALKIDGPVLIVTDSFYVAESVNKELPYWQSNGFFNNKKKPLKHVSKWKSIADCIQLKPDIIIIHEKGHQPTASTFHTEGNNLADKLATQGSYVVNAGKRTADGSEFEKRTADGSEFESPKKKAKVE

SEQ ID NO: 506 - protein, 2176 aa, synthetic construct
  source 1..2176: note = Description of Artificial Sequence: Synthetic polypeptide
MPAAKRVKLDGGDKKYSIGLDIGTNSVGWAVITDEYKVPSKKFKVLGNTDRHSIKKNLIGALLFDSGETAEATRLKRTARRRYTRRKNRICYLQEIFSNEMAKVDDSFFHRLEESFLVEEDKKHERHPIFGNIVDEVAYHEKYPTIYHLRKKLVDSTDKADLRLIYLALAHMIKFRGHFLIEGDLNPDNSDVDKLFIQLVQTYNQLFEENPINASGVDAKAILSARLSKSRRLENLIAQLPGEKKNGLFGNLIALSLGLTPNFKSNFDLAEDAKLQLSKDTYDDDLDNLLAQIGDQYADLFLAAKNLSDAILLSDILRVNTEITKAPLSASMIKRYDEHHQDLTLLKALVRQQLPEKYKEIFFDQSKNGYAGYIDGGASQEEFYKFIKPILEKMDGTEELLVKLNREDLLRKQRTFDNGSIPHQIHLGELHAILRRQEDFYPFLKDNREKIEKILTFRIPYYVGPLARGNSRFAWMTRKSEETITPWNFEEVVDKGASAQSFIERMTNFDKNLPNEKVLPKHSLLYEYFTVYNELTKVKYVTEGMRKPAFLSGEQKKAIVDLLFKTNRKVTVKQLKEDYFKKIECFDSVEISGVEDRFNASLGTYHDLLKIIKDKDFLDNEENEDILEDIVLTLTLFEDREMIEERLKTYAHLFDDKVMKQLKRRRYTGWGRLSRKLINGIRDKQSGKTILDFLKSDGFANRNFMQLIHDDSLTFKEDIQKAQVSGQGDSLHEHIANLAGSPAIKKGILQTVKVVDELVKVMGRHKPENIVIEMARENQTTQKGQKNSRERMKRIEEGIKELGSQILKEHPVENTQLQNEKLYLYYLQNGRDMYVDQELDINRLSDYDVDHIVPQSFLKDDSIDNKVLTRSDKARGKSDNVPSEEVVKKMKNYWRQLLNAKLITQRKFDNLTKAERGGLSELDKAGFIKRQLVETRQITKHVAQILDSRMNTKYDENDKLIREVKVITLKSKLVSDFRKDFQFYKVREINNYHHAHDAYLNAVVGTALIKKYPKLESEFVYGDYKVYDVRKMIAKSEQEIGKATAKYFFYSNIMNFFKTEITLANGEIRKRPLIETNGETGEIVWDKGRDFATVRKVLSMPQVNIVKKTEVQTGGFSKESILPKRNSDKLIARKKDWDPKKYGGFDSPTVAYSVLVVAKVEKGKSKKLKSVKELLGITIMERSSFEKNPIDFLEAKGYKEVKKDLIIKLPKYSLFELENGRKRMLASAGELQKGNELALPSKYVNFLYLASHYEKLKGSPEDNEQKQLFVEQHKHYLDEIIEQISEFSKRVILADANLDKVLSAYNKHRDKPIREQAENIIHLFTLTNLGAPAAFKYFDTTIDRKRYTSTKEVLDATLIHQSITGLYETRIDLSQLGGDGGGSSEAAAKPAPGGMDPLQLLQPLEAEIKGTKLKAHWNSGATITCVPQAFLEEEVPIKNIWIKTIHGEKEQPVYYLTFKIQGRKVEAEVISSPYDYILVSPSDIPWLMKKPLQLTTLVPLQEYEERLLKQTMLTGSYKEKLQSLFLKYDALWQHWENQVGHRRIKPHHIATGTVNPRPQKQYPINPKAKASIQTVINDLLKQGVLIQQNSIMNTPVYPVPKPDGKWRMVLDYREVNKTIPLIAAQNQHSAGILSSIFRGKYKTTLDLSNGFWAHSITPESYWLTAFTWLGQQYCWTRLPQGFLNSPALFTADVVDLLKEVPNVQVYVDDIYISHDDPREHLEQLEKVFSLLLNAGYVVSLKKSEIAQHEVEFLGFNITKEGRGLTETFKQKLLNITPPRDLKQLQSILGLLNFARNFIPNFSELVKPLYNIIATANGKYITWTTDNSQQLQNIISMLNSAENLEERNPEVRLIMKVNTSPSAGYIRFYNEFAKRPIMYLNYVYTKAEVKFTNTEKLLTTIHKGLIKALDLGMGQEILVYSPIVSMTKIQKTPLPERKALPIRWITWMSYLEDPRIQFHYDKTLPELQQVPTVTDDIIAKIKHPSEFSMVFYTDGSAIKHPNVNKSHNAGMGIAQVQFKPEFTVINTWSIPLGDHTAQLAEVAAVEFACKKALKIDGPVLIVTDSFYVAESVNKELPYWQSNGFFNNKKKPLKHVSKWKSIADCIQLKPDIIIIHEKGHQPTASTFHTEGNNLADKLATQGSYVVNAGKRTADGSEFEKRTADGSEFESPKKKAKVE

SEQ ID NO: 507 - protein, 2176 aa, synthetic construct
  source 1..2176: note = Description of Artificial Sequence: Synthetic polypeptide
MPAAKRVKLDGGDKKYSIGLDIGTNSVGWAVITDEYKVPSKKFKVLGNTDRHSIKKNLIGALLFDSGETAEATRLKRTARRRYTRRKNRICYLQEIFSNEMAKVDDSFFHRLEESFLVEEDKKHERHPIFGNIVDEVAYHEKYPTIYHLRKKLVDSTDKADLRLIYLALAHMIKFRGHFLIEGDLNPDNSDVDKLFIQLVQTYNQLFEENPINASGVDAKAILSARLSKSRRLENLIAQLPGEKKNGLFGNLIALSLGLTPNFKSNFDLAEDAKLQLSKDTYDDDLDNLLAQIGDQYADLFLAAKNLSDAILLSDILRVNTEITKAPLSASMIKRYDEHHQDLTLLKALVRQQLPEKYKEIFFDQSKNGYAGYIDGGASQEEFYKFIKPILEKMDGTEELLVKLNREDLLRKQRTFDNGSIPHQIHLGELHAILRRQEDFYPFLKDNREKIEKILTFRIPYYVGPLARGNSRFAWMTRKSEETITPWNFEEVVDKGASAQSFIERMTNFDKNLPNEKVLPKHSLLYEYFTVYNELTKVKYVTEGMRKPAFLSGEQKKAIVDLLFKTNRKVTVKQLKEDYFKKIECFDSVEISGVEDRFNASLGTYHDLLKIIKDKDFLDNEENEDILEDIVLTLTLFEDREMIEERLKTYAHLFDDKVMKQLKRRRYTGWGRLSRKLINGIRDKQSGKTILDFLKSDGFANRNFMQLIHDDSLTFKEDIQKAQVSGQGDSLHEHIANLAGSPAIKKGILQTVKVVDELVKVMGRHKPENIVIEMARENQTTQKGQKNSRERMKRIEEGIKELGSQILKEHPVENTQLQNEKLYLYYLQNGRDMYVDQELDINRLSDYDVDHIVPQSFLKDDSIDNKVLTRSDKARGKSDNVPSEEVVKKMKNYWRQLLNAKLITQRKFDNLTKAERGGLSELDKAGFIKRQLVETRQITKHVAQILDSRMNTKYDENDKLIREVKVITLKSKLVSDFRKDFQFYKVREINNYHHAHDAYLNAVVGTALIKKYPKLESEFVYGDYKVYDVRKMIAKSEQEIGKATAKYFFYSNIMNFFKTEITLANGEIRKRPLIETNGETGEIVWDKGRDFATVRKVLSMPQVNIVKKTEVQTGGFSKESILPKRNSDKLIARKKDWDPKKYGGFDSPTVAYSVLVVAKVEKGKSKKLKSVKELLGITIMERSSFEKNPIDFLEAKGYKEVKKDLIIKLPKYSLFELENGRKRMLASAGELQKGNELALPSKYVNFLYLASHYEKLKGSPEDNEQKQLFVEQHKHYLDEIIEQISEFSKRVILADANLDKVLSAYNKHRDKPIREQAENIIHLFTLTNLGAPAAFKYFDTTIDRKRYTSTKEVLDATLIHQSITGLYETRIDLSQLGGDGGGGGPAPEAAAKGGMDPLQLLQPLEAEIKGTKLKAHWNSGATITCVPQAFLEEEVPIKNIWIKTIHGEKEQPVYYLTFKIQGRKVEAEVISSPYDYILVSPSDIPWLMKKPLQLTTLVPLQEYEERLLKQTMLTGSYKEKLQSLFLKYDALWQHWENQVGHRRIKPHHIATGTVNPRPQKQYPINPKAKASIQTVINDLLKQGVLIQQNSIMNTPVYPVPKPDGKWRMVLDYREVNKTIPLIAAQNQHSAGILSSIFRGKYKTTLDLSNGFWAHSITPESYWLTAFTWLGQQYCWTRLPQGFLNSPALFTADVVDLLKEVPNVQVYVDDIYISHDDPREHLEQLEKVFSLLLNAGYVVSLKKSEIAQHEVEFLGFNITKEGRGLTETFKQKLLNITPPRDLKQLQSILGLLNFARNFIPNFSELVKPLYNIIATANGKYITWTTDNSQQLQNIISMLNSAENLEERNPEVRLIMKVNTSPSAGYIRFYNEFAKRPIMYLNYVYTKAEVKFTNTEKLLTTIHKGLIKALDLGMGQEILVYSPIVSMTKIQKTPLPERKALPIRWITWMSYLEDPRIQFHYDKTLPELQQVPTVTDDIIAKIKHPSEFSMVFYTDGSAIKHPNVNKSHNAGMGIAQVQFKPEFTVINTWSIPLGDHTAQLAEVAAVEFACKKALKIDGPVLIVTDSFYVAESVNKELPYWQSNGFFNNKKKPLKHVSKWKSIADCIQLKPDIIIIHEKGHQPTASTFHTEGNNLADKLATQGSYVVNAGKRTADGSEFEKRTADGSEFESPKKKAKVE

SEQ ID NO: 508 - protein, 2174 aa, synthetic construct
  source 1..2174: note = Description of Artificial Sequence: Synthetic polypeptide
MPAAKRVKLDGGDKKYSIGLDIGTNSVGWAVITDEYKVPSKKFKVLGNTDRHSIKKNLIGALLFDSGETAEATRLKRTARRRYTRRKNRICYLQEIFSNEMAKVDDSFFHRLEESFLVEEDKKHERHPIFGNIVDEVAYHEKYPTIYHLRKKLVDSTDKADLRLIYLALAHMIKFRGHFLIEGDLNPDNSDVDKLFIQLVQTYNQLFEENPINASGVDAKAILSARLSKSRRLENLIAQLPGEKKNGLFGNLIALSLGLTPNFKSNFDLAEDAKLQLSKDTYDDDLDNLLAQIGDQYADLFLAAKNLSDAILLSDILRVNTEITKAPLSASMIKRYDEHHQDLTLLKALVRQQLPEKYKEIFFDQSKNGYAGYIDGGASQEEFYKFIKPILEKMDGTEELLVKLNREDLLRKQRTFDNGSIPHQIHLGELHAILRRQEDFYPFLKDNREKIEKILTFRIPYYVGPLARGNSRFAWMTRKSEETITPWNFEEVVDKGASAQSFIERMTNFDKNLPNEKVLPKHSLLYEYFTVYNELTKVKYVTEGMRKPAFLSGEQKKAIVDLLFKTNRKVTVKQLKEDYFKKIECFDSVEISGVEDRFNASLGTYHDLLKIIKDKDFLDNEENEDILEDIVLTLTLFEDREMIEERLKTYAHLFDDKVMKQLKRRRYTGWGRLSRKLINGIRDKQSGKTILDFLKSDGFANRNFMQLIHDDSLTFKEDIQKAQVSGQGDSLHEHIANLAGSPAIKKGILQTVKVVDELVKVMGRHKPENIVIEMARENQTTQKGQKNSRERMKRIEEGIKELGSQILKEHPVENTQLQNEKLYLYYLQNGRDMYVDQELDINRLSDYDVDHIVPQSFLKDDSIDNKVLTRSDKARGKSDNVPSEEVVKKMKNYWRQLLNAKLITQRKFDNLTKAERGGLSELDKAGFIKRQLVETRQITKHVAQILDSRMNTKYDENDKLIREVKVITLKSKLVSDFRKDFQFYKVREINNYHHAHDAYLNAVVGTALIKKYPKLESEFVYGDYKVYDVRKMIAKSEQEIGKATAKYFFYSNIMNFFKTEITLANGEIRKRPLIETNGETGEIVWDKGRDFATVRKVLSMPQVNIVKKTEVQTGGFSKESILPKRNSDKLIARKKDWDPKKYGGFDSPTVAYSVLVVAKVEKGKSKKLKSVKELLGITIMERSSFEKNPIDFLEAKGYKEVKKDLIIKLPKYSLFELENGRKRMLASAGELQKGNELALPSKYVNFLYLASHYEKLKGSPEDNEQKQLFVEQHKHYLDEIIEQISEFSKRVILADANLDKVLSAYNKHRDKPIREQAENIIHLFTLTNLGAPAAFKYFDTTIDRKRYTSTKEVLDATLIHQSITGLYETRIDLSQLGGDGGGSSGGGGGSGGMDPLQLLQPLEAEIKGTKLKAHWNSGATITCVPQAFLEEEVPIKNIWIKTIHGEKEQPVYYLTFKIQGRKVEAEVISSPYDYILVSPSDIPWLMKKPLQLTTLVPLQEYEERLLKQTMLTGSYKEKLQSLFLKYDALWQHWENQVGHRRIKPHHIATGTVNPRPQKQYPINPKAKASIQTVINDLLKQGVLIQQNSIMNTPVYPVPKPDGKWRMVLDYREVNKTIPLIAAQNQHSAGILSSIFRGKYKTTLDLSNGFWAHSITPESYWLTAFTWLGQQYCWTRLPQGFLNSPALFTADVVDLLKEVPNVQVYVDDIYISHDDPREHLEQLEKVFSLLLNAGYVVSLKKSEIAQHEVEFLGFNITKEGRGLTETFKQKLLNITPPRDLKQLQSILGLLNFARNFIPNFSELVKPLYNIIATANGKYITWTTDNSQQLQNIISMLNSAENLEERNPEVRLIMKVNTSPSAGYIRFYNEFAKRPIMYLNYVYTKAEVKFTNTEKLLTTIHKGLIKALDLGMGQEILVYSPIVSMTKIQKTPLPERKALPIRWITWMSYLEDPRIQFHYDKTLPELQQVPTVTDDIIAKIKHPSEFSMVFYTDGSAIKHPNVNKSHNAGMGIAQVQFKPEFTVINTWSIPLGDHTAQLAEVAAVEFACKKALKIDGPVLIVTDSFYVAESVNKELPYWQSNGFFNNKKKPLKHVSKWKSIADCIQLKPDIIIIHEKGHQPTASTFHTEGNNLADKLATQGSYVVNAGKRTADGSEFEKRTADGSEFESPKKKAKVE

SEQ ID NO: 509 - protein, 2183 aa, synthetic construct
  source 1..2183: note = Description of Artificial Sequence: Synthetic polypeptide
MPAAKRVKLDGGDKKYSIGLDIGTNSVGWAVITDEYKVPSKKFKVLGNTDRHSIKKNLIGALLFDSGETAEATRLKRTARRRYTRRKNRICYLQEIFSNEMAKVDDSFFHRLEESFLVEEDKKHERHPIFGNIVDEVAYHEKYPTIYHLRKKLVDSTDKADLRLIYLALAHMIKFRGHFLIEGDLNPDNSDVDKLFIQLVQTYNQLFEENPINASGVDAKAILSARLSKSRRLENLIAQLPGEKKNGLFGNLIALSLGLTPNFKSNFDLAEDAKLQLSKDTYDDDLDNLLAQIGDQYADLFLAAKNLSDAILLSDILRVNTEITKAPLSASMIKRYDEHHQDLTLLKALVRQQLPEKYKEIFFDQSKNGYAGYIDGGASQEEFYKFIKPILEKMDGTEELLVKLNREDLLRKQRTFDNGSIPHQIHLGELHAILRRQEDFYPFLKDNREKIEKILTFRIPYYVGPLARGNSRFAWMTRKSEETITPWNFEEVVDKGASAQSFIERMTNFDKNLPNEKVLPKHSLLYEYFTVYNELTKVKYVTEGMRKPAFLSGEQKKAIVDLLFKTNRKVTVKQLKEDYFKKIECFDSVEISGVEDRFNASLGTYHDLLKIIKDKDFLDNEENEDILEDIVLTLTLFEDREMIEERLKTYAHLFDDKVMKQLKRRRYTGWGRLSRKLINGIRDKQSGKTILDFLKSDGFANRNFMQLIHDDSLTFKEDIQKAQVSGQGDSLHEHIANLAGSPAIKKGILQTVKVVDELVKVMGRHKPENIVIEMARENQTTQKGQKNSRERMKRIEEGIKELGSQILKEHPVENTQLQNEKLYLYYLQNGRDMYVDQELDINRLSDYDVDHIVPQSFLKDDSIDNKVLTRSDKARGKSDNVPSEEVVKKMKNYWRQLLNAKLITQRKFDNLTKAERGGLSELDKAGFIKRQLVETRQITKHVAQILDSRMNTKYDENDKLIREVKVITLKSKLVSDFRKDFQFYKVREINNYHHAHDAYLNAVVGTALIKKYPKLESEFVYGDYKVYDVRKMIAKSEQEIGKATAKYFFYSNIMNFFKTEITLANGEIRKRPLIETNGETGEIVWDKGRDFATVRKVLSMPQVNIVKKTEVQTGGFSKESILPKRNSDKLIARKKDWDPKKYGGFDSPTVAYSVLVVAKVEKGKSKKLKSVKELLGITIMERSSFEKNPIDFLEAKGYKEVKKDLIIKLPKYSLFELENGRKRMLASAGELQKGNELALPSKYVNFLYLASHYEKLKGSPEDNEQKQLFVEQHKHYLDEIIEQISEFSKRVILADANLDKVLSAYNKHRDKPIREQAENIIHLFTLTNLGAPAAFKYFDTTIDRKRYTSTKEVLDATLIHQSITGLYETRIDLSQLGGDGGGSSGSSGSSGSSGSSGSSGGMDPLQLLQPLEAEIKGTKLKAHWNSGATITCVPQAFLEEEVPIKNIWIKTIHGEKEQPVYYLTFKIQGRKVEAEVISSPYDYILVSPSDIPWLMKKPLQLTTLVPLQEYEERLLKQTMLTGSYKEKLQSLFLKYDALWQHWENQVGHRRIKPHHIATGTVNPRPQKQYPINPKAKASIQTVINDLLKQGVLIQQNSIMNTPVYPVPKPDGKWRMVLDYREVNKTIPLIAAQNQHSAGILSSIFRGKYKTTLDLSNGFWAHSITPESYWLTAFTWLGQQYCWTRLPQGFLNSPALFTADVVDLLKEVPNVQVYVDDIYISHDDPREHLEQLEKVFSLLLNAGYVVSLKKSEIAQHEVEFLGFNITKEGRGLTETFKQKLLNITPPRDLKQLQSILGLLNFARNFIPNFSELVKPLYNIIATANGKYITWTTDNSQQLQNIISMLNSAENLEERNPEVRLIMKVNTSPSAGYIRFYNEFAKRPIMYLNYVYTKAEVKFTNTEKLLTTIHKGLIKALDLGMGQEILVYSPIVSMTKIQKTPLPERKALPIRWITWMSYLEDPRIQFHYDKTLPELQQVPTVTDDIIAKIKHPSEFSMVFYTDGSAIKHPNVNKSHNAGMGIAQVQFKPEFTVINTWSIPLGDHTAQLAEVAAVEFACKKALKIDGPVLIVTDSFYVAESVNKELPYWQSNGFFNNKKKPLKHVSKWKSIADCIQLKPDIIIIHEKGHQPTASTFHTEGNNLADKLATQGSYVVNAGKRTADGSEFEKRTADGSEFESPKKKAKVE

SEQ ID NO: 510 - protein, 2176 aa, synthetic construct
  source 1..2176: note = Description of Artificial Sequence: Synthetic polypeptide
MPAAKRVKLDGGDKKYSIGLDIGTNSVGWAVITDEYKVPSKKFKVLGNTDRHSIKKNLIGALLFDSGETAEATRLKRTARRRYTRRKNRICYLQEIFSNEMAKVDDSFFHRLEESFLVEEDKKHERHPIFGNIVDEVAYHEKYPTIYHLRKKLVDSTDKADLRLIYLALAHMIKFRGHFLIEGDLNPDNSDVDKLFIQLVQTYNQLFEENPINASGVDAKAILSARLSKSRRLENLIAQLPGEKKNGLFGNLIALSLGLTPNFKSNFDLAEDAKLQLSKDTYDDDLDNLLAQIGDQYADLFLAAKNLSDAILLSDILRVNTEITKAPLSASMIKRYDEHHQDLTLLKALVRQQLPEKYKEIFFDQSKNGYAGYIDGGASQEEFYKFIKPILEKMDGTEELLVKLNREDLLRKQRTFDNGSIPHQIHLGELHAILRRQEDFYPFLKDNREKIEKILTFRIPYYVGPLARGNSRFAWMTRKSEETITPWNFEEVVDKGASAQSFIERMTNFDKNLPNEKVLPKHSLLYEYFTVYNELTKVKYVTEGMRKPAFLSGEQKKAIVDLLFKTNRKVTVKQLKEDYFKKIECFDSVEISGVEDRFNASLGTYHDLLKIIKDKDFLDNEENEDILEDIVLTLTLFEDREMIEERLKTYAHLFDDKVMKQLKRRRYTGWGRLSRKLINGIRDKQSGKTILDFLKSDGFANRNFMQLIHDDSLTFKEDIQKAQVSGQGDSLHEHIANLAGSPAIKKGILQTVKVVDELVKVMGRHKPENIVIEMARENQTTQKGQKNSRERMKRIEEGIKELGSQILKEHPVENTQLQNEKLYLYYLQNGRDMYVDQELDINRLSDYDVDHIVPQSFLKDDSIDNKVLTRSDKARGKSDNVPSEEVVKKMKNYWRQLLNAKLITQRKFDNLTKAERGGLSELDKAGFIKRQLVETRQITKHVAQILDSRMNTKYDENDKLIREVKVITLKSKLVSDFRKDFQFYKVREINNYHHAHDAYLNAVVGTALIKKYPKLESEFVYGDYKVYDVRKMIAKSEQEIGKATAKYFFYSNIMNFFKTEITLANGEIRKRPLIETNGETGEIVWDKGRDFATVRKVLSMPQVNIVKKTEVQTGGFSKESILPKRNSDKLIARKKDWDPKKYGGFDSPTVAYSVLVVAKVEKGKSKKLKSVKELLGITIMERSSFEKNPIDFLEAKGYKEVKKDLIIKLPKYSLFELENGRKRMLASAGELQKGNELALPSKYVNFLYLASHYEKLKGSPEDNEQKQLFVEQHKHYLDEIIEQISEFSKRVILADANLDKVLSAYNKHRDKPIREQAENIIHLFTLTNLGAPAAFKYFDTTIDRKRYTSTKEVLDATLIHQSITGLYETRIDLSQLGGDGGPAPEAAAKGGGGGMDPLQLLQPLEAEIKGTKLKAHWNSGATITCVPQAFLEEEVPIKNIWIKTIHGEKEQPVYYLTFKIQGRKVEAEVISSPYDYILVSPSDIPWLMKKPLQLTTLVPLQEYEERLLKQTMLTGSYKEKLQSLFLKYDALWQHWENQVGHRRIKPHHIATGTVNPRPQKQYPINPKAKASIQTVINDLLKQGVLIQQNSIMNTPVYPVPKPDGKWRMVLDYREVNKTIPLIAAQNQHSAGILSSIFRGKYKTTLDLSNGFWAHSITPESYWLTAFTWLGQQYCWTRLPQGFLNSPALFTADVVDLLKEVPNVQVYVDDIYISHDDPREHLEQLEKVFSLLLNAGYVVSLKKSEIAQHEVEFLGFNITKEGRGLTETFKQKLLNITPPRDLKQLQSILGLLNFARNFIPNFSELVKPLYNIIATANGKYITWTTDNSQQLQNIISMLNSAENLEERNPEVRLIMKVNTSPSAGYIRFYNEFAKRPIMYLNYVYTKAEVKFTNTEKLLTTIHKGLIKALDLGMGQEILVYSPIVSMTKIQKTPLPERKALPIRWITWMSYLEDPRIQFHYDKTLPELQQVPTVTDDIIAKIKHPSEFSMVFYTDGSAIKHPNVNKSHNAGMGIAQVQFKPEFTVINTWSIPLGDHTAQLAEVAAVEFACKKALKIDGPVLIVTDSFYVAESVNKELPYWQSNGFFNNKKKPLKHVSKWKSIADCIQLKPDIIIIHEKGHQPTASTFHTEGNNLADKLATQGSYVVNAGKRTADGSEFEKRTADGSEFESPKKKAKVE

SEQ ID NO: 511 - protein, 2176 aa, synthetic construct
  source 1..2176: note = Description of Artificial Sequence: Synthetic polypeptide
MPAAKRVKLDGGDKKYSIGLDIGTNSVGWAVITDEYKVPSKKFKVLGNTDRHSIKKNLIGALLFDSGETAEATRLKRTARRRYTRRKNRICYLQEIFSNEMAKVDDSFFHRLEESFLVEEDKKHERHPIFGNIVDEVAYHEKYPTIYHLRKKLVDSTDKADLRLIYLALAHMIKFRGHFLIEGDLNPDNSDVDKLFIQLVQTYNQLFEENPINASGVDAKAILSARLSKSRRLENLIAQLPGEKKNGLFGNLIALSLGLTPNFKSNFDLAEDAKLQLSKDTYDDDLDNLLAQIGDQYADLFLAAKNLSDAILLSDILRVNTEITKAPLSASMIKRYDEHHQDLTLLKALVRQQLPEKYKEIFFDQSKNGYAGYIDGGASQEEFYKFIKPILEKMDGTEELLVKLNREDLLRKQRTFDNGSIPHQIHLGELHAILRRQEDFYPFLKDNREKIEKILTFRIPYYVGPLARGNSRFAWMTRKSEETITPWNFEEVVDKGASAQSFIERMTNFDKNLPNEKVLPKHSLLYEYFTVYNELTKVKYVTEGMRKPAFLSGEQKKAIVDLLFKTNRKVTVKQLKEDYFKKIECFDSVEISGVEDRFNASLGTYHDLLKIIKDKDFLDNEENEDILEDIVLTLTLFEDREMIEERLKTYAHLFDDKVMKQLKRRRYTGWGRLSRKLINGIRDKQSGKTILDFLKSDGFANRNFMQLIHDDSLTFKEDIQKAQVSGQGDSLHEHIANLAGSPAIKKGILQTVKVVDELVKVMGRHKPENIVIEMARENQTTQKGQKNSRERMKRIEEGIKELGSQILKEHPVENTQLQNEKLYLYYLQNGRDMYVDQELDINRLSDYDVDHIVPQSFLKDDSIDNKVLTRSDKARGKSDNVPSEEVVKKMKNYWRQLLNAKLITQRKFDNLTKAERGGLSELDKAGFIKRQLVETRQITKHVAQILDSRMNTKYDENDKLIREVKVITLKSKLVSDFRKDFQFYKVREINNYHHAHDAYLNAVVGTALIKKYPKLESEFVYGDYKVYDVRKMIAKSEQEIGKATAKYFFYSNIMNFFKTEITLANGEIRKRPLIETNGETGEIVWDKGRDFATVRKVLSMPQVNIVKKTEVQTGGFSKESILPKRNSDKLIARKKDWDPKKYGGFDSPTVAYSVLVVAKVEKGKSKKLKSVKELLGITIMERSSFEKNPIDFLEAKGYKEVKKDLIIKLPKYSLFELENGRKRMLASAGELQKGNELALPSKYVNFLYLASHYEKLKGSPEDNEQKQLFVEQHKHYLDEIIEQISEFSKRVILADANLDKVLSAYNKHRDKPIREQAENIIHLFTLTNLGAPAAFKYFDTTIDRKRYTSTKEVLDATLIHQSITGLYETRIDLSQLGGDGGEAAAKGGGGSSGGMDPLQLLQPLEAEIKGTKLKAHWNSGATITCVPQAFLEEEVPIKNIWIKTIHGEKEQPVYYLTFKIQGRKVEAEVISSPYDYILVSPSDIPWLMKKPLQLTTLVPLQEYEERLLKQTMLTGSYKEKLQSLFLKYDALWQHWENQVGHRRIKPHHIATGTVNPRPQKQYPINPKAKASIQTVINDLLKQGVLIQQNSIMNTPVYPVPKPDGKWRMVLDYREVNKTIPLIAAQNQHSAGILSSIFRGKYKTTLDLSNGFWAHSITPESYWLTAFTWLGQQYCWTRLPQGFLNSPALFTADVVDLLKEVPNVQVYVDDIYISHDDPREHLEQLEKVFSLLLNAGYVVSLKKSEIAQHEVEFLGFNITKEGRGLTETFKQKLLNITPPRDLKQLQSILGLLNFARNFIPNFSELVKPLYNIIATANGKYITWTTDNSQQLQNIISMLNSAENLEERNPEVRLIMKVNTSPSAGYIRFYNEFAKRPIMYLNYVYTKAEVKFTNTEKLLTTIHKGLIKALDLGMGQEILVYSPIVSMTKIQKTPLPERKALPIRWITWMSYLEDPRIQFHYDKTLPELQQVPTVTDDIIAKIKHPSEFSMVFYTDGSAIKHPNVNKSHNAGMGIAQVQFKPEFTVINTWSIPLGDHTAQLAEVAAVEFACKKALKIDGPVLIVTDSFYVAESVNKELPYWQSNGFFNNKKKPLKHVSKWKSIADCIQLKPDIIIIHEKGHQPTASTFHTEGNNLADKLATQGSYVVNAGKRTADGSEFEKRTADGSEFESPKKKAKVE

SEQ ID NO: 512 - protein, 2171 aa, synthetic construct
  source 1..2171: note = Description of Artificial Sequence: Synthetic polypeptide
MPAAKRVKLDGGDKKYSIGLDIGTNSVGWAVITDEYKVPSKKFKVLGNTDRHSIKKNLIGALLFDSGETAEATRLKRTARRRYTRRKNRICYLQEIFSNEMAKVDDSFFHRLEESFLVEEDKKHERHPIFGNIVDEVAYHEKYPTIYHLRKKLVDSTDKADLRLIYLALAHMIKFRGHFLIEGDLNPDNSDVDKLFIQLVQTYNQLFEENPINASGVDAKAILSARLSKSRRLENLIAQLPGEKKNGLFGNLIALSLGLTPNFKSNFDLAEDAKLQLSKDTYDDDLDNLLAQIGDQYADLFLAAKNLSDAILLSDILRVNTEITKAPLSASMIKRYDEHHQDLTLLKALVRQQLPEKYKEIFFDQSKNGYAGYIDGGASQEEFYKFIKPILEKMDGTEELLVKLNREDLLRKQRTFDNGSIPHQIHLGELHAILRRQEDFYPFLKDNREKIEKILTFRIPYYVGPLARGNSRFAWMTRKSEETITPWNFEEVVDKGASAQSFIERMTNFDKNLPNEKVLPKHSLLYEYFTVYNELTKVKYVTEGMRKPAFLSGEQKKAIVDLLFKTNRKVTVKQLKEDYFKKIECFDSVEISGVEDRFNASLGTYHDLLKIIKDKDFLDNEENEDILEDIVLTLTLFEDREMIEERLKTYAHLFDDKVMKQLKRRRYTGWGRLSRKLINGIRDKQSGKTILDFLKSDGFANRNFMQLIHDDSLTFKEDIQKAQVSGQGDSLHEHIANLAGSPAIKKGILQTVKVVDELVKVMGRHKPENIVIEMARENQTTQKGQKNSRERMKRIEEGIKELGSQILKEHPVENTQLQNEKLYLYYLQNGRDMYVDQELDINRLSDYDVDHIVPQSFLKDDSIDNKVLTRSDKARGKSDNVPSEEVVKKMKNYWRQLLNAKLITQRKFDNLTKAERGGLSELDKAGFIKRQLVETRQITKHVAQILDSRMNTKYDENDKLIREVKVITLKSKLVSDFRKDFQFYKVREINNYHHAHDAYLNAVVGTALIKKYPKLESEFVYGDYKVYDVRKMIAKSEQEIGKATAKYFFYSNIMNFFKTEITLANGEIRKRPLIETNGETGEIVWDKGRDFATVRKVLSMPQVNIVKKTEVQTGGFSKESILPKRNSDKLIARKKDWDPKKYGGFDSPTVAYSVLVVAKVEKGKSKKLKSVKELLGITIMERSSFEKNPIDFLEAKGYKEVKKDLIIKLPKYSLFELENGRKRMLASAGELQKGNELALPSKYVNFLYLASHYEKLKGSPEDNEQKQLFVEQHKHYLDEIIEQISEFSKRVILADANLDKVLSAYNKHRDKPIREQAENIIHLFTLTNLGAPAAFKYFDTTIDRKRYTSTKEVLDATLIHQSITGLYETRIDLSQLGGDGGGGGPAPGGMDPLQLLQPLEAEIKGTKLKAHWNSGATITCVPQAFLEEEVPIKNIWIKTIHGEKEQPVYYLTFKIQGRKVEAEVISSPYDYILVSPSDIPWLMKKPLQLTTLVPLQEYEERLLKQTMLTGSYKEKLQSLFLKYDALWQHWENQVGHRRIKPHHIATGTVNPRPQKQYPINPKAKASIQTVINDLLKQGVLIQQNSIMNTPVYPVPKPDGKWRMVLDYREVNKTIPLIAAQNQHSAGILSSIFRGKYKTTLDLSNGFWAHSITPESYWLTAFTWLGQQYCWTRLPQGFLNSPALFTADVVDLLKEVPNVQVYVDDIYISHDDPREHLEQLEKVFSLLLNAGYVVSLKKSEIAQHEVEFLGFNITKEGRGLTETFKQKLLNITPPRDLKQLQSILGLLNFARNFIPNFSELVKPLYNIIATANGKYITWTTDNSQQLQNIISMLNSAENLEERNPEVRLIMKVNTSPSAGYIRFYNEFAKRPIMYLNYVYTKAEVKFTNTEKLLTTIHKGLIKALDLGMGQEILVYSPIVSMTKIQKTPLPERKALPIRWITWMSYLEDPRIQFHYDKTLPELQQVPTVTDDIIAKIKHPSEFSMVFYTDGSAIKHPNVNKSHNAGMGIAQVQFKPEFTVINTWSIPLGDHTAQLAEVAAVEFACKKALKIDGPVLIVTDSFYVAESVNKELPYWQSNGFFNNKKKPLKHVSKWKSIADCIQLKPDIIIIHEKGHQPTASTFHTEGNNLADKLATQGSYVVNAGKRTADGSEFEKRTADGSEFESPKKKAKVE

SEQ ID NO: 513 - protein, 2176 aa, synthetic construct
  source 1..2176: note = Description of Artificial Sequence: Synthetic polypeptide
MPAAKRVKLDGGDKKYSIGLDIGTNSVGWAVITDEYKVPSKKFKVLGNTDRHSIKKNLIGALLFDSGETAEATRLKRTARRRYTRRKNRICYLQEIFSNEMAKVDDSFFHRLEESFLVEEDKKHERHPIFGNIVDEVAYHEKYPTIYHLRKKLVDSTDKADLRLIYLALAHMIKFRGHFLIEGDLNPDNSDVDKLFIQLVQTYNQLFEENPINASGVDAKAILSARLSKSRRLENLIAQLPGEKKNGLFGNLIALSLGLTPNFKSNFDLAEDAKLQLSKDTYDDDLDNLLAQIGDQYADLFLAAKNLSDAILLSDILRVNTEITKAPLSASMIKRYDEHHQDLTLLKALVRQQLPEKYKEIFFDQSKNGYAGYIDGGASQEEFYKFIKPILEKMDGTEELLVKLNREDLLRKQRTFDNGSIPHQIHLGELHAILRRQEDFYPFLKDNREKIEKILTFRIPYYVGPLARGNSRFAWMTRKSEETITPWNFEEVVDKGASAQSFIERMTNFDKNLPNEKVLPKHSLLYEYFTVYNELTKVKYVTEGMRKPAFLSGEQKKAIVDLLFKTNRKVTVKQLKEDYFKKIECFDSVEISGVEDRFNASLGTYHDLLKIIKDKDFLDNEENEDILEDIVLTLTLFEDREMIEERLKTYAHLFDDKVMKQLKRRRYTGWGRLSRKLINGIRDKQSGKTILDFLKSDGFANRNFMQLIHDDSLTFKEDIQKAQVSGQGDSLHEHIANLAGSPAIKKGILQTVKVVDELVKVMGRHKPENIVIEMARENQTTQKGQKNSRERMKRIEEGIKELGSQILKEHPVENTQLQNEKLYLYYLQNGRDMYVDQELDINRLSDYDVDHIVPQSFLKDDSIDNKVLTRSDKARGKSDNVPSEEVVKKMKNYWRQLLNAKLITQRKFDNLTKAERGGLSELDKAGFIKRQLVETRQITKHVAQILDSRMNTKYDENDKLIREVKVITLKSKLVSDFRKDFQFYKVREINNYHHAHDAYLNAVVGTALIKKYPKLESEFVYGDYKVYDVRKMIAKSEQEIGKATAKYFFYSNIMNFFKTEITLANGEIRKRPLIETNGETGEIVWDKGRDFATVRKVLSMPQVNIVKKTEVQTGGFSKESILPKRNSDKLIARKKDWDPKKYGGFDSPTVAYSVLVVAKVEKGKSKKLKSVKELLGITIMERSSFEKNPIDFLEAKGYKEVKKDLIIKLPKYSLFELENGRKRMLASAGELQKGNELALPSKYVNFLYLASHYEKLKGSPEDNEQKQLFVEQHKHYLDEIIEQISEFSKRVILADANLDKVLSAYNKHRDKPIREQAENIIHLFTLTNLGAPAAFKYFDTTIDRKRYTSTKEVLDATLIHQSITGLYETRIDLSQLGGDGGEAAAKGGSGGGGGMDPLQLLQPLEAEIKGTKLKAHWNSGATITCVPQAFLEEEVPIKNIWIKTIHGEKEQPVYYLTFKIQGRKVEAEVISSPYDYILVSPSDIPWLMKKPLQLTTLVPLQEYEERLLKQTMLTGSYKEKLQSLFLKYDALWQHWENQVGHRRIKPHHIATGTVNPRPQKQYPINPKAKASIQTVINDLLKQGVLIQQNSIMNTPVYPVPKPDGKWRMVLDYREVNKTIPLIAAQNQHSAGILSSIFRGKYKTTLDLSNGFWAHSITPESYWLTAFTWLGQQYCWTRLPQGFLNSPALFTADVVDLLKEVPNVQVYVDDIYISHDDPREHLEQLEKVFSLLLNAGYVVSLKKSEIAQHEVEFLGFNITKEGRGLTETFKQKLLNITPPRDLKQLQSILGLLNFARNFIPNFSELVKPLYNIIATANGKYITWTTDNSQQLQNIISMLNSAENLEERNPEVRLIMKVNTSPSAGYIRFYNEFAKRPIMYLNYVYTKAEVKFTNTEKLLTTIHKGLIKALDLGMGQEILVYSPIVSMTKIQKTPLPERKALPIRWITWMSYLEDPRIQFHYDKTLPELQQVPTVTDDIIAKIKHPSEFSMVFYTDGSAIKHPNVNKSHNAGMGIAQVQFKPEFTVINTWSIPLGDHTAQLAEVAAVEFACKKALKIDGPVLIVTDSFYVAESVNKELPYWQSNGFFNNKKKPLKHVSKWKSIADCIQLKPDIIIIHEKGHQPTASTFHTEGNNLADKLATQGSYVVNAGKRTADGSEFEKRTADGSEFESPKKKAKVE

SEQ ID NO: 514 - protein, 2174 aa, synthetic construct
  source 1..2174: note = Description of Artificial Sequence: Synthetic polypeptide
MPAAKRVKLDGGDKKYSIGLDIGTNSVGWAVITDEYKVPSKKFKVLGNTDRHSIKKNLIGALLFDSGETAEATRLKRTARRRYTRRKNRICYLQEIFSNEMAKVDDSFFHRLEESFLVEEDKKHERHPIFGNIVDEVAYHEKYPTIYHLRKKLVDSTDKADLRLIYLALAHMIKFRGHFLIEGDLNPDNSDVDKLFIQLVQTYNQLFEENPINASGVDAKAILSARLSKSRRLENLIAQLPGEKKNGLFGNLIALSLGLTPNFKSNFDLAEDAKLQLSKDTYDDDLDNLLAQIGDQYADLFLAAKNLSDAILLSDILRVNTEITKAPLSASMIKRYDEHHQDLTLLKALVRQQLPEKYKEIFFDQSKNGYAGYIDGGASQEEFYKFIKPILEKMDGTEELLVKLNREDLLRKQRTFDNGSIPHQIHLGELHAILRRQEDFYPFLKDNREKIEKILTFRIPYYVGPLARGNSRFAWMTRKSEETITPWNFEEVVDKGASAQSFIERMTNFDKNLPNEKVLPKHSLLYEYFTVYNELTKVKYVTEGMRKPAFLSGEQKKAIVDLLFKTNRKVTVKQLKEDYFKKIECFDSVEISGVEDRFNASLGTYHDLLKIIKDKDFLDNEENEDILEDIVLTLTLFEDREMIEERLKTYAHLFDDKVMKQLKRRRYTGWGRLSRKLINGIRDKQSGKTILDFLKSDGFANRNFMQLIHDDSLTFKEDIQKAQVSGQGDSLHEHIANLAGSPAIKKGILQTVKVVDELVKVMGRHKPENIVIEMARENQTTQKGQKNSRERMKRIEEGIKELGSQILKEHPVENTQLQNEKLYLYYLQNGRDMYVDQELDINRLSDYDVDHIVPQSFLKDDSIDNKVLTRSDKARGKSDNVPSEEVVKKMKNYWRQLLNAKLITQRKFDNLTKAERGGLSELDKAGFIKRQLVETRQITKHVAQILDSRMNTKYDENDKLIREVKVITLKSKLVSDFRKDFQFYKVREINNYHHAHDAYLNAVVGTALIKKYPKLESEFVYGDYKVYDVRKMIAKSEQEIGKATAKYFFYSNIMNFFKTEITLANGEIRKRPLIETNGETGEIVWDKGRDFATVRKVLSMPQVNIVKKTEVQTGGFSKESILPKRNSDKLIARKKDWDPKKYGGFDSPTVAYSVLVVAKVEKGKSKKLKSVKELLGITIMERSSFEKNPIDFLEAKGYKEVKKDLIIKLPKYSLFELENGRKRMLASAGELQKGNELALPSKYVNFLYLASHYEKLKGSPEDNEQKQLFVEQHKHYLDEIIEQISEFSKRVILADANLDKVLSAYNKHRDKPIREQAENIIHLFTLTNLGAPAAFKYFDTTIDRKRYTSTKEVLDATLIHQSITGLYETRIDLSQLGGDGGGGGPAPGGSGGMDPLQLLQPLEAEIKGTKLKAHWNSGATITCVPQAFLEEEVPIKNIWIKTIHGEKEQPVYYLTFKIQGRKVEAEVISSPYDYILVSPSDIPWLMKKPLQLTTLVPLQEYEERLLKQTMLTGSYKEKLQSLFLKYDALWQHWENQVGHRRIKPHHIATGTVNPRPQKQYPINPKAKASIQTVINDLLKQGVLIQQNSIMNTPVYPVPKPDGKWRMVLDYREVNKTIPLIAAQNQHSAGILSSIFRGKYKTTLDLSNGFWAHSITPESYWLTAFTWLGQQYCWTRLPQGFLNSPALFTADVVDLLKEVPNVQVYVDDIYISHDDPREHLEQLEKVFSLLLNAGYVVSLKKSEIAQHEVEFLGFNITKEGRGLTETFKQKLLNITPPRDLKQLQSILGLLNFARNFIPNFSELVKPLYNIIATANGKYITWTTDNSQQLQNIISMLNSAENLEERNPEVRLIMKVNTSPSAGYIRFYNEFAKRPIMYLNYVYTKAEVKFTNTEKLLTTIHKGLIKALDLGMGQEILVYSPIVSMTKIQKTPLPERKALPIRWITWMSYLEDPRIQFHYDKTLPELQQVPTVTDDIIAKIKHPSEFSMVFYTDGSAIKHPNVNKSHNAGMGIAQVQFKPEFTVINTWSIPLGDHTAQLAEVAAVEFACKKALKIDGPVLIVTDSFYVAESVNKELPYWQSNGFFNNKKKPLKHVSKWKSIADCIQLKPDIIIIHEKGHQPTASTFHTEGNNLADKLATQGSYVVNAGKRTADGSEFEKRTADGSEFESPKKKAKVE

SEQ ID NO: 515 - protein, 2174 aa, synthetic construct
  source 1..2174: note = Description of Artificial Sequence: Synthetic polypeptide
MPAAKRVKLDGGDKKYSIGLDIGTNSVGWAVITDEYKVPSKKFKVLGNTDRHSIKKNLIGALLFDSGETAEATRLKRTARRRYTRRKNRICYLQEIFSNEMAKVDDSFFHRLEESFLVEEDKKHERHPIFGNIVDEVAYHEKYPTIYHLRKKLVDSTDKADLRLIYLALAHMIKFRGHFLIEGDLNPDNSDVDKLFIQLVQTYNQLFEENPINASGVDAKAILSARLSKSRRLENLIAQLPGEKKNGLFGNLIALSLGLTPNFKSNFDLAEDAKLQLSKDTYDDDLDNLLAQIGDQYADLFLAAKNLSDAILLSDILRVNTEITKAPLSASMIKRYDEHHQDLTLLKALVRQQLPEKYKEIFFDQSKNGYAGYIDGGASQEEFYKFIKPILEKMDGTEELLVKLNREDLLRKQRTFDNGSIPHQIHLGELHAILRRQEDFYPFLKDNREKIEKILTFRIPYYVGPLARGNSRFAWMTRKSEETITPWNFEEVVDKGASAQSFIERMTNFDKNLPNEKVLPKHSLLYEYFTVYNELTKVKYVTEGMRKPAFLSGEQKKAIVDLLFKTNRKVTVKQLKEDYFKKIECFDSVEISGVEDRFNASLGTYHDLLKIIKDKDFLDNEENEDILEDIVLTLTLFEDREMIEERLKTYAHLFDDKVMKQLKRRRYTGWGRLSRKLINGIRDKQSGKTILDFLKSDGFANRNFMQLIHDDSLTFKEDIQKAQVSGQGDSLHEHIANLAGSPAIKKGILQTVKVVDELVKVMGRHKPENIVIEMARENQTTQKGQKNSRERMKRIEEGIKELGSQILKEHPVENTQLQNEKLYLYYLQNGRDMYVDQELDINRLSDYDVDHIVPQSFLKDDSIDNKVLTRSDKARGKSDNVPSEEVVKKMKNYWRQLLNAKLITQRKFDNLTKAERGGLSELDKAGFIKRQLVETRQITKHVAQILDSRMNTKYDENDKLIREVKVITLKSKLVSDFRKDFQFYKVREINNYHHAHDAYLNAVVGTALIKKYPKLESEFVYGDYKVYDVRKMIAKSEQEIGKATAKYFFYSNIMNFFKTEITLANGEIRKRPLIETNGETGEIVWDKGRDFATVRKVLSMPQVNIVKKTEVQTGGFSKESILPKRNSDKLIARKKDWDPKKYGGFDSPTVAYSVLVVAKVEKGKSKKLKSVKELLGITIMERSSFEKNPIDFLEAKGYKEVKKDLIIKLPKYSLFELENGRKRMLASAGELQKGNELALPSKYVNFLYLASHYEKLKGSPEDNEQKQLFVEQHKHYLDEIIEQISEFSKRVILADANLDKVLSAYNKHRDKPIREQAENIIHLFTLTNLGAPAAFKYFDTTIDRKRYTSTKEVLDATLIHQSITGLYETRIDLSQLGGDGGGSSGSSGSSGGMDPLQLLQPLEAEIKGTKLKAHWNSGATITCVPQAFLEEEVPIKNIWIKTIHGEKEQPVYYLTFKIQGRKVEAEVISSPYDYILVSPSDIPWLMKKPLQLTTLVPLQEYEERLLKQTMLTGSYKEKLQSLFLKYDALWQHWENQVGHRRIKPHHIATGTVNPRPQKQYPINPKAKASIQTVINDLLKQGVLIQQNSIMNTPVYPVPKPDGKWRMVLDYREVNKTIPLIAAQNQHSAGILSSIFRGKYKTTLDLSNGFWAHSITPESYWLTAFTWLGQQYCWTRLPQGFLNSPALFTADVVDLLKEVPNVQVYVDDIYISHDDPREHLEQLEKVFSLLLNAGYVVSLKKSEIAQHEVEFLGFNITKEGRGLTETFKQKLLNITPPRDLKQLQSILGLLNFARNFIPNFSELVKPLYNIIATANGKYITWTTDNSQQLQNIISMLNSAENLEERNPEVRLIMKVNTSPSAGYIRFYNEFAKRPIMYLNYVYTKAEVKFTNTEKLLTTIHKGLIKALDLGMGQEILVYSPIVSMTKIQKTPLPERKALPIRWITWMSYLEDPRIQFHYDKTLPELQQVPTVTDDIIAKIKHPSEFSMVFYTDGSAIKHPNVNKSHNAGMGIAQVQFKPEFTVINTWSIPLGDHTAQLAEVAAVEFACKKALKIDGPVLIVTDSFYVAESVNKELPYWQSNGFFNNKKKPLKHVSKWKSIADCIQLKPDIIIIHEKGHQPTASTFHTEGNNLADKLATQGSYVVNAGKRTADGSEFEKRTADGSEFESPKKKAKVE

SEQ ID NO: 516 - protein, 2171 aa, synthetic construct
  source 1..2171: note = Description of Artificial Sequence: Synthetic polypeptide
MPAAKRVKLDGGDKKYSIGLDIGTNSVGWAVITDEYKVPSKKFKVLGNTDRHSIKKNLIGALLFDSGETAEATRLKRTARRRYTRRKNRICYLQEIFSNEMAKVDDSFFHRLEESFLVEEDKKHERHPIFGNIVDEVAYHEKYPTIYHLRKKLVDSTDKADLRLIYLALAHMIKFRGHFLIEGDLNPDNSDVDKLFIQLVQTYNQLFEENPINASGVDAKAILSARLSKSRRLENLIAQLPGEKKNGLFGNLIALSLGLTPNFKSNFDLAEDAKLQLSKDTYDDDLDNLLAQIGDQYADLFLAAKNLSDAILLSDILRVNTEITKAPLSASMIKRYDEHHQDLTLLKALVRQQLPEKYKEIFFDQSKNGYAGYIDGGASQEEFYKFIKPILEKMDGTEELLVKLNREDLLRKQRTFDNGSIPHQIHLGELHAILRRQEDFYPFLKDNREKIEKILTFRIPYYVGPLARGNSRFAWMTRKSEETITPWNFEEVVDKGASAQSFIERMTNFDKNLPNEKVLPKHSLLYEYFTVYNELTKVKYVTEGMRKPAFLSGEQKKAIVDLLFKTNRKVTVKQLKEDYFKKIECFDSVEISGVEDRFNASLGTYHDLLKIIKDKDFLDNEENEDILEDIVLTLTLFEDREMIEERLKTYAHLFDDKVMKQLKRRRYTGWGRLSRKLINGIRDKQSGKTILDFLKSDGFANRNFMQLIHDDSLTFKEDIQKAQVSGQGDSLHEHIANLAGSPAIKKGILQTVKVVDELVKVMGRHKPENIVIEMARENQTTQKGQKNSRERMKRIEEGIKELGSQILKEHPVENTQLQNEKLYLYYLQNGRDMYVDQELDINRLSDYDVDHIVPQSFLKDDSIDNKVLTRSDKARGKSDNVPSEEVVKKMKNYWRQLLNAKLITQRKFDNLTKAERGGLSELDKAGFIKRQLVETRQITKHVAQILDSRMNTKYDENDKLIREVKVITLKSKLVSDFRKDFQFYKVREINNYHHAHDAYLNAVVGTALIKKYPKLESEFVYGDYKVYDVRKMIAKSEQEIGKATAKYFFYSNIMNFFKTEITLANGEIRKRPLIETNGETGEIVWDKGRDFATVRKVLSMPQVNIVKKTEVQTGGFSKESILPKRNSDKLIARKKDWDPKKYGGFDSPTVAYSVLVVAKVEKGKSKKLKSVKELLGITIMERSSFEKNPIDFLEAKGYKEVKKDLIIKLPKYSLFELENGRKRMLASAGELQKGNELALPSKYVNFLYLASHYEKLKGSPEDNEQKQLFVEQHKHYLDEIIEQISEFSKRVILADANLDKVLSAYNKHRDKPIREQAENIIHLFTLTNLGAPAAFKYFDTTIDRKRYTSTKEVLDATLIHQSITGLYETRIDLSQLGGDGGPAPGGGGGMDPLQLLQPLEAEIKGTKLKAHWNSGATITCVPQAFLEEEVPIKNIWIKTIHGEKEQPVYYLTFKIQGRKVEAEVISSPYDYILVSPSDIPWLMKKPLQLTTLVPLQEYEERLLKQTMLTGSYKEKLQSLFLKYDALWQHWENQVGHRRIKPHHIATGTVNPRPQKQYPINPKAKASIQTVINDLLKQGVLIQQNSIMNTPVYPVPKPDGKWRMVLDYREVNKTIPLIAAQNQHSAGILSSIFRGKYKTTLDLSNGFWAHSITPESYWLTAFTWLGQQYCWTRLPQGFLNSPALFTADVVDLLKEVPNVQVYVDDIYISHDDPREHLEQLEKVFSLLLNAGYVVSLKKSEIAQHEVEFLGFNITKEGRGLTETFKQKLLNITPPRDLKQLQSILGLLNFARNFIPNFSELVKPLYNIIATANGKYITWTTDNSQQLQNIISMLNSAENLEERNPEVRLIMKVNTSPSAGYIRFYNEFAKRPIMYLNYVYTKAEVKFTNTEKLLTTIHKGLIKALDLGMGQEILVYSPIVSMTKIQKTPLPERKALPIRWITWMSYLEDPRIQFHYDKTLPELQQVPTVTDDIIAKIKHPSEFSMVFYTDGSAIKHPNVNKSHNAGMGIAQVQFKPEFTVINTWSIPLGDHTAQLAEVAAVEFACKKALKIDGPVLIVTDSFYVAESVNKELPYWQSNGFFNNKKKPLKHVSKWKSIADCIQLKPDIIIIHEKGHQPTASTFHTEGNNLADKLATQGSYVVNAGKRTADGSEFEKRTADGSEFESPKKKAKVE

SEQ ID NO: 517 - protein, 2176 aa, synthetic construct
  source 1..2176: note = Description of Artificial Sequence: Synthetic polypeptide
MPAAKRVKLDGGDKKYSIGLDIGTNSVGWAVITDEYKVPSKKFKVLGNTDRHSIKKNLIGALLFDSGETAEATRLKRTARRRYTRRKNRICYLQEIFSNEMAKVDDSFFHRLEESFLVEEDKKHERHPIFGNIVDEVAYHEKYPTIYHLRKKLVDSTDKADLRLIYLALAHMIKFRGHFLIEGDLNPDNSDVDKLFIQLVQTYNQLFEENPINASGVDAKAILSARLSKSRRLENLIAQLPGEKKNGLFGNLIALSLGLTPNFKSNFDLAEDAKLQLSKDTYDDDLDNLLAQIGDQYADLFLAAKNLSDAILLSDILRVNTEITKAPLSASMIKRYDEHHQDLTLLKALVRQQLPEKYKEIFFDQSKNGYAGYIDGGASQEEFYKFIKPILEKMDGTEELLVKLNREDLLRKQRTFDNGSIPHQIHLGELHAILRRQEDFYPFLKDNREKIEKILTFRIPYYVGPLARGNSRFAWMTRKSEETITPWNFEEVVDKGASAQSFIERMTNFDKNLPNEKVLPKHSLLYEYFTVYNELTKVKYVTEGMRKPAFLSGEQKKAIVDLLFKTNRKVTVKQLKEDYFKKIECFDSVEISGVEDRFNASLGTYHDLLKIIKDKDFLDNEENEDILEDIVLTLTLFEDREMIEERLKTYAHLFDDKVMKQLKRRRYTGWGRLSRKLINGIRDKQSGKTILDFLKSDGFANRNFMQLIHDDSLTFKEDIQKAQVSGQGDSLHEHIANLAGSPAIKKGILQTVKVVDELVKVMGRHKPENIVIEMARENQTTQKGQKNSRERMKRIEEGIKELGSQILKEHPVENTQLQNEKLYLYYLQNGRDMYVDQELDINRLSDYDVDHIVPQSFLKDDSIDNKVLTRSDKARGKSDNVPSEEVVKKMKNYWRQLLNAKLITQRKFDNLTKAERGGLSELDKAGFIKRQLVETRQITKHVAQILDSRMNTKYDENDKLIREVKVITLKSKLVSDFRKDFQFYKVREINNYHHAHDAYLNAVVGTALIKKYPKLESEFVYGDYKVYDVRKMIAKSEQEIGKATAKYFFYSNIMNFFKTEITLANGEIRKRPLIETNGETGEIVWDKGRDFATVRKVLSMPQVNIVKKTEVQTGGFSKESILPKRNSDKLIARKKDWDPKKYGGFDSPTVAYSVLVVAKVEKGKSKKLKSVKELLGITIMERSSFEKNPIDFLEAKGYKEVKKDLIIKLPKYSLFELENGRKRMLASAGELQKGNELALPSKYVNFLYLASHYEKLKGSPEDNEQKQLFVEQHKHYLDEIIEQISEFSKRVILADANLDKVLSAYNKHRDKPIREQAENIIHLFTLTNLGAPAAFKYFDTTIDRKRYTSTKEVLDATLIHQSITGLYETRIDLSQLGGDGGEAAAKGSSGGSGGMDPLQLLQPLEAEIKGTKLKAHWNSGATITCVPQAFLEEEVPIKNIWIKTIHGEKEQPVYYLTFKIQGRKVEAEVISSPYDYILVSPSDIPWLMKKPLQLTTLVPLQEYEERLLKQTMLTGSYKEKLQSLFLKYDALWQHWENQVGHRRIKPHHIATGTVNPRPQKQYPINPKAKASIQTVINDLLKQGVLIQQNSIMNTPVYPVPKPDGKWRMVLDYREVNKTIPLIAAQNQHSAGILSSIFRGKYKTTLDLSNGFWAHSITPESYWLTAFTWLGQQYCWTRLPQGFLNSPALFTADVVDLLKEVPNVQVYVDDIYISHDDPREHLEQLEKVFSLLLNAGYVVSLKKSEIAQHEVEFLGFNITKEGRGLTETFKQKLLNITPPRDLKQLQSILGLLNFARNFIPNFSELVKPLYNIIATANGKYITWTTDNSQQLQNIISMLNSAENLEERNPEVRLIMKVNTSPSAGYIRFYNEFAKRPIMYLNYVYTKAEVKFTNTEKLLTTIHKGLIKALDLGMGQEILVYSPIVSMTKIQKTPLPERKALPIRWITWMSYLEDPRIQFHYDKTLPELQQVPTVTDDIIAKIKHPSEFSMVFYTDGSAIKHPNVNKSHNAGMGIAQVQFKPEFTVINTWSIPLGDHTAQLAEVAAVEFACKKALKIDGPVLIVTDSFYVAESVNKELPYWQSNGFFNNKKKPLKHVSKWKSIADCIQLKPDIIIIHEKGHQPTASTFHTEGNNLADKLATQGSYVVNAGKRTADGSEFEKRTADGSEFESPKKKAKVE

SEQ ID NO: 518 - protein, 2174 aa, synthetic construct
  source 1..2174: note = Description of Artificial Sequence: Synthetic polypeptide
MPAAKRVKLDGGDKKYSIGLDIGTNSVGWAVITDEYKVPSKKFKVLGNTDRHSIKKNLIGALLFDSGETAEATRLKRTARRRYTRRKNRICYLQEIFSNEMAKVDDSFFHRLEESFLVEEDKKHERHPIFGNIVDEVAYHEKYPTIYHLRKKLVDSTDKADLRLIYLALAHMIKFRGHFLIEGDLNPDNSDVDKLFIQLVQTYNQLFEENPINASGVDAKAILSARLSKSRRLENLIAQLPGEKKNGLFGNLIALSLGLTPNFKSNFDLAEDAKLQLSKDTYDDDLDNLLAQIGDQYADLFLAAKNLSDAILLSDILRVNTEITKAPLSASMIKRYDEHHQDLTLLKALVRQQLPEKYKEIFFDQSKNGYAGYIDGGASQEEFYKFIKPILEKMDGTEELLVKLNREDLLRKQRTFDNGSIPHQIHLGELHAILRRQEDFYPFLKDNREKIEKILTFRIPYYVGPLARGNSRFAWMTRKSEETITPWNFEEVVDKGASAQSFIERMTNFDKNLPNEKVLPKHSLLYEYFTVYNELTKVKYVTEGMRKPAFLSGEQKKAIVDLLFKTNRKVTVKQLKEDYFKKIECFDSVEISGVEDRFNASLGTYHDLLKIIKDKDFLDNEENEDILEDIVLTLTLFEDREMIEERLKTYAHLFDDKVMKQLKRRRYTGWGRLSRKLINGIRDKQSGKTILDFLKSDGFANRNFMQLIHDDSLTFKEDIQKAQVSGQGDSLHEHIANLAGSPAIKKGILQTVKVVDELVKVMGRHKPENIVIEMARENQTTQKGQKNSRERMKRIEEGIKELGSQILKEHPVENTQLQNEKLYLYYLQNGRDMYVDQELDINRLSDYDVDHIVPQSFLKDDSIDNKVLTRSDKARGKSDNVPSEEVVKKMKNYWRQLLNAKLITQRKFDNLTKAERGGLSELDKAGFIKRQLVETRQITKHVAQILDSRMNTKYDENDKLIREVKVITLKSKLVSDFRKDFQFYKVREINNYHHAHDAYLNAVVGTALIKKYPKLESEFVYGDYKVYDVRKMIAKSEQEIGKATAKYFFYSNIMNFFKTEITLANGEIRKRPLIETNGETGEIVWDKGRDFATVRKVLSMPQVNIVKKTEVQTGGFSKESILPKRNSDKLIARKKDWDPKKYGGFDSPTVAYSVLVVAKVEKGKSKKLKSVKELLGITIMERSSFEKNPIDFLEAKGYKEVKKDLIIKLPKYSLFELENGRKRMLASAGELQKGNELALPSKYVNFLYLASHYEKLKGSPEDNEQKQLFVEQHKHYLDEIIEQISEFSKRVILADANLDKVLSAYNKHRDKPIREQAENIIHLFTLTNLGAPAAFKYFDTTIDRKRYTSTKEVLDATLIHQSITGLYETRIDLSQLGGDGGGGSPAPGSSGGMDPLQLLQPLEAEIKGTKLKAHWNSGATITCVPQAFLEEEVPIKNIWIKTIHGEKEQPVYYLTFKIQGRKVEAEVISSPYDYILVSPSDIPWLMKKPLQLTTLVPLQEYEERLLKQTMLTGSYKEKLQSLFLKYDALWQHWENQVGHRRIKPHHIATGTVNPRPQKQYPINPKAKASIQTVINDLLKQGVLIQQNSIMNTPVYPVPKPDGKWRMVLDYREVNKTIPLIAAQNQHSAGILSSIFRGKYKTTLDLSNGFWAHSITPESYWLTAFTWLGQQYCWTRLPQGFLNSPALFTADVVDLLKEVPNVQVYVDDIYISHDDPREHLEQLEKVFSLLLNAGYVVSLKKSEIAQHEVEFLGFNITKEGRGLTETFKQKLLNITPPRDLKQLQSILGLLNFARNFIPNFSELVKPLYNIIATANGKYITWTTDNSQQLQNIISMLNSAENLEERNPEVRLIMKVNTSPSAGYIRFYNEFAKRPIMYLNYVYTKAEVKFTNTEKLLTTIHKGLIKALDLGMGQEILVYSPIVSMTKIQKTPLPERKALPIRWITWMSYLEDPRIQFHYDKTLPELQQVPTVTDDIIAKIKHPSEFSMVFYTDGSAIKHPNVNKSHNAGMGIAQVQFKPEFTVINTWSIPLGDHTAQLAEVAAVEFACKKALKIDGPVLIVTDSFYVAESVNKELPYWQSNGFFNNKKKPLKHVSKWKSIADCIQLKPDIIIIHEKGHQPTASTFHTEGNNLADKLATQGSYVVNAGKRTADGSEFEKRTADGSEFESPKKKAKVE

SEQ ID NO: 519 - protein, 2175 aa, synthetic construct
  source 1..2175: note = Description of Artificial Sequence: Synthetic polypeptide
MPAAKRVKLDGGDKKYSIGLDIGTNSVGWAVITDEYKVPSKKFKVLGNTDRHSIKKNLIGALLFDSGETAEATRLKRTARRRYTRRKNRICYLQEIFSNEMAKVDDSFFHRLEESFLVEEDKKHERHPIFGNIVDEVAYHEKYPTIYHLRKKLVDSTDKADLRLIYLALAHMIKFRGHFLIEGDLNPDNSDVDKLFIQLVQTYNQLFEENPINASGVDAKAILSARLSKSRRLENLIAQLPGEKKNGLFGNLIALSLGLTPNFKSNFDLAEDAKLQLSKDTYDDDLDNLLAQIGDQYADLFLAAKNLSDAILLSDILRVNTEITKAPLSASMIKRYDEHHQDLTLLKALVRQQLPEKYKEIFFDQSKNGYAGYIDGGASQEEFYKFIKPILEKMDGTEELLVKLNREDLLRKQRTFDNGSIPHQIHLGELHAILRRQEDFYPFLKDNREKIEKILTFRIPYYVGPLARGNSRFAWMTRKSEETITPWNFEEVVDKGASAQSFIERMTNFDKNLPNEKVLPKHSLLYEYFTVYNELTKVKYVTEGMRKPAFLSGEQKKAIVDLLFKTNRKVTVKQLKEDYFKKIECFDSVEISGVEDRFNASLGTYHDLLKIIKDKDFLDNEENEDILEDIVLTLTLFEDREMIEERLKTYAHLFDDKVMKQLKRRRYTGWGRLSRKLINGIRDKQSGKTILDFLKSDGFANRNFMQLIHDDSLTFKEDIQKAQVSGQGDSLHEHIANLAGSPAIKKGILQTVKVVDELVKVMGRHKPENIVIEMARENQTTQKGQKNSRERMKRIEEGIKELGSQILKEHPVENTQLQNEKLYLYYLQNGRDMYVDQELDINRLSDYDVDHIVPQSFLKDDSIDNKVLTRSDKARGKSDNVPSEEVVKKMKNYWRQLLNAKLITQRKFDNLTKAERGGLSELDKAGFIKRQLVETRQITKHVAQILDSRMNTKYDENDKLIREVKVITLKSKLVSDFRKDFQFYKVREINNYHHAHDAYLNAVVGTALIKKYPKLESEFVYGDYKVYDVRKMIAKSEQEIGKATAKYFFYSNIMNFFKTEITLANGEIRKRPLIETNGETGEIVWDKGRDFATVRKVLSMPQVNIVKKTEVQTGGFSKESILPKRNSDKLIARKKDWDPKKYGGFDSPTVAYSVLVVAKVEKGKSKKLKSVKELLGITIMERSSFEKNPIDFLEAKGYKEVKKDLIIKLPKYSLFELENGRKRMLASAGELQKGNELALPSKYVNFLYLASHYEKLKGSPEDNEQKQLFVEQHKHYLDEIIEQISEFSKRVILADANLDKVLSAYNKHRDKPIREQAENIIHLFTLTNLGAPAAFKYFDTTIDRKRYTSTKEVLDATLIHQSITGLYETRIDLSQLGGDGGGGGGSGGGGSGGMDPLQLLQPLEAEIKGTKLKAHWNSGATITCVPQAFLEEEVPIKNIWIKTIHGEKEQPVYYLTFKIQGRKVEAEVISSPYDYILVSPSDIPWLMKKPLQLTTLVPLQEYEERLLKQTMLTGSYKEKLQSLFLKYDALWQHWENQVGHRRIKPHHIATGTVNPRPQKQYPINPKAKASIQTVINDLLKQGVLIQQNSIMNTPVYPVPKPDGKWRMVLDYREVNKTIPLIAAQNQHSAGILSSIFRGKYKTTLDLSNGFWAHSITPESYWLTAFTWLGQQYCWTRLPQGFLNSPALFTADVVDLLKEVPNVQVYVDDIYISHDDPREHLEQLEKVFSLLLNAGYVVSLKKSEIAQHEVEFLGFNITKEGRGLTETFKQKLLNITPPRDLKQLQSILGLLNFARNFIPNFSELVKPLYNIIATANGKYITWTTDNSQQLQNIISMLNSAENLEERNPEVRLIMKVNTSPSAGYIRFYNEFAKRPIMYLNYVYTKAEVKFTNTEKLLTTIHKGLIKALDLGMGQEILVYSPIVSMTKIQKTPLPERKALPIRWITWMSYLEDPRIQFHYDKTLPELQQVPTVTDDIIAKIKHPSEFSMVFYTDGSAIKHPNVNKSHNAGMGIAQVQFKPEFTVINTWSIPLGDHTAQLAEVAAVEFACKKALKIDGPVLIVTDSFYVAESVNKELPYWQSNGFFNNKKKPLKHVSKWKSIADCIQLKPDIIIIHEKGHQPTASTFHTEGNNLADKLATQGSYVVNAGKRTADGSEFEKRTADGSEFESPKKKAKVE

SEQ ID NO: 520 - protein, 2172 aa, synthetic construct
  source 1..2172: note = Description of Artificial Sequence: Synthetic polypeptide
MPAAKRVKLDGGDKKYSIGLDIGTNSVGWAVITDEYKVPSKKFKVLGNTDRHSIKKNLIGALLFDSGETAEATRLKRTARRRYTRRKNRICYLQEIFSNEMAKVDDSFFHRLEESFLVEEDKKHERHPIFGNIVDEVAYHEKYPTIYHLRKKLVDSTDKADLRLIYLALAHMIKFRGHFLIEGDLNPDNSDVDKLFIQLVQTYNQLFEENPINASGVDAKAILSARLSKSRRLENLIAQLPGEKKNGLFGNLIALSLGLTPNFKSNFDLAEDAKLQLSKDTYDDDLDNLLAQIGDQYADLFLAAKNLSDAILLSDILRVNTEITKAPLSASMIKRYDEHHQDLTLLKALVRQQLPEKYKEIFFDQSKNGYAGYIDGGASQEEFYKFIKPILEKMDGTEELLVKLNREDLLRKQRTFDNGSIPHQIHLGELHAILRRQEDFYPFLKDNREKIEKILTFRIPYYVGPLARGNSRFAWMTRKSEETITPWNFEEVVDKGASAQSFIERMTNFDKNLPNEKVLPKHSLLYEYFTVYNELTKVKYVTEGMRKPAFLSGEQKKAIVDLLFKTNRKVTVKQLKEDYFKKIECFDSVEISGVEDRFNASLGTYHDLLKIIKDKDFLDNEENEDILEDIVLTLTLFEDREMIEERLKTYAHLFDDKVMKQLKRRRYTGWGRLSRKLINGIRDKQSGKTILDFLKSDGFANRNFMQLIHDDSLTFKEDIQKAQVSGQGDSLHEHIANLAGSPAIKKGILQTVKVVDELVKVMGRHKPENIVIEMARENQTTQKGQKNSRERMKRIEEGIKELGSQILKEHPVENTQLQNEKLYLYYLQNGRDMYVDQELDINRLSDYDVDHIVPQSFLKDDSIDNKVLTRSDKARGKSDNVPSEEVVKKMKNYWRQLLNAKLITQRKFDNLTKAERGGLSELDKAGFIKRQLVETRQITKHVAQILDSRMNTKYDENDKLIREVKVITLKSKLVSDFRKDFQFYKVREINNYHHAHDAYLNAVVGTALIKKYPKLESEFVYGDYKVYDVRKMIAKSEQEIGKATAKYFFYSNIMNFFKTEITLANGEIRKRPLIETNGETGEIVWDKGRDFATVRKVLSMPQVNIVKKTEVQTGGFSKESILPKRNSDKLIARKKDWDPKKYGGFDSPTVAYSVLVVAKVEKGKSKKLKSVKELLGITIMERSSFEKNPIDFLEAKGYKEVKKDLIIKLPKYSLFELENGRKRMLASAGELQKGNELALPSKYVNFLYLASHYEKLKGSPEDNEQKQLFVEQHKHYLDEIIEQISEFSKRVILADANLDKVLSAYNKHRDKPIREQAENIIHLFTLTNLGAPAAFKYFDTTIDRKRYTSTKEVLDATLIHQSITGLYETRIDLSQLGGDGGPAPAPAPGGMDPLQLLQPLEAEIKGTKLKAHWNSGATITCVPQAFLEEEVPIKNIWIKTIHGEKEQPVYYLTFKIQGRKVEAEVISSPYDYILVSPSDIPWLMKKPLQLTTLVPLQEYEERLLKQTMLTGSYKEKLQSLFLKYDALWQHWENQVGHRRIKPHHIATGTVNPRPQKQYPINPKAKASIQTVINDLLKQGVLIQQNSIMNTPVYPVPKPDGKWRMVLDYREVNKTIPLIAAQNQHSAGILSSIFRGKYKTTLDLSNGFWAHSITPESYWLTAFTWLGQQYCWTRLPQGFLNSPALFTADVVDLLKEVPNVQVYVDDIYISHDDPREHLEQLEKVFSLLLNAGYVVSLKKSEIAQHEVEFLGFNITKEGRGLTETFKQKLLNITPPRDLKQLQSILGLLNFARNFIPNFSELVKPLYNIIATANGKYITWTTDNSQQLQNIISMLNSAENLEERNPEVRLIMKVNTSPSAGYIRFYNEFAKRPIMYLNYVYTKAEVKFTNTEKLLTTIHKGLIKALDLGMGQEILVYSPIVSMTKIQKTPLPERKALPIRWITWMSYLEDPRIQFHYDKTLPELQQVPTVTDDIIAKIKHPSEFSMVFYTDGSAIKHPNVNKSHNAGMGIAQVQFKPEFTVINTWSIPLGDHTAQLAEVAAVEFACKKALKIDGPVLIVTDSFYVAESVNKELPYWQSNGFFNNKKKPLKHVSKWKSIADCIQLKPDIIIIHEKGHQPTASTFHTEGNNLADKLATQGSYVVNAGKRTADGSEFEKRTADGSEFESPKKKAKVE

SEQ ID NO: 521 - protein, 2174 aa, synthetic construct
  source 1..2174: note = Description of Artificial Sequence: Synthetic polypeptide
MPAAKRVKLDGGDKKYSIGLDIGTNSVGWAVITDEYKVPSKKFKVLGNTDRHSIKKNLIGALLFDSGETAEATRLKRTARRRYTRRKNRICYLQEIFSNEMAKVDDSFFHRLEESFLVEEDKKHERHPIFGNIVDEVAYHEKYPTIYHLRKKLVDSTDKADLRLIYLALAHMIKFRGHFLIEGDLNPDNSDVDKLFIQLVQTYNQLFEENPINASGVDAKAILSARLSKSRRLENLIAQLPGEKKNGLFGNLIALSLGLTPNFKSNFDLAEDAKLQLSKDTYDDDLDNLLAQIGDQYADLFLAAKNLSDAILLSDILRVNTEITKAPLSASMIKRYDEHHQDLTLLKALVRQQLPEKYKEIFFDQSKNGYAGYIDGGASQEEFYKFIKPILEKMDGTEELLVKLNREDLLRKQRTFDNGSIPHQIHLGELHAILRRQEDFYPFLKDNREKIEKILTFRIPYYVGPLARGNSRFAWMTRKSEETITPWNFEEVVDKGASAQSFIERMTNFDKNLPNEKVLPKHSLLYEYFTVYNELTKVKYVTEGMRKPAFLSGEQKKAIVDLLFKTNRKVTVKQLKEDYFKKIECFDSVEISGVEDRFNASLGTYHDLLKIIKDKDFLDNEENEDILEDIVLTLTLFEDREMIEERLKTYAHLFDDKVMKQLKRRRYTGWGRLSRKLINGIRDKQSGKTILDFLKSDGFANRNFMQLIHDDSLTFKEDIQKAQVSGQGDSLHEHIANLAGSPAIKKGILQTVKVVDELVKVMGRHKPENIVIEMARENQTTQKGQKNSRERMKRIEEGIKELGSQILKEHPVENTQLQNEKLYLYYLQNGRDMYVDQELDINRLSDYDVDHIVPQSFLKDDSIDNKVLTRSDKARGKSDNVPSEEVVKKMKNYWRQLLNAKLITQRKFDNLTKAERGGLSELDKAGFIKRQLVETRQITKHVAQILDSRMNTKYDENDKLIREVKVITLKSKLVSDFRKDFQFYKVREINNYHHAHDAYLNAVVGTALIKKYPKLESEFVYGDYKVYDVRKMIAKSEQEIGKATAKYFFYSNIMNFFKTEITLANGEIRKRPLIETNGETGEIVWDKGRDFATVRKVLSMPQVNIVKKTEVQTGGFSKESILPKRNSDKLIARKKDWDPKKYGGFDSPTVAYSVLVVAKVEKGKSKKLKSVKELLGITIMERSSFEKNPIDFLEAKGYKEVKKDLIIKLPKYSLFELENGRKRMLASAGELQKGNELALPSKYVNFLYLASHYEKLKGSPEDNEQKQLFVEQHKHYLDEIIEQISEFSKRVILADANLDKVLSAYNKHRDKPIREQAENIIHLFTLTNLGAPAAFKYFDTTIDRKRYTSTKEVLDATLIHQSITGLYETRIDLSQLGGDGGGSSGGSGGGGGMDPLQLLQPLEAEIKGTKLKAHWNSGATITCVPQAFLEEEVPIKNIWIKTIHGEKEQPVYYLTFKIQGRKVEAEVISSPYDYILVSPSDIPWLMKKPLQLTTLVPLQEYEERLLKQTMLTGSYKEKLQSLFLKYDALWQHWENQVGHRRIKPHHIATGTVNPRPQKQYPINPKAKASIQTVINDLLKQGVLIQQNSIMNTPVYPVPKPDGKWRMVLDYREVNKTIPLIAAQNQHSAGILSSIFRGKYKTTLDLSNGFWAHSITPESYWLTAFTWLGQQYCWTRLPQGFLNSPALFTADVVDLLKEVPNVQVYVDDIYISHDDPREHLEQLEKVFSLLLNAGYVVSLKKSEIAQHEVEFLGFNITKEGRGLTETFKQKLLNITPPRDLKQLQSILGLLNFARNFIPNFSELVKPLYNIIATANGKYITWTTDNSQQLQNIISMLNSAENLEERNPEVRLIMKVNTSPSAGYIRFYNEFAKRPIMYLNYVYTKAEVKFTNTEKLLTTIHKGLIKALDLGMGQEILVYSPIVSMTKIQKTPLPERKALPIRWITWMSYLEDPRIQFHYDKTLPELQQVPTVTDDIIAKIKHPSEFSMVFYTDGSAIKHPNVNKSHNAGMGIAQVQFKPEFTVINTWSIPLGDHTAQLAEVAAVEFACKKALKIDGPVLIVTDSFYVAESVNKELPYWQSNGFFNNKKKPLKHVSKWKSIADCIQLKPDIIIIHEKGHQPTASTFHTEGNNLADKLATQGSYVVNAGKRTADGSEFEKRTADGSEFESPKKKAKVE

SEQ ID NO: 522 - protein, 2010 aa, synthetic construct
  source 1..2010: note = Description of Artificial Sequence: Synthetic polypeptide
MPAAKRVKLDGGDKKYSIGLDIGTNSVGWAVITDEYKVPSKKFKVLGNTDRHSIKKNLIGALLFDSGETAEATRLKRTARRRYTRRKNRICYLQEIFSNEMAKVDDSFFHRLEESFLVEEDKKHERHPIFGNIVDEVAYHEKYPTIYHLRKKLVDSTDKADLRLIYLALAHMIKFRGHFLIEGDLNPDNSDVDKLFIQLVQTYNQLFEENPINASGVDAKAILSARLSKSRRLENLIAQLPGEKKNGLFGNLIALSLGLTPNFKSNFDLAEDAKLQLSKDTYDDDLDNLLAQIGDQYADLFLAAKNLSDAILLSDILRVNTEITKAPLSASMIKRYDEHHQDLTLLKALVRQQLPEKYKEIFFDQSKNGYAGYIDGGASQEEFYKFIKPILEKMDGTEELLVKLNREDLLRKQRTFDNGSIPHQIHLGELHAILRRQEDFYPFLKDNREKIEKILTFRIPYYVGPLARGNSRFAWMTRKSEETITPWNFEEVVDKGASAQSFIERMTNFDKNLPNEKVLPKHSLLYEYFTVYNELTKVKYVTEGMRKPAFLSGEQKKAIVDLLFKTNRKVTVKQLKEDYFKKIECFDSVEISGVEDRFNASLGTYHDLLKIIKDKDFLDNEENEDILEDIVLTLTLFEDREMIEERLKTYAHLFDDKVMKQLKRRRYTGWGRLSRKLINGIRDKQSGKTILDFLKSDGFANRNFMQLIHDDSLTFKEDIQKAQVSGQGDSLHEHIANLAGSPAIKKGILQTVKVVDELVKVMGRHKPENIVIEMARENQTTQKGQKNSRERMKRIEEGIKELGSQILKEHPVENTQLQNEKLYLYYLQNGRDMYVDQELDINRLSDYDVDHIVPQSFLKDDSIDNKVLTRSDKARGKSDNVPSEEVVKKMKNYWRQLLNAKLITQRKFDNLTKAERGGLSELDKAGFIKRQLVETRQITKHVAQILDSRMNTKYDENDKLIREVKVITLKSKLVSDFRKDFQFYKVREINNYHHAHDAYLNAVVGTALIKKYPKLESEFVYGDYKVYDVRKMIAKSEQEIGKATAKYFFYSNIMNFFKTEITLANGEIRKRPLIETNGETGEIVWDKGRDFATVRKVLSMPQVNIVKKTEVQTGGFSKESILPKRNSDKLIARKKDWDPKKYGGFDSPTVAYSVLVVAKVEKGKSKKLKSVKELLGITIMERSSFEKNPIDFLEAKGYKEVKKDLIIKLPKYSLFELENGRKRMLASAGELQKGNELALPSKYVNFLYLASHYEKLKGSPEDNEQKQLFVEQHKHYLDEIIEQISEFSKRVILADANLDKVLSAYNKHRDKPIREQAENIIHLFTLTNLGAPAAFKYFDTTIDRKRYTSTKEVLDATLIHQSITGLYETRIDLSQLGGDGGGGGGSGGGGSGGGGSGGGGSGGGVLDTPPSHIGLEHLPPPPEVPQFPLNLERLQALQDLVHRSLEAGYISPWDGPGNNPVFPVRKPNGAWRFVHDLRATNALTKPIPALSPGPPDLTAPPTHPPHIICLDLKDAFFQIPVEDRFRFYLSFTLPSPGGLQPHRRFAWRVLPQGFINSPALFQRALQEPLRQVSAAFSQSLLVSYMDDILYASPTEEQRSQCYQALAARLRDLGFQVASEKTSQTPSPVPFLGQMVHEQIVTYQSLPTLQISSPISLHQLQAVLGDLQWVSRGTPTTRRPLQLLYSSLKRHHDPRAIIQLSPEQLQGIAELRQALSHNARSRYNEQEPLLAYVHLTRAGSTLVLFQKGAQFPLAYFQTPLTDNQASPWGLLLLLGCQYLQTQALSSYAKPILKYYHNLPKTSLDNWIQSSEDPRVQELLQLWPQISSQGIQPPGPWKTLITRAEVFLTPQFSPDPIPAALCLFSDGATGRGAYCLWKDHLLDFQAVPAPESAQKGELAGLLAGLAAAPPEPVNIWVDSKYLYSLLRTWVLGAWLQPDPVPSYALLYKSLLRHPAIVVGHVRSHSSASHPIASLNNYVDQLAGKRTADGSEFEKRTADGSEFESPKKKAKVE

SEQ ID NO: 523 - protein, 1995 aa, synthetic construct
  source 1..1995: note = Description of Artificial Sequence: Synthetic polypeptide
MPAAKRVKLDGGDKKYSIGLDIGTNSVGWAVITDEYKVPSKKFKVLGNTDRHSIKKNLIGALLFDSGETAEATRLKRTARRRYTRRKNRICYLQEIFSNEMAKVDDSFFHRLEESFLVEEDKKHERHPIFGNIVDEVAYHEKYPTIYHLRKKLVDSTDKADLRLIYLALAHMIKFRGHFLIEGDLNPDNSDVDKLFIQLVQTYNQLFEENPINASGVDAKAILSARLSKSRRLENLIAQLPGEKKNGLFGNLIALSLGLTPNFKSNFDLAEDAKLQLSKDTYDDDLDNLLAQIGDQYADLFLAAKNLSDAILLSDILRVNTEITKAPLSASMIKRYDEHHQDLTLLKALVRQQLPEKYKEIFFDQSKNGYAGYIDGGASQEEFYKFIKPILEKMDGTEELLVKLNREDLLRKQRTFDNGSIPHQIHLGELHAILRRQEDFYPFLKDNREKIEKILTFRIPYYVGPLARGNSRFAWMTRKSEETITPWNFEEVVDKGASAQSFIERMTNFDKNLPNEKVLPKHSLLYEYFTVYNELTKVKYVTEGMRKPAFLSGEQKKAIVDLLFKTNRKVTVKQLKEDYFKKIECFDSVEISGVEDRFNASLGTYHDLLKIIKDKDFLDNEENEDILEDIVLTLTLFEDREMIEERLKTYAHLFDDKVMKQLKRRRYTGWGRLSRKLINGIRDKQSGKTILDFLKSDGFANRNFMQLIHDDSLTFKEDIQKAQVSGQGDSLHEHIANLAGSPAIKKGILQTVKVVDELVKVMGRHKPENIVIEMARENQTTQKGQKNSRERMKRIEEGIKELGSQILKEHPVENTQLQNEKLYLYYLQNGRDMYVDQELDINRLSDYDVDHIVPQSFLKDDSIDNKVLTRSDKARGKSDNVPSEEVVKKMKNYWRQLLNAKLITQRKFDNLTKAERGGLSELDKAGFIKRQLVETRQITKHVAQILDSRMNTKYDENDKLIREVKVITLKSKLVSDFRKDFQFYKVREINNYHHAHDAYLNAVVGTALIKKYPKLESEFVYGDYKVYDVRKMIAKSEQEIGKATAKYFFYSNIMNFFKTEITLANGEIRKRPLIETNGETGEIVWDKGRDFATVRKVLSMPQVNIVKKTEVQTGGFSKESILPKRNSDKLIARKKDWDPKKYGGFDSPTVAYSVLVVAKVEKGKSKKLKSVKELLGITIMERSSFEKNPIDFLEAKGYKEVKKDLIIKLPKYSLFELENGRKRMLASAGELQKGNELALPSKYVNFLYLASHYEKLKGSPEDNEQKQLFVEQHKHYLDEIIEQISEFSKRVILADANLDKVLSAYNKHRDKPIREQAENIIHLFTLTNLGAPAAFKYFDTTIDRKRYTSTKEVLDATLIHQSITGLYETRIDLSQLGGDGGGGGGGGGGVLDTPPSHIGLEHLPPPPEVPQFPLNLERLQALQDLVHRSLEAGYISPWDGPGNNPVFPVRKPNGAWRFVHDLRATNALTKPIPALSPGPPDLTAPPTHPPHIICLDLKDAFFQIPVEDRFRFYLSFTLPSPGGLQPHRRFAWRVLPQGFINSPALFQRALQEPLRQVSAAFSQSLLVSYMDDILYASPTEEQRSQCYQALAARLRDLGFQVASEKTSQTPSPVPFLGQMVHEQIVTYQSLPTLQISSPISLHQLQAVLGDLQWVSRGTPTTRRPLQLLYSSLKRHHDPRAIIQLSPEQLQGIAELRQALSHNARSRYNEQEPLLAYVHLTRAGSTLVLFQKGAQFPLAYFQTPLTDNQASPWGLLLLLGCQYLQTQALSSYAKPILKYYHNLPKTSLDNWIQSSEDPRVQELLQLWPQISSQGIQPPGPWKTLITRAEVFLTPQFSPDPIPAALCLFSDGATGRGAYCLWKDHLLDFQAVPAPESAQKGELAGLLAGLAAAPPEPVNIWVDSKYLYSLLRTWVLGAWLQPDPVPSYALLYKSLLRHPAIVVGHVRSHSSASHPIASLNNYVDQLAGKRTADGSEFEKRTADGSEFESPKKKAKVE

SEQ ID NO: 524 - protein, 2122 aa, synthetic construct
  source 1..2122: note = Description of Artificial Sequence: Synthetic polypeptide
MPAAKRVKLDGGDKKYSIGLDIGTNSVGWAVITDEYKVPSKKFKVLGNTDRHSIKKNLIGALLFDSGETAEATRLKRTARRRYTRRKNRICYLQEIFSNEMAKVDDSFFHRLEESFLVEEDKKHERHPIFGNIVDEVAYHEKYPTIYHLRKKLVDSTDKADLRLIYLALAHMIKFRGHFLIEGDLNPDNSDVDKLFIQLVQTYNQLFEENPINASGVDAKAILSARLSKSRRLENLIAQLPGEKKNGLFGNLIALSLGLTPNFKSNFDLAEDAKLQLSKDTYDDDLDNLLAQIGDQYADLFLAAKNLSDAILLSDILRVNTEITKAPLSASMIKRYDEHHQDLTLLKALVRQQLPEKYKEIFFDQSKNGYAGYIDGGASQEEFYKFIKPILEKMDGTEELLVKLNREDLLRKQRTFDNGSIPHQIHLGELHAILRRQEDFYPFLKDNREKIEKILTFRIPYYVGPLARGNSRFAWMTRKSEETITPWNFEEVVDKGASAQSFIERMTNFDKNLPNEKVLPKHSLLYEYFTVYNELTKVKYVTEGMRKPAFLSGEQKKAIVDLLFKTNRKVTVKQLKEDYFKKIECFDSVEISGVEDRFNASLGTYHDLLKIIKDKDFLDNEENEDILEDIVLTLTLFEDREMIEERLKTYAHLFDDKVMKQLKRRRYTGWGRLSRKLINGIRDKQSGKTILDFLKSDGFANRNFMQLIHDDSLTFKEDIQKAQVSGQGDSLHEHIANLAGSPAIKKGILQTVKVVDELVKVMGRHKPENIVIEMARENQTTQKGQKNSRERMKRIEEGIKELGSQILKEHPVENTQLQNEKLYLYYLQNGRDMYVDQELDINRLSDYDVDHIVPQSFLKDDSIDNKVLTRSDKARGKSDNVPSEEVVKKMKNYWRQLLNAKLITQRKFDNLTKAERGGLSELDKAGFIKRQLVETRQITKHVAQILDSRMNTKYDENDKLIREVKVITLKSKLVSDFRKDFQFYKVREINNYHHAHDAYLNAVVGTALIKKYPKLESEFVYGDYKVYDVRKMIAKSEQEIGKATAKYFFYSNIMNFFKTEITLANGEIRKRPLIETNGETGEIVWDKGRDFATVRKVLSMPQVNIVKKTEVQTGGFSKESILPKRNSDKLIARKKDWDPKKYGGFDSPTVAYSVLVVAKVEKGKSKKLKSVKELLGITIMERSSFEKNPIDFLEAKGYKEVKKDLIIKLPKYSLFELENGRKRMLASAGELQKGNELALPSKYVNFLYLASHYEKLKGSPEDNEQKQLFVEQHKHYLDEIIEQISEFSKRVILADANLDKVLSAYNKHRDKPIREQAENIIHLFTLTNLGAPAAFKYFDTTIDRKRYTSTKEVLDATLIHQSITGLYETRIDLSQLGGDGGAEAAAKEAAAKEAAAKEAAAKALEAEAAAKEAAAKEAAAKEAAAKAGGIPWLMKKPLQLTTLVPLQEYEERLLKQTMLTGSYKEKLQSLFLKYDALWQHWENQVGHRRIKPHHIATGTVNPRPQKQYPINPKAKASIQTVINDLLKQGVLIQQNSIMNTPVYPVPKPDGKWRMVLDYREVNKTIPLIAAQNQHSAGILSSIFRGKYKTTLDLSNGFWAHSITPESYWLTAFTWLGQQYCWTRLPQGFLNSPALFTADVVDLLKEVPNVQVYVDDIYISHDDPREHLEQLEKVFSLLLNAGYVVSLKKSEIAQHEVEFLGFNITKEGRGLTETFKQKLLNITPPRDLKQLQSILGLLNFARNFIPNFSELVKPLYNIIATANGKYITWTTDNSQQLQNIISMLNSAENLEERNPEVRLIMKVNTSPSAGYIRFYNEFAKRPIMYLNYVYTKAEVKFTNTEKLLTTIHKGLIKALDLGMGQEILVYSPIVSMTKIQKTPLPERKALPIRWITWMSYLEDPRIQFHYDKTLPELQQVPTVTDDIIAKIKHPSEFSMVFYTDGSAIKHPNVNKSHNAGMGIAQVQFKPEFTVINTWSIPLGDHTAQLAEVAAVEFACKKALKIDGPVLIVTDSFYVAESVNKELPYWQSNGFFNNKKKPLKHVSKWKSIADCIQLKPDIIIIHEKGHQPTASTFHTEGNNLADKLATQGSYVVNAGKRTADGSEFEKRTADGSEFESPKKKAKVE

SEQ ID NO: 525 - protein, 2096 aa, synthetic construct
  source 1..2096: note = Description of Artificial Sequence: Synthetic polypeptide
MPAAKRVKLDGGDKKYSIGLDIGTNSVGWAVITDEYKVPSKKFKVLGNTDRHSIKKNLIGALLFDSGETAEATRLKRTARRRYTRRKNRICYLQEIFSNEMAKVDDSFFHRLEESFLVEEDKKHERHPIFGNIVDEVAYHEKYPTIYHLRKKLVDSTDKADLRLIYLALAHMIKFRGHFLIEGDLNPDNSDVDKLFIQLVQTYNQLFEENPINASGVDAKAILSARLSKSRRLENLIAQLPGEKKNGLFGNLIALSLGLTPNFKSNFDLAEDAKLQLSKDTYDDDLDNLLAQIGDQYADLFLAAKNLSDAILLSDILRVNTEITKAPLSASMIKRYDEHHQDLTLLKALVRQQLPEKYKEIFFDQSKNGYAGYIDGGASQEEFYKFIKPILEKMDGTEELLVKLNREDLLRKQRTFDNGSIPHQIHLGELHAILRRQEDFYPFLKDNREKIEKILTFRIPYYVGPLARGNSRFAWMTRKSEETITPWNFEEVVDKGASAQSFIERMTNFDKNLPNEKVLPKHSLLYEYFTVYNELTKVKYVTEGMRKPAFLSGEQKKAIVDLLFKTNRKVTVKQLKEDYFKKIECFDSVEISGVEDRFNASLGTYHDLLKIIKDKDFLDNEENEDILEDIVLTLTLFEDREMIEERLKTYAHLFDDKVMKQLKRRRYTGWGRLSRKLINGIRDKQSGKTILDFLKSDGFANRNFMQLIHDDSLTFKEDIQKAQVSGQGDSLHEHIANLAGSPAIKKGILQTVKVVDELVKVMGRHKPENIVIEMARENQTTQKGQKNSRERMKRIEEGIKELGSQILKEHPVENTQLQNEKLYLYYLQNGRDMYVDQELDINRLSDYDVDHIVPQSFLKDDSIDNKVLTRSDKARGKSDNVPSEEVVKKMKNYWRQLLNAKLITQRKFDNLTKAERGGLSELDKAGFIKRQLVETRQITKHVAQILDSRMNTKYDENDKLIREVKVITLKSKLVSDFRKDFQFYKVREINNYHHAHDAYLNAVVGTALIKKYPKLESEFVYGDYKVYDVRKMIAKSEQEIGKATAKYFFYSNIMNFFKTEITLANGEIRKRPLIETNGETGEIVWDKGRDFATVRKVLSMPQVNIVKKTEVQTGGFSKESILPKRNSDKLIARKKDWDPKKYGGFDSPTVAYSVLVVAKVEKGKSKKLKSVKELLGITIMERSSFEKNPIDFLEAKGYKEVKKDLIIKLPKYSLFELENGRKRMLASAGELQKGNELALPSKYVNFLYLASHYEKLKGSPEDNEQKQLFVEQHKHYLDEIIEQISEFSKRVILADANLDKVLSAYNKHRDKPIREQAENIIHLFTLTNLGAPAAFKYFDTTIDRKRYTSTKEVLDATLIHQSITGLYETRIDLSQLGGDGGEAAAKEAAAKEAAAKEAAAKGGIPWLMKKPLQLTTLVPLQEYEERLLKQTMLTGSYKEKLQSLFLKYDALWQHWENQVGHRRIKPHHIATGTVNPRPQKQYPINPKAKASIQTVINDLLKQGVLIQQNSIMNTPVYPVPKPDGKWRMVLDYREVNKTIPLIAAQNQHSAGILSSIFRGKYKTTLDLSNGFWAHSITPESYWLTAFTWLGQQYCWTRLPQGFLNSPALFTADVVDLLKEVPNVQVYVDDIYISHDDPREHLEQLEKVFSLLLNAGYVVSLKKSEIAQHEVEFLGFNITKEGRGLTETFKQKLLNITPPRDLKQLQSILGLLNFARNFIPNFSELVKPLYNIIATANGKYITWTTDNSQQLQNIISMLNSAENLEERNPEVRLIMKVNTSPSAGYIRFYNEFAKRPIMYLNYVYTKAEVKFTNTEKLLTTIHKGLIKALDLGMGQEILVYSPIVSMTKIQKTPLPERKALPIRWITWMSYLEDPRIQFHYDKTLPELQQVPTVTDDIIAKIKHPSEFSMVFYTDGSAIKHPNVNKSHNAGMGIAQVQFKPEFTVINTWSIPLGDHTAQLAEVAAVEFACKKALKIDGPVLIVTDSFYVAESVNKELPYWQSNGFFNNKKKPLKHVSKWKSIADCIQLKPDIIIIHEKGHQPTASTFHTEGNNLADKLATQGSYVVNAGKRTADGSEFEKRTADGSEFESPKKKAKVE

SEQ ID NO: 526 - protein, 2087 aa, synthetic construct
  source 1..2087: note = Description of Artificial Sequence: Synthetic polypeptide
MPAAKRVKLDGGDKKYSIGLDIGTNSVGWAVITDEYKVPSKKFKVLGNTDRHSIKKNLIGALLFDSGETAEATRLKRTARRRYTRRKNRICYLQEIFSNEMAKVDDSFFHRLEESFLVEEDKKHERHPIFGNIVDEVAYHEKYPTIYHLRKKLVDSTDKADLRLIYLALAHMIKFRGHFLIEGDLNPDNSDVDKLFIQLVQTYNQLFEENPINASGVDAKAILSARLSKSRRLENLIAQLPGEKKNGLFGNLIALSLGLTPNFKSNFDLAEDAKLQLSKDTYDDDLDNLLAQIGDQYADLFLAAKNLSDAILLSDILRVNTEITKAPLSASMIKRYDEHHQDLTLLKALVRQQLPEKYKEIFFDQSKNGYAGYIDGGASQEEFYKFIKPILEKMDGTEELLVKLNREDLLRKQRTFDNGSIPHQIHLGELHAILRRQEDFYPFLKDNREKIEKILTFRIPYYVGPLARGNSRFAWMTRKSEETITPWNFEEVVDKGASAQSFIERMTNFDKNLPNEKVLPKHSLLYEYFTVYNELTKVKYVTEGMRKPAFLSGEQKKAIVDLLFKTNRKVTVKQLKEDYFKKIECFDSVEISGVEDRFNASLGTYHDLLKIIKDKDFLDNEENEDILEDIVLTLTLFEDREMIEERLKTYAHLFDDKVMKQLKRRRYTGWGRLSRKLINGIRDKQSGKTILDFLKSDGFANRNFMQLIHDDSLTFKEDIQKAQVSGQGDSLHEHIANLAGSPAIKKGILQTVKVVDELVKVMGRHKPENIVIEMARENQTTQKGQKNSRERMKRIEEGIKELGSQILKEHPVENTQLQNEKLYLYYLQNGRDMYVDQELDINRLSDYDVDHIVPQSFLKDDSIDNKVLTRSDKARGKSDNVPSEEVVKKMKNYWRQLLNAKLITQRKFDNLTKAERGGLSELDKAGFIKRQLVETRQITKHVAQILDSRMNTKYDENDKLIREVKVITLKSKLVSDFRKDFQFYKVREINNYHHAHDAYLNAVVGTALIKKYPKLESEFVYGDYKVYDVRKMIAKSEQEIGKATAKYFFYSNIMNFFKTEITLANGEIRKRPLIETNGETGEIVWDKGRDFATVRKVLSMPQVNIVKKTEVQTGGFSKESILPKRNSDKLIARKKDWDPKKYGGFDSPTVAYSVLVVAKVEKGKSKKLKSVKELLGITIMERSSFEKNPIDFLEAKGYKEVKKDLIIKLPKYSLFELENGRKRMLASAGELQKGNELALPSKYVNFLYLASHYEKLKGSPEDNEQKQLFVEQHKHYLDEIIEQISEFSKRVILADANLDKVLSAYNKHRDKPIREQAENIIHLFTLTNLGAPAAFKYFDTTIDRKRYTSTKEVLDATLIHQSITGLYETRIDLSQLGGDGGGGSEAAAKPAPGGIPWLMKKPLQLTTLVPLQEYEERLLKQTMLTGSYKEKLQSLFLKYDALWQHWENQVGHRRIKPHHIATGTVNPRPQKQYPINPKAKASIQTVINDLLKQGVLIQQNSIMNTPVYPVPKPDGKWRMVLDYREVNKTIPLIAAQNQHSAGILSSIFRGKYKTTLDLSNGFWAHSITPESYWLTAFTWLGQQYCWTRLPQGFLNSPALFTADVVDLLKEVPNVQVYVDDIYISHDDPREHLEQLEKVFSLLLNAGYVVSLKKSEIAQHEVEFLGFNITKEGRGLTETFKQKLLNITPPRDLKQLQSILGLLNFARNFIPNFSELVKPLYNIIATANGKYITWTTDNSQQLQNIISMLNSAENLEERNPEVRLIMKVNTSPSAGYIRFYNEFAKRPIMYLNYVYTKAEVKFTNTEKLLTTIHKGLIKALDLGMGQEILVYSPIVSMTKIQKTPLPERKALPIRWITWMSYLEDPRIQFHYDKTLPELQQVPTVTDDIIAKIKHPSEFSMVFYTDGSAIKHPNVNKSHNAGMGIAQVQFKPEFTVINTWSIPLGDHTAQLAEVAAVEFACKKALKIDGPVLIVTDSFYVAESVNKELPYWQSNGFFNNKKKPLKHVSKWKSIADCIQLKPDIIIIHEKGHQPTASTFHTEGNNLADKLATQGSYVVNAGKRTADGSEFEKRTADGSEFESPKKKAKVE

SEQ ID NO: 527 - protein, 2109 aa, synthetic construct
  source 1..2109: note = Description of Artificial Sequence: Synthetic polypeptide
MPAAKRVKLDGGDKKYSIGLDIGTNSVGWAVITDEYKVPSKKFKVLGNTDRHSIKKNLIGALLFDSGETAEATRLKRTARRRYTRRKNRICYLQEIFSNEMAKVDDSFFHRLEESFLVEEDKKHERHPIFGNIVDEVAYHEKYPTIYHLRKKLVDSTDKADLRLIYLALAHMIKFRGHFLIEGDLNPDNSDVDKLFIQLVQTYNQLFEENPINASGVDAKAILSARLSKSRRLENLIAQLPGEKKNGLFGNLIALSLGLTPNFKSNFDLAEDAKLQLSKDTYDDDLDNLLAQIGDQYADLFLAAKNLSDAILLSDILRVNTEITKAPLSASMIKRYDEHHQDLTLLKALVRQQLPEKYKEIFFDQSKNGYAGYIDGGASQEEFYKFIKPILEKMDGTEELLVKLNREDLLRKQRTFDNGSIPHQIHLGELHAILRRQEDFYPFLKDNREKIEKILTFRIPYYVGPLARGNSRFAWMTRKSEETITPWNFEEVVDKGASAQSFIERMTNFDKNLPNEKVLPKHSLLYEYFTVYNELTKVKYVTEGMRKPAFLSGEQKKAIVDLLFKTNRKVTVKQLKEDYFKKIECFDSVEISGVEDRFNASLGTYHDLLKIIKDKDFLDNEENEDILEDIVLTLTLFEDREMIEERLKTYAHLFDDKVMKQLKRRRYTGWGRLSRKLINGIRDKQSGKTILDFLKSDGFANRNFMQLIHDDSLTFKEDIQKAQVSGQGDSLHEHIANLAGSPAIKKGILQTVKVVDELVKVMGRHKPENIVIEMARENQTTQKGQKNSRERMKRIEEGIKELGSQILKEHPVENTQLQNEKLYLYYLQNGRDMYVDQELDINRLSDYDVDHIVPQSFLKDDSIDNKVLTRSDKARGKSDNVPSEEVVKKMKNYWRQLLNAKLITQRKFDNLTKAERGGLSELDKAGFIKRQLVETRQITKHVAQILDSRMNTKYDENDKLIREVKVITLKSKLVSDFRKDFQFYKVREINNYHHAHDAYLNAVVGTALIKKYPKLESEFVYGDYKVYDVRKMIAKSEQEIGKATAKYFFYSNIMNFFKTEITLANGEIRKRPLIETNGETGEIVWDKGRDFATVRKVLSMPQVNIVKKTEVQTGGFSKESILPKRNSDKLIARKKDWDPKKYGGFDSPTVAYSVLVVAKVEKGKSKKLKSVKELLGITIMERSSFEKNPIDFLEAKGYKEVKKDLIIKLPKYSLFELENGRKRMLASAGELQKGNELALPSKYVNFLYLASHYEKLKGSPEDNEQKQLFVEQHKHYLDEIIEQISEFSKRVILADANLDKVLSAYNKHRDKPIREQAENIIHLFTLTNLGAPAAFKYFDTTIDRKRYTSTKEVLDATLIHQSITGLYETRIDLSQLGGDGGSGGSSGGSSGSETPGTSESATPESSGGSSGGSSGGIPWLMKKPLQLTTLVPLQEYEERLLKQTMLTGSYKEKLQSLFLKYDALWQHWENQVGHRRIKPHHIATGTVNPRPQKQYPINPKAKASIQTVINDLLKQGVLIQQNSIMNTPVYPVPKPDGKWRMVLDYREVNKTIPLIAAQNQHSAGILSSIFRGKYKTTLDLSNGFWAHSITPESYWLTAFTWLGQQYCWTRLPQGFLNSPALFTADVVDLLKEVPNVQVYVDDIYISHDDPREHLEQLEKVFSLLLNAGYVVSLKKSEIAQHEVEFLGFNITKEGRGLTETFKQKLLNITPPRDLKQLQSILGLLNFARNFIPNFSELVKPLYNIIATANGKYITWTTDNSQQLQNIISMLNSAENLEERNPEVRLIMKVNTSPSAGYIRFYNEFAKRPIMYLNYVYTKAEVKFTNTEKLLTTIHKGLIKALDLGMGQEILVYSPIVSMTKIQKTPLPERKALPIRWITWMSYLEDPRIQFHYDKTLPELQQVPTVTDDIIAKIKHPSEFSMVFYTDGSAIKHPNVNKSHNAGMGIAQVQFKPEFTVINTWSIPLGDHTAQLAEVAAVEFACKKALKIDGPVLIVTDSFYVAESVNKELPYWQSNGFFNNKKKPLKHVSKWKSIADCIQLKPDIIIIHEKGHQPTASTFHTEGNNLADKLATQGSYVVNAGKRTADGSEFEKRTADGSEFESPKKKAKVE

SEQ ID NO: 528 - protein, 2106 aa, synthetic construct
  source 1..2106: note = Description of Artificial Sequence: Synthetic polypeptide
MPAAKRVKLDGGDKKYSIGLDIGTNSVGWAVITDEYKVPSKKFKVLGNTDRHSIKKNLIGALLFDSGETAEATRLKRTARRRYTRRKNRICYLQEIFSNEMAKVDDSFFHRLEESFLVEEDKKHERHPIFGNIVDEVAYHEKYPTIYHLRKKLVDSTDKADLRLIYLALAHMIKFRGHFLIEGDLNPDNSDVDKLFIQLVQTYNQLFEENPINASGVDAKAILSARLSKSRRLENLIAQLPGEKKNGLFGNLIALSLGLTPNFKSNFDLAEDAKLQLSKDTYDDDLDNLLAQIGDQYADLFLAAKNLSDAILLSDILRVNTEITKAPLSASMIKRYDEHHQDLTLLKALVRQQLPEKYKEIFFDQSKNGYAGYIDGGASQEEFYKFIKPILEKMDGTEELLVKLNREDLLRKQRTFDNGSIPHQIHLGELHAILRRQEDFYPFLKDNREKIEKILTFRIPYYVGPLARGNSRFAWMTRKSEETITPWNFEEVVDKGASAQSFIERMTNFDKNLPNEKVLPKHSLLYEYFTVYNELTKVKYVTEGMRKPAFLSGEQKKAIVDLLFKTNRKVTVKQLKEDYFKKIECFDSVEISGVEDRFNASLGTYHDLLKIIKDKDFLDNEENEDILEDIVLTLTLFEDREMIEERLKTYAHLFDDKVMKQLKRRRYTGWGRLSRKLINGIRDKQSGKTILDFLKSDGFANRNFMQLIHDDSLTFKEDIQKAQVSGQGDSLHEHIANLAGSPAIKKGILQTVKVVDELVKVMGRHKPENIVIEMARENQTTQKGQKNSRERMKRIEEGIKELGSQILKEHPVENTQLQNEKLYLYYLQNGRDMYVDQELDINRLSDYDVDHIVPQSFLKDDSIDNKVLTRSDKARGKSDNVPSEEVVKKMKNYWRQLLNAKLITQRKFDNLTKAERGGLSELDKAGFIKRQLVETRQITKHVAQILDSRMNTKYDENDKLIREVKVITLKSKLVSDFRKDFQFYKVREINNYHHAHDAYLNAVVGTALIKKYPKLESEFVYGDYKVYDVRKMIAKSEQEIGKATAKYFFYSNIMNFFKTEITLANGEIRKRPLIETNGETGEIVWDKGRDFATVRKVLSMPQVNIVKKTEVQTGGFSKESILPKRNSDKLIARKKDWDPKKYGGFDSPTVAYSVLVVAKVEKGKSKKLKSVKELLGITIMERSSFEKNPIDFLEAKGYKEVKKDLIIKLPKYSLFELENGRKRMLASAGELQKGNELALPSKYVNFLYLASHYEKLKGSPEDNEQKQLFVEQHKHYLDEIIEQISEFSKRVILADANLDKVLSAYNKHRDKPIREQAENIIHLFTLTNLGAPAAFKYFDTTIDRKRYTSTKEVLDATLIHQSITGLYETRIDLSQLGGDGGGGGGSGGGGSGGGGSGGGGSGGGGSGGGGSGGIPWLMKKPLQLTTLVPLQEYEERLLKQTMLTGSYKEKLQSLFLKYDALWQHWENQVGHRRIKPHHIATGTVNPRPQKQYPINPKAKASIQTVINDLLKQGVLIQQNSIMNTPVYPVPKPDGKWRMVLDYREVNKTIPLIAAQNQHSAGILSSIFRGKYKTTLDLSNGFWAHSITPESYWLTAFTWLGQQYCWTRLPQGFLNSPALFTADVVDLLKEVPNVQVYVDDIYISHDDPREHLEQLEKVFSLLLNAGYVVSLKKSEIAQHEVEFLGFNITKEGRGLTETFKQKLLNITPPRDLKQLQSILGLLNFARNFIPNFSELVKPLYNIIATANGKYITWTTDNSQQLQNIISMLNSAENLEERNPEVRLIMKVNTSPSAGYIRFYNEFAKRPIMYLNYVYTKAEVKFTNTEKLLTTIHKGLIKALDLGMGQEILVYSPIVSMTKIQKTPLPERKALPIRWITWMSYLEDPRIQFHYDKTLPELQQVPTVTDDIIAKIKHPSEFSMVFYTDGSAIKHPNVNKSHNAGMGIAQVQFKPEFTVINTWSIPLGDHTAQLAEVAAVEFACKKALKIDGPVLIVTDSFYVAESVNKELPYWQSNGFFNNKKKPLKHVSKWKSIADCIQLKPDIIIIHEKGHQPTASTFHTEGNNLADKLATQGSYVVNAGKRTADGSEFEKRTADGSEFESPKKKAKVE

SEQ ID NO: 529 - protein, 2082 aa, synthetic construct
  source 1..2082: note = Description of Artificial Sequence: Synthetic polypeptide
MPAAKRVKLDGGDKKYSIGLDIGTNSVGWAVITDEYKVPSKKFKVLGNTDRHSIKKNLIGALLFDSGETAEATRLKRTARRRYTRRKNRICYLQEIFSNEMAKVDDSFFHRLEESFLVEEDKKHERHPIFGNIVDEVAYHEKYPTIYHLRKKLVDSTDKADLRLIYLALAHMIKFRGHFLIEGDLNPDNSDVDKLFIQLVQTYNQLFEENPINASGVDAKAILSARLSKSRRLENLIAQLPGEKKNGLFGNLIALSLGLTPNFKSNFDLAEDAKLQLSKDTYDDDLDNLLAQIGDQYADLFLAAKNLSDAILLSDILRVNTEITKAPLSASMIKRYDEHHQDLTLLKALVRQQLPEKYKEIFFDQSKNGYAGYIDGGASQEEFYKFIKPILEKMDGTEELLVKLNREDLLRKQRTFDNGSIPHQIHLGELHAILRRQEDFYPFLKDNREKIEKILTFRIPYYVGPLARGNSRFAWMTRKSEETITPWNFEEVVDKGASAQSFIERMTNFDKNLPNEKVLPKHSLLYEYFTVYNELTKVKYVTEGMRKPAFLSGEQKKAIVDLLFKTNRKVTVKQLKEDYFKKIECFDSVEISGVEDRFNASLGTYHDLLKIIKDKDFLDNEENEDILEDIVLTLTLFEDREMIEERLKTYAHLFDDKVMKQLKRRRYTGWGRLSRKLINGIRDKQSGKTILDFLKSDGFANRNFMQLIHDDSLTFKEDIQKAQVSGQGDSLHEHIANLAGSPAIKKGILQTVKVVDELVKVMGRHKPENIVIEMARENQTTQKGQKNSRERMKRIEEGIKELGSQILKEHPVENTQLQNEKLYLYYLQNGRDMYVDQELDINRLSDYDVDHIVPQSFLKDDSIDNKVLTRSDKARGKSDNVPSEEVVKKMKNYWRQLLNAKLITQRKFDNLTKAERGGLSELDKAGFIKRQLVETRQITKHVAQILDSRMNTKYDENDKLIREVKVITLKSKLVSDFRKDFQFYKVREINNYHHAHDAYLNAVVGTALIKKYPKLESEFVYGDYKVYDVRKMIAKSEQEIGKATAKYFFYSNIMNFFKTEITLANGEIRKRPLIETNGETGEIVWDKGRDFATVRKVLSMPQVNIVKKTEVQTGGFSKESILPKRNSDKLIARKKDWDPKKYGGFDSPTVAYSVLVVAKVEKGKSKKLKSVKELLGITIMERSSFEKNPIDFLEAKGYKEVKKDLIIKLPKYSLFELENGRKRMLASAGELQKGNELALPSKYVNFLYLASHYEKLKGSPEDNEQKQLFVEQHKHYLDEIIEQISEFSKRVILADANLDKVLSAYNKHRDKPIREQAENIIHLFTLTNLGAPAAFKYFDTTIDRKRYTSTKEVLDATLIHQSITGLYETRIDLSQLGGDGGGGGGGGGGIPWLMKKPLQLTTLVPLQEYEERLLKQTMLTGSYKEKLQSLFLKYDALWQHWENQVGHRRIKPHHIATGTVNPRPQKQYPINPKAKASIQTVINDLLKQGVLIQQNSIMNTPVYPVPKPDGKWRMVLDYREVNKTIPLIAAQNQHSAGILSSIFRGKYKTTLDLSNGFWAHSITPESYWLTAFTWLGQQYCWTRLPQGFLNSPALFTADVVDLLKEVPNVQVYVDDIYISHDDPREHLEQLEKVFSLLLNAGYVVSLKKSEIAQHEVEFLGFNITKEGRGLTETFKQKLLNITPPRDLKQLQSILGLLNFARNFIPNFSELVKPLYNIIATANGKYITWTTDNSQQLQNIISMLNSAENLEERNPEVRLIMKVNTSPSAGYIRFYNEFAKRPIMYLNYVYTKAEVKFTNTEKLLTTIHKGLIKALDLGMGQEILVYSPIVSMTKIQKTPLPERKALPIRWITWMSYLEDPRIQFHYDKTLPELQQVPTVTDDIIAKIKHPSEFSMVFYTDGSAIKHPNVNKSHNAGMGIAQVQFKPEFTVINTWSIPLGDHTAQLAEVAAVEFACKKALKIDGPVLIVTDSFYVAESVNKELPYWQSNGFFNNKKKPLKHVSKWKSIADCIQLKPDIIIIHEKGHQPTASTFHTEGNNLADKLATQGSYVVNAGKRTADGSEFEKRTADGSEFESPKKKAKVE

SEQ ID NO: 530 - protein, 2087 aa, synthetic construct
  source 1..2087: note = Description of Artificial Sequence: Synthetic polypeptide
MPAAKRVKLDGGDKKYSIGLDIGTNSVGWAVITDEYKVPSKKFKVLGNTDRHSIKKNLIGALLFDSGETAEATRLKRTARRRYTRRKNRICYLQEIFSNEMAKVDDSFFHRLEESFLVEEDKKHERHPIFGNIVDEVAYHEKYPTIYHLRKKLVDSTDKADLRLIYLALAHMIKFRGHFLIEGDLNPDNSDVDKLFIQLVQTYNQLFEENPINASGVDAKAILSARLSKSRRLENLIAQLPGEKKNGLFGNLIALSLGLTPNFKSNFDLAEDAKLQLSKDTYDDDLDNLLAQIGDQYADLFLAAKNLSDAILLSDILRVNTEITKAPLSASMIKRYDEHHQDLTLLKALVRQQLPEKYKEIFFDQSKNGYAGYIDGGASQEEFYKFIKPILEKMDGTEELLVKLNREDLLRKQRTFDNGSIPHQIHLGELHAILRRQEDFYPFLKDNREKIEKILTFRIPYYVGPLARGNSRFAWMTRKSEETITPWNFEEVVDKGASAQSFIERMTNFDKNLPNEKVLPKHSLLYEYFTVYNELTKVKYVTEGMRKPAFLSGEQKKAIVDLLFKTNRKVTVKQLKEDYFKKIECFDSVEISGVEDRFNASLGTYHDLLKIIKDKDFLDNEENEDILEDIVLTLTLFEDREMIEERLKTYAHLFDDKVMKQLKRRRYTGWGRLSRKLINGIRDKQSGKTILDFLKSDGFANRNFMQLIHDDSLTFKEDIQKAQVSGQGDSLHEHIANLAGSPAIKKGILQTVKVVDELVKVMGRHKPENIVIEMARENQTTQKGQKNSRERMKRIEEGIKELGSQILKEHPVENTQLQNEKLYLYYLQNGRDMYVDQELDINRLSDYDVDHIVPQSFLKDDSIDNKVLTRSDKARGKSDNVPSEEVVKKMKNYWRQLLNAKLITQRKFDNLTKAERGGLSELDKAGFIKRQLVETRQITKHVAQILDSRMNTKYDENDKLIREVKVITLKSKLVSDFRKDFQFYKVREINNYHHAHDAYLNAVVGTALIKKYPKLESEFVYGDYKVYDVRKMIAKSEQEIGKATAKYFFYSNIMNFFKTEITLANGEIRKRPLIETNGETGEIVWDKGRDFATVRKVLSMPQVNIVKKTEVQTGGFSKESILPKRNSDKLIARKKDWDPKKYGGFDSPTVAYSVLVVAKVEKGKSKKLKSVKELLGITIMERSSFEKNPIDFLEAKGYKEVKKDLIIKLPKYSLFELENGRKRMLASAGELQKGNELALPSKYVNFLYLASHYEKLKGSPEDNEQKQLFVEQHKHYLDEIIEQISEFSKRVILADANLDKVLSAYNKHRDKPIREQAENIIHLFTLTNLGAPAAFKYFDTTIDRKRYTSTKEVLDATLIHQSITGLYETRIDLSQLGGDGGGSSGGGEAAAKGGIPWLMKKPLQLTTLVPLQEYEERLLKQTMLTGSYKEKLQSLFLKYDALWQHWENQVGHRRIKPHHIATGTVNPRPQKQYPINPKAKASIQTVINDLLKQGVLIQQNSIMNTPVYPVPKPDGKWRMVLDYREVNKTIPLIAAQNQHSAGILSSIFRGKYKTTLDLSNGFWAHSITPESYWLTAFTWLGQQYCWTRLPQGFLNSPALFTADVVDLLKEVPNVQVYVDDIYISHDDPREHLEQLEKVFSLLLNAGYVVSLKKSEIAQHEVEFLGFNITKEGRGLTETFKQKLLNITPPRDLKQLQSILGLLNFARNFIPNFSELVKPLYNIIATANGKYITWTTDNSQQLQNIISMLNSAENLEERNPEVRLIMKVNTSPSAGYIRFYNEFAKRPIMYLNYVYTKAEVKFTNTEKLLTTIHKGLIKALDLGMGQEILVYSPIVSMTKIQKTPLPERKALPIRWITWMSYLEDPRIQFHYDKTLPELQQVPTVTDDIIAKIKHPSEFSMVFYTDGSAIKHPNVNKSHNAGMGIAQVQFKPEFTVINTWSIPLGDHTAQLAEVAAVEFACKKALKIDGPVLIVTDSFYVAESVNKELPYWQSNGFFNNKKKPLKHVSKWKSIADCIQLKPDIIIIHEKGHQPTASTFHTEGNNLADKLATQGSYVVNAGKRTADGSEFEKRTADGSEFESPKKKAKVE

SEQ ID NO: 531 - protein, 2082 aa, synthetic construct
  source 1..2082: note = Description of Artificial Sequence: Synthetic polypeptide
MPAAKRVKLDGGDKKYSIGLDIGTNSVGWAVITDEYKVPSKKFKVLGNTDRHSIKKNLIGALLFDSGETAEATRLKRTARRRYTRRKNRICYLQEIFSNEMAKVDDSFFHRLEESFLVEEDKKHERHPIFGNIVDEVAYHEKYPTIYHLRKKLVDSTDKADLRLIYLALAHMIKFRGHFLIEGDLNPDNSDVDKLFIQLVQTYNQLFEENPINASGVDAKAILSARLSKSRRLENLIAQLPGEKKNGLFGNLIALSLGLTPNFKSNFDLAEDAKLQLSKDTYDDDLDNLLAQIGDQYADLFLAAKNLSDAILLSDILRVNTEITKAPLSASMIKRYDEHHQDLTLLKALVRQQLPEKYKEIFFDQSKNGYAGYIDGGASQEEFYKFIKPILEKMDGTEELLVKLNREDLLRKQRTFDNGSIPHQIHLGELHAILRRQEDFYPFLKDNREKIEKILTFRIPYYVGPLARGNSRFAWMTRKSEETITPWNFEEVVDKGASAQSFIERMTNFDKNLPNEKVLPKHSLLYEYFTVYNELTKVKYVTEGMRKPAFLSGEQKKAIVDLLFKTNRKVTVKQLKEDYFKKIECFDSVEISGVEDRFNASLGTYHDLLKIIKDKDFLDNEENEDILEDIVLTLTLFEDREMIEERLKTYAHLFDDKVMKQLKRRRYTGWGRLSRKLINGIRDKQSGKTILDFLKSDGFANRNFMQLIHDDSLTFKEDIQKAQVSGQGDSLHEHIANLAGSPAIKKGILQTVKVVDELVKVMGRHKPENIVIEMARENQTTQKGQKNSRERMKRIEEGIKELGSQILKEHPVENTQLQNEKLYLYYLQNGRDMYVDQELDINRLSDYDVDHIVPQSFLKDDSIDNKVLTRSDKARGKSDNVPSEEVVKKMKNYWRQLLNAKLITQRKFDNLTKAERGGLSELDKAGFIKRQLVETRQITKHVAQILDSRMNTKYDENDKLIREVKVITLKSKLVSDFRKDFQFYKVREINNYHHAHDAYLNAVVGTALIKKYPKLESEFVYGDYKVYDVRKMIAKSEQEIGKATAKYFFYSNIMNFFKTEITLANGEIRKRPLIETNGETGEIVWDKGRDFATVRKVLSMPQVNIVKKTEVQTGGFSKESILPKRNSDKLIARKKDWDPKKYGGFDSPTVAYSVLVVAKVEKGKSKKLKSVKELLGITIMERSSFEKNPIDFLEAKGYKEVKKDLIIKLPKYSLFELENGRKRMLASAGELQKGNELALPSKYVNFLYLASHYEKLKGSPEDNEQKQLFVEQHKHYLDEIIEQISEFSKRVILADANLDKVLSAYNKHRDKPIREQAENIIHLFTLTNLGAPAAFKYFDTTIDRKRYTSTKEVLDATLIHQSITGLYETRIDLSQLGGDGGGGSGGSGGIPWLMKKPLQLTTLVPLQEYEERLLKQTMLTGSYKEKLQSLFLKYDALWQHWENQVGHRRIKPHHIATGTVNPRPQKQYPINPKAKASIQTVINDLLKQGVLIQQNSIMNTPVYPVPKPDGKWRMVLDYREVNKTIPLIAAQNQHSAGILSSIFRGKYKTTLDLSNGFWAHSITPESYWLTAFTWLGQQYCWTRLPQGFLNSPALFTADVVDLLKEVPNVQVYVDDIYISHDDPREHLEQLEKVFSLLLNAGYVVSLKKSEIAQHEVEFLGFNITKEGRGLTETFKQKLLNITPPRDLKQLQSILGLLNFARNFIPNFSELVKPLYNIIATANGKYITWTTDNSQQLQNIISMLNSAENLEERNPEVRLIMKVNTSPSAGYIRFYNEFAKRPIMYLNYVYTKAEVKFTNTEKLLTTIHKGLIKALDLGMGQEILVYSPIVSMTKIQKTPLPERKALPIRWITWMSYLEDPRIQFHYDKTLPELQQVPTVTDDIIAKIKHPSEFSMVFYTDGSAIKHPNVNKSHNAGMGIAQVQFKPEFTVINTWSIPLGDHTAQLAEVAAVEFACKKALKIDGPVLIVTDSFYVAESVNKELPYWQSNGFFNNKKKPLKHVSKWKSIADCIQLKPDIIIIHEKGHQPTASTFHTEGNNLADKLATQGSYVVNAGKRTADGSEFEKRTADGSEFESPKKKAKVE

SEQ ID NO: 532 - protein, 2085 aa, synthetic construct
  source 1..2085: note = Description of Artificial Sequence: Synthetic polypeptide
MPAAKRVKLDGGDKKYSIGLDIGTNSVGWAVITDEYKVPSKKFKVLGNTDRHSIKKNLIGALLFDSGETAEATRLKRTARRRYTRRKNRICYLQEIFSNEMAKVDDSFFHRLEESFLVEEDKKHERHPIFGNIVDEVAYHEKYPTIYHLRKKLVDSTDKADLRLIYLALAHMIKFRGHFLIEGDLNPDNSDVDKLFIQLVQTYNQLFEENPINASGVDAKAILSARLSKSRRLENLIAQLPGEKKNGLFGNLIALSLGLTPNFKSNFDLAEDAKLQLSKDTYDDDLDNLLAQIGDQYADLFLAAKNLSDAILLSDILRVNTEITKAPLSASMIKRYDEHHQDLTLLKALVRQQLPEKYKEIFFDQSKNGYAGYIDGGASQEEFYKFIKPILEKMDGTEELLVKLNREDLLRKQRTFDNGSIPHQIHLGELHAILRRQEDFYPFLKDNREKIEKILTFRIPYYVGPLARGNSRFAWMTRKSEETITPWNFEEVVDKGASAQSFIERMTNFDKNLPNEKVLPKHSLLYEYFTVYNELTKVKYVTEGMRKPAFLSGEQKKAIVDLLFKTNRKVTVKQLKEDYFKKIECFDSVEISGVEDRFNASLGTYHDLLKIIKDKDFLDNEENEDILEDIVLTLTLFEDREMIEERLKTYAHLFDDKVMKQLKRRRYTGWGRLSRKLINGIRDKQSGKTILDFLKSDGFANRNFMQLIHDDSLTFKEDIQKAQVSGQGDSLHEHIANLAGSPAIKKGILQTVKVVDELVKVMGRHKPENIVIEMARENQTTQKGQKNSRERMKRIEEGIKELGSQILKEHPVENTQLQNEKLYLYYLQNGRDMYVDQELDINRLSDYDVDHIVPQSFLKDDSIDNKVLTRSDKARGKSDNVPSEEVVKKMKNYWRQLLNAKLITQRKFDNLTKAERGGLSELDKAGFIKRQLVETRQITKHVAQILDSRMNTKYDENDKLIREVKVITLKSKLVSDFRKDFQFYKVREINNYHHAHDAYLNAVVGTALIKKYPKLESEFVYGDYKVYDVRKMIAKSEQEIGKATAKYFFYSNIMNFFKTEITLANGEIRKRPLIETNGETGEIVWDKGRDFATVRKVLSMPQVNIVKKTEVQTGGFSKESILPKRNSDKLIARKKDWDPKKYGGFDSPTVAYSVLVVAKVEKGKSKKLKSVKELLGITIMERSSFEKNPIDFLEAKGYKEVKKDLIIKLPKYSLFELENGRKRMLASAGELQKGNELALPSKYVNFLYLASHYEKLKGSPEDNEQKQLFVEQHKHYLDEIIEQISEFSKRVILADANLDKVLSAYNKHRDKPIREQAENIIHLFTLTNLGAPAAFKYFDTTIDRKRYTSTKEVLDATLIHQSITGLYETRIDLSQLGGDGGPAPGGGGGSGGIPWLMKKPLQLTTLVPLQEYEERLLKQTMLTGSYKEKLQSLFLKYDALWQHWENQVGHRRIKPHHIATGTVNPRPQKQYPINPKAKASIQTVINDLLKQGVLIQQNSIMNTPVYPVPKPDGKWRMVLDYREVNKTIPLIAAQNQHSAGILSSIFRGKYKTTLDLSNGFWAHSITPESYWLTAFTWLGQQYCWTRLPQGFLNSPALFTADVVDLLKEVPNVQVYVDDIYISHDDPREHLEQLEKVFSLLLNAGYVVSLKKSEIAQHEVEFLGFNITKEGRGLTETFKQKLLNITPPRDLKQLQSILGLLNFARNFIPNFSELVKPLYNIIATANGKYITWTTDNSQQLQNIISMLNSAENLEERNPEVRLIMKVNTSPSAGYIRFYNEFAKRPIMYLNYVYTKAEVKFTNTEKLLTTIHKGLIKALDLGMGQEILVYSPIVSMTKIQKTPLPERKALPIRWITWMSYLEDPRIQFHYDKTLPELQQVPTVTDDIIAKIKHPSEFSMVFYTDGSAIKHPNVNKSHNAGMGIAQVQFKPEFTVINTWSIPLGDHTAQLAEVAAVEFACKKALKIDGPVLIVTDSFYVAESVNKELPYWQSNGFFNNKKKPLKHVSKWKSIADCIQLKPDIIIIHEKGHQPTASTFHTEGNNLADKLATQGSYVVNAGKRTADGSEFEKRTADGSEFESPKKKAKVE

SEQ ID NO: 533 - protein, 2087 aa, synthetic construct
  source 1..2087: note = Description of Artificial Sequence: Synthetic polypeptide
MPAAKRVKLDGGDKKYSIGLDIGTNSVGWAVITDEYKVPSKKFKVLGNTDRHSIKKNLIGALLFDSGETAEATRLKRTARRRYTRRKNRICYLQEIFSNEMAKVDDSFFHRLEESFLVEEDKKHERHPIFGNIVDEVAYHEKYPTIYHLRKKLVDSTDKADLRLIYLALAHMIKFRGHFLIEGDLNPDNSDVDKLFIQLVQTYNQLFEENPINASGVDAKAILSARLSKSRRLENLIAQLPGEKKNGLFGNLIALSLGLTPNFKSNFDLAEDAKLQLSKDTYDDDLDNLLAQIGDQYADLFLAAKNLSDAILLSDILRVNTEITKAPLSASMIKRYDEHHQDLTLLKALVRQQLPEKYKEIFFDQSKNGYAGYIDGGASQEEFYKFIKPILEKMDGTEELLVKLNREDLLRKQRTFDNGSIPHQIHLGELHAILRRQEDFYPFLKDNREKIEKILTFRIPYYVGPLARGNSRFAWMTRKSEETITPWNFEEVVDKGASAQSFIERMTNFDKNLPNEKVLPKHSLLYEYFTVYNELTKVKYVTEGMRKPAFLSGEQKKAIVDLLFKTNRKVTVKQLKEDYFKKIECFDSVEISGVEDRFNASLGTYHDLLKIIKDKDFLDNEENEDILEDIVLTLTLFEDREMIEERLKTYAHLFDDKVMKQLKRRRYTGWGRLSRKLINGIRDKQSGKTILDFLKSDGFANRNFMQLIHDDSLTFKEDIQKAQVSGQGDSLHEHIANLAGSPAIKKGILQTVKVVDELVKVMGRHKPENIVIEMARENQTTQKGQKNSRERMKRIEEGIKELGSQILKEHPVENTQLQNEKLYLYYLQNGRDMYVDQELDINRLSDYDVDHIVPQSFLKDDSIDNKVLTRSDKARGKSDNVPSEEVVKKMKNYWRQLLNAKLITQRKFDNLTKAERGGLSELDKAGFIKRQLVETRQITKHVAQILDSRMNTKYDENDKLIREVKVITLKSKLVSDFRKDFQFYKVREINNYHHAHDAYLNAVVGTALIKKYPKLESEFVYGDYKVYDVRKMIAKSEQEIGKATAKYFFYSNIMNFFKTEITLANGEIRKRPLIETNGETGEIVWDKGRDFATVRKVLSMPQVNIVKKTEVQTGGFSKESILPKRNSDKLIARKKDWDPKKYGGFDSPTVAYSVLVVAKVEKGKSKKLKSVKELLGITIMERSSFEKNPIDFLEAKGYKEVKKDLIIKLPKYSLFELENGRKRMLASAGELQKGNELALPSKYVNFLYLASHYEKLKGSPEDNEQKQLFVEQHKHYLDEIIEQISEFSKRVILADANLDKVLSAYNKHRDKPIREQAENIIHLFTLTNLGAPAAFKYFDTTIDRKRYTSTKEVLDATLIHQSITGLYETRIDLSQLGGDGGGGSGGGEAAAKGGIPWLMKKPLQLTTLVPLQEYEERLLKQTMLTGSYKEKLQSLFLKYDALWQHWENQVGHRRIKPHHIATGTVNPRPQKQYPINPKAKASIQTVINDLLKQGVLIQQNSIMNTPVYPVPKPDGKWRMVLDYREVNKTIPLIAAQNQHSAGILSSIFRGKYKTTLDLSNGFWAHSITPESYWLTAFTWLGQQYCWTRLPQGFLNSPALFTADVVDLLKEVPNVQVYVDDIYISHDDPREHLEQLEKVFSLLLNAGYVVSLKKSEIAQHEVEFLGFNITKEGRGLTETFKQKLLNITPPRDLKQLQSILGLLNFARNFIPNFSELVKPLYNIIATANGKYITWTTDNSQQLQNIISMLNSAENLEERNPEVRLIMKVNTSPSAGYIRFYNEFAKRPIMYLNYVYTKAEVKFTNTEKLLTTIHKGLIKALDLGMGQEILVYSPIVSMTKIQKTPLPERKALPIRWITWMSYLEDPRIQFHYDKTLPELQQVPTVTDDIIAKIKHPSEFSMVFYTDGSAIKHPNVNKSHNAGMGIAQVQFKPEFTVINTWSIPLGDHTAQLAEVAAVEFACKKALKIDGPVLIVTDSFYVAESVNKELPYWQSNGFFNNKKKPLKHVSKWKSIADCIQLKPDIIIIHEKGHQPTASTFHTEGNNLADKLATQGSYVVNAGKRTADGSEFEKRTADGSEFESPKKKAKVE

SEQ ID NO: 534 - protein, 2079 aa, synthetic construct
  source 1..2079: note = Description of Artificial Sequence: Synthetic polypeptide
MPAAKRVKLDGGDKKYSIGLDIGTNSVGWAVITDEYKVPSKKFKVLGNTDRHSIKKNLIGALLFDSGETAEATRLKRTARRRYTRRKNRICYLQEIFSNEMAKVDDSFFHRLEESFLVEEDKKHERHPIFGNIVDEVAYHEKYPTIYHLRKKLVDSTDKADLRLIYLALAHMIKFRGHFLIEGDLNPDNSDVDKLFIQLVQTYNQLFEENPINASGVDAKAILSARLSKSRRLENLIAQLPGEKKNGLFGNLIALSLGLTPNFKSNFDLAEDAKLQLSKDTYDDDLDNLLAQIGDQYADLFLAAKNLSDAILLSDILRVNTEITKAPLSASMIKRYDEHHQDLTLLKALVRQQLPEKYKEIFFDQSKNGYAGYIDGGASQEEFYKFIKPILEKMDGTEELLVKLNREDLLRKQRTFDNGSIPHQIHLGELHAILRRQEDFYPFLKDNREKIEKILTFRIPYYVGPLARGNSRFAWMTRKSEETITPWNFEEVVDKGASAQSFIERMTNFDKNLPNEKVLPKHSLLYEYFTVYNELTKVKYVTEGMRKPAFLSGEQKKAIVDLLFKTNRKVTVKQLKEDYFKKIECFDSVEISGVEDRFNASLGTYHDLLKIIKDKDFLDNEENEDILEDIVLTLTLFEDREMIEERLKTYAHLFDDKVMKQLKRRRYTGWGRLSRKLINGIRDKQSGKTILDFLKSDGFANRNFMQLIHDDSLTFKEDIQKAQVSGQGDSLHEHIANLAGSPAIKKGILQTVKVVDELVKVMGRHKPENIVIEMARENQTTQKGQKNSRERMKRIEEGIKELGSQILKEHPVENTQLQNEKLYLYYLQNGRDMYVDQELDINRLSDYDVDHIVPQSFLKDDSIDNKVLTRSDKARGKSDNVPSEEVVKKMKNYWRQLLNAKLITQRKFDNLTKAERGGLSELDKAGFIKRQLVETRQITKHVAQILDSRMNTKYDENDKLIREVKVITLKSKLVSDFRKDFQFYKVREINNYHHAHDAYLNAVVGTALIKKYPKLESEFVYGDYKVYDVRKMIAKSEQEIGKATAKYFFYSNIMNFFKTEITLANGEIRKRPLIETNGETGEIVWDKGRDFATVRKVLSMPQVNIVKKTEVQTGGFSKESILPKRNSDKLIARKKDWDPKKYGGFDSPTVAYSVLVVAKVEKGKSKKLKSVKELLGITIMERSSFEKNPIDFLEAKGYKEVKKDLIIKLPKYSLFELENGRKRMLASAGELQKGNELALPSKYVNFLYLASHYEKLKGSPEDNEQKQLFVEQHKHYLDEIIEQISEFSKRVILADANLDKVLSAYNKHRDKPIREQAENIIHLFTLTNLGAPAAFKYFDTTIDRKRYTSTKEVLDATLIHQSITGLYETRIDLSQLGGDGGGSSGGIPWLMKKPLQLTTLVPLQEYEERLLKQTMLTGSYKEKLQSLFLKYDALWQHWENQVGHRRIKPHHIATGTVNPRPQKQYPINPKAKASIQTVINDLLKQGVLIQQNSIMNTPVYPVPKPDGKWRMVLDYREVNKTIPLIAAQNQHSAGILSSIFRGKYKTTLDLSNGFWAHSITPESYWLTAFTWLGQQYCWTRLPQGFLNSPALFNADVVDLLKEVPNVQVYVDDIYISHDDPREHLEQLEKVFSLLLNAGYVVSLKKSEIAQHEVEFLGFNITKEGRGLTETFKQKLLNITPPRDLKQLQSILGLLNFARNFIPNFSELVKPLYNIIATAPGKYITWTTDNSQQLQNIISMLNSAENLEERNPEVRLIMKVNTSPSAGYIRFYNEFAKRPIMYLNYVYTKAEVKFTNTEKLLTTIHKGLIKALDLGMGQEILVYSPIVSMTKIQKTPLPERKALPIRWITWMSYLEDPRIQFHYDKTLPELQQVPTVTDDIIAKIKHPSEFSMVFYTDGSAIKHPNVNKSHNAGMGIAQVQFKPEFTVINTWSIPLGDHTAQLAEVAAVEFACKKALKIDGPVLIVTDSFYVAESVNKELPYWQSNGFFNNKKKPLKHVSKWKSIADCIQLKPDIIIIHEKGHQPTASTFHTEGNNLADKLATQGSYVVNAGKRTADGSEFEKRTADGSEFESPKKKAKVE

SEQ ID NO: 535 - protein, 2082 aa, synthetic construct
  source 1..2082: note = Description of Artificial Sequence: Synthetic polypeptide
MPAAKRVKLDGGDKKYSIGLDIGTNSVGWAVITDEYKVPSKKFKVLGNTDRHSIKKNLIGALLFDSGETAEATRLKRTARRRYTRRKNRICYLQEIFSNEMAKVDDSFFHRLEESFLVEEDKKHERHPIFGNIVDEVAYHEKYPTIYHLRKKLVDSTDKADLRLIYLALAHMIKFRGHFLIEGDLNPDNSDVDKLFIQLVQTYNQLFEENPINASGVDAKAILSARLSKSRRLENLIAQLPGEKKNGLFGNLIALSLGLTPNFKSNFDLAEDAKLQLSKDTYDDDLDNLLAQIGDQYADLFLAAKNLSDAILLSDILRVNTEITKAPLSASMIKRYDEHHQDLTLLKALVRQQLPEKYKEIFFDQSKNGYAGYIDGGASQEEFYKFIKPILEKMDGTEELLVKLNREDLLRKQRTFDNGSIPHQIHLGELHAILRRQEDFYPFLKDNREKIEKILTFRIPYYVGPLARGNSRFAWMTRKSEETITPWNFEEVVDKGASAQSFIERMTNFDKNLPNEKVLPKHSLLYEYFTVYNELTKVKYVTEGMRKPAFLSGEQKKAIVDLLFKTNRKVTVKQLKEDYFKKIECFDSVEISGVEDRFNASLGTYHDLLKIIKDKDFLDNEENEDILEDIVLTLTLFEDREMIEERLKTYAHLFDDKVMKQLKRRRYTGWGRLSRKLINGIRDKQSGKTILDFLKSDGFANRNFMQLIHDDSLTFKEDIQKAQVSGQGDSLHEHIANLAGSPAIKKGILQTVKVVDELVKVMGRHKPENIVIEMARENQTTQKGQKNSRERMKRIEEGIKELGSQILKEHPVENTQLQNEKLYLYYLQNGRDMYVDQELDINRLSDYDVDHIVPQSFLKDDSIDNKVLTRSDKARGKSDNVPSEEVVKKMKNYWRQLLNAKLITQRKFDNLTKAERGGLSELDKAGFIKRQLVETRQITKHVAQILDSRMNTKYDENDKLIREVKVITLKSKLVSDFRKDFQFYKVREINNYHHAHDAYLNAVVGTALIKKYPKLESEFVYGDYKVYDVRKMIAKSEQEIGKATAKYFFYSNIMNFFKTEITLANGEIRKRPLIETNGETGEIVWDKGRDFATVRKVLSMPQVNIVKKTEVQTGGFSKESILPKRNSDKLIARKKDWDPKKYGGFDSPTVAYSVLVVAKVEKGKSKKLKSVKELLGITIMERSSFEKNPIDFLEAKGYKEVKKDLIIKLPKYSLFELENGRKRMLASAGELQKGNELALPSKYVNFLYLASHYEKLKGSPEDNEQKQLFVEQHKHYLDEIIEQISEFSKRVILADANLDKVLSAYNKHRDKPIREQAENIIHLFTLTNLGAPAAFKYFDTTIDRKRYTSTKEVLDATLIHQSITGLYETRIDLSQLGGDGGPAPGSSGGIPWLMKKPLQLTTLVPLQEYEERLLKQTMLTGSYKEKLQSLFLKYDALWQHWENQVGHRRIKPHHIATGTVNPRPQKQYPINPKAKASIQTVINDLLKQGVLIQQNSIMNTPVYPVPKPDGKWRMVLDYREVNKTIPLIAAQNQHSAGILSSIFRGKYKTTLDLSNGFWAHSITPESYWLTAFTWLGQQYCWTRLPQGFLNSPALFNADVVDLLKEVPNVQVYVDDIYISHDDPREHLEQLEKVFSLLLNAGYVVSLKKSEIAQHEVEFLGFNITKEGRGLTETFKQKLLNITPPRDLKQLQSILGLLNFARNFIPNFSELVKPLYNIIATAPGKYITWTTDNSQQLQNIISMLNSAENLEERNPEVRLIMKVNTSPSAGYIRFYNEFAKRPIMYLNYVYTKAEVKFTNTEKLLTTIHKGLIKALDLGMGQEILVYSPIVSMTKIQKTPLPERKALPIRWITWMSYLEDPRIQFHYDKTLPELQQVPTVTDDIIAKIKHPSEFSMVFYTDGSAIKHPNVNKSHNAGMGIAQVQFKPEFTVINTWSIPLGDHTAQLAEVAAVEFACKKALKIDGPVLIVTDSFYVAESVNKELPYWQSNGFFNNKKKPLKHVSKWKSIADCIQLKPDIIIIHEKGHQPTASTFHTEGNNLADKLATQGSYVVNAGKRTADGSEFEKRTADGSEFESPKKKAKVE

SEQ ID NO: 536 - protein, 2087 aa, synthetic construct
  source 1..2087: note = Description of Artificial Sequence: Synthetic polypeptide
MPAAKRVKLDGGDKKYSIGLDIGTNSVGWAVITDEYKVPSKKFKVLGNTDRHSIKKNLIGALLFDSGETAEATRLKRTARRRYTRRKNRICYLQEIFSNEMAKVDDSFFHRLEESFLVEEDKKHERHPIFGNIVDEVAYHEKYPTIYHLRKKLVDSTDKADLRLIYLALAHMIKFRGHFLIEGDLNPDNSDVDKLFIQLVQTYNQLFEENPINASGVDAKAILSARLSKSRRLENLIAQLPGEKKNGLFGNLIALSLGLTPNFKSNFDLAEDAKLQLSKDTYDDDLDNLLAQIGDQYADLFLAAKNLSDAILLSDILRVNTEITKAPLSASMIKRYDEHHQDLTLLKALVRQQLPEKYKEIFFDQSKNGYAGYIDGGASQEEFYKFIKPILEKMDGTEELLVKLNREDLLRKQRTFDNGSIPHQIHLGELHAILRRQEDFYPFLKDNREKIEKILTFRIPYYVGPLARGNSRFAWMTRKSEETITPWNFEEVVDKGASAQSFIERMTNFDKNLPNEKVLPKHSLLYEYFTVYNELTKVKYVTEGMRKPAFLSGEQKKAIVDLLFKTNRKVTVKQLKEDYFKKIECFDSVEISGVEDRFNASLGTYHDLLKIIKDKDFLDNEENEDILEDIVLTLTLFEDREMIEERLKTYAHLFDDKVMKQLKRRRYTGWGRLSRKLINGIRDKQSGKTILDFLKSDGFANRNFMQLIHDDSLTFKEDIQKAQVSGQGDSLHEHIANLAGSPAIKKGILQTVKVVDELVKVMGRHKPENIVIEMARENQTTQKGQKNSRERMKRIEEGIKELGSQILKEHPVENTQLQNEKLYLYYLQNGRDMYVDQELDINRLSDYDVDHIVPQSFLKDDSIDNKVLTRSDKARGKSDNVPSEEVVKKMKNYWRQLLNAKLITQRKFDNLTKAERGGLSELDKAGFIKRQLVETRQITKHVAQILDSRMNTKYDENDKLIREVKVITLKSKLVSDFRKDFQFYKVREINNYHHAHDAYLNAVVGTALIKKYPKLESEFVYGDYKVYDVRKMIAKSEQEIGKATAKYFFYSNIMNFFKTEITLANGEIRKRPLIETNGETGEIVWDKGRDFATVRKVLSMPQVNIVKKTEVQTGGFSKESILPKRNSDKLIARKKDWDPKKYGGFDSPTVAYSVLVVAKVEKGKSKKLKSVKELLGITIMERSSFEKNPIDFLEAKGYKEVKKDLIIKLPKYSLFELENGRKRMLASAGELQKGNELALPSKYVNFLYLASHYEKLKGSPEDNEQKQLFVEQHKHYLDEIIEQISEFSKRVILADANLDKVLSAYNKHRDKPIREQAENIIHLFTLTNLGAPAAFKYFDTTIDRKRYTSTKEVLDATLIHQSITGLYETRIDLSQLGGDGGGSSGGSEAAAKGGIPWLMKKPLQLTTLVPLQEYEERLLKQTMLTGSYKEKLQSLFLKYDALWQHWENQVGHRRIKPHHIATGTVNPRPQKQYPINPKAKASIQTVINDLLKQGVLIQQNSIMNTPVYPVPKPDGKWRMVLDYREVNKTIPLIAAQNQHSAGILSSIFRGKYKTTLDLSNGFWAHSITPESYWLTAFTWLGQQYCWTRLPQGFLNSPALFNADVVDLLKEVPNVQVYVDDIYISHDDPREHLEQLEKVFSLLLNAGYVVSLKKSEIAQHEVEFLGFNITKEGRGLTETFKQKLLNITPPRDLKQLQSILGLLNFARNFIPNFSELVKPLYNIIATAPGKYITWTTDNSQQLQNIISMLNSAENLEERNPEVRLIMKVNTSPSAGYIRFYNEFAKRPIMYLNYVYTKAEVKFTNTEKLLTTIHKGLIKALDLGMGQEILVYSPIVSMTKIQKTPLPERKALPIRWITWMSYLEDPRIQFHYDKTLPELQQVPTVTDDIIAKIKHPSEFSMVFYTDGSAIKHPNVNKSHNAGMGIAQVQFKPEFTVINTWSIPLGDHTAQLAEVAAVEFACKKALKIDGPVLIVTDSFYVAESVNKELPYWQSNGFFNNKKKPLKHVSKWKSIADCIQLKPDIIIIHEKGHQPTASTFHTEGNNLADKLATQGSYVVNAGKRTADGSEFEKRTADGSEFESPKKKAKVE

SEQ ID NO: 537 - protein, 2087 aa, synthetic construct
  source 1..2087: note = Description of Artificial Sequence: Synthetic polypeptide
MPAAKRVKLDGGDKKYSIGLDIGTNSVGWAVITDEYKVPSKKFKVLGNTDRHSIKKNLIGALLFDSGETAEATRLKRTARRRYTRRKNRICYLQEIFSNEMAKVDDSFFHRLEESFLVEEDKKHERHPIFGNIVDEVAYHEKYPTIYHLRKKLVDSTDKADLRLIYLALAHMIKFRGHFLIEGDLNPDNSDVDKLFIQLVQTYNQLFEENPINASGVDAKAILSARLSKSRRLENLIAQLPGEKKNGLFGNLIALSLGLTPNFKSNFDLAEDAKLQLSKDTYDDDLDNLLAQIGDQYADLFLAAKNLSDAILLSDILRVNTEITKAPLSASMIKRYDEHHQDLTLLKALVRQQLPEKYKEIFFDQSKNGYAGYIDGGASQEEFYKFIKPILEKMDGTEELLVKLNREDLLRKQRTFDNGSIPHQIHLGELHAILRRQEDFYPFLKDNREKIEKILTFRIPYYVGPLARGNSRFAWMTRKSEETITPWNFEEVVDKGASAQSFIERMTNFDKNLPNEKVLPKHSLLYEYFTVYNELTKVKYVTEGMRKPAFLSGEQKKAIVDLLFKTNRKVTVKQLKEDYFKKIECFDSVEISGVEDRFNASLGTYHDLLKIIKDKDFLDNEENEDILEDIVLTLTLFEDREMIEERLKTYAHLFDDKVMKQLKRRRYTGWGRLSRKLINGIRDKQSGKTILDFLKSDGFANRNFMQLIHDDSLTFKEDIQKAQVSGQGDSLHEHIANLAGSPAIKKGILQTVKVVDELVKVMGRHKPENIVIEMARENQTTQKGQKNSRERMKRIEEGIKELGSQILKEHPVENTQLQNEKLYLYYLQNGRDMYVDQELDINRLSDYDVDHIVPQSFLKDDSIDNKVLTRSDKARGKSDNVPSEEVVKKMKNYWRQLLNAKLITQRKFDNLTKAERGGLSELDKAGFIKRQLVETRQITKHVAQILDSRMNTKYDENDKLIREVKVITLKSKLVSDFRKDFQFYKVREINNYHHAHDAYLNAVVGTALIKKYPKLESEFVYGDYKVYDVRKMIAKSEQEIGKATAKYFFYSNIMNFFKTEITLANGEIRKRPLIETNGETGEIVWDKGRDFATVRKVLSMPQVNIVKKTEVQTGGFSKESILPKRNSDKLIARKKDWDPKKYGGFDSPTVAYSVLVVAKVEKGKSKKLKSVKELLGITIMERSSFEKNPIDFLEAKGYKEVKKDLIIKLPKYSLFELENGRKRMLASAGELQKGNELALPSKYVNFLYLASHYEKLKGSPEDNEQKQLFVEQHKHYLDEIIEQISEFSKRVILADANLDKVLSAYNKHRDKPIREQAENIIHLFTLTNLGAPAAFKYFDTTIDRKRYTSTKEVLDATLIHQSITGLYETRIDLSQLGGDGGGSSPAPEAAAKGGIPWLMKKPLQLTTLVPLQEYEERLLKQTMLTGSYKEKLQSLFLKYDALWQHWENQVGHRRIKPHHIATGTVNPRPQKQYPINPKAKASIQTVINDLLKQGVLIQQNSIMNTPVYPVPKPDGKWRMVLDYREVNKTIPLIAAQNQHSAGILSSIFRGKYKTTLDLSNGFWAHSITPESYWLTAFTWLGQQYCWTRLPQGFLNSPALFNADVVDLLKEVPNVQVYVDDIYISHDDPREHLEQLEKVFSLLLNAGYVVSLKKSEIAQHEVEFLGFNITKEGRGLTETFKQKLLNITPPRDLKQLQSILGLLNFARNFIPNFSELVKPLYNIIATAPGKYITWTTDNSQQLQNIISMLNSAENLEERNPEVRLIMKVNTSPSAGYIRFYNEFAKRPIMYLNYVYTKAEVKFTNTEKLLTTIHKGLIKALDLGMGQEILVYSPIVSMTKIQKTPLPERKALPIRWITWMSYLEDPRIQFHYDKTLPELQQVPTVTDDIIAKIKHPSEFSMVFYTDGSAIKHPNVNKSHNAGMGIAQVQFKPEFTVINTWSIPLGDHTAQLAEVAAVEFACKKALKIDGPVLIVTDSFYVAESVNKELPYWQSNGFFNNKKKPLKHVSKWKSIADCIQLKPDIIIIHEKGHQPTASTFHTEGNNLADKLATQGSYVVNAGKRTADGSEFEKRTADGSEFESPKKKAKVE

SEQ ID NO: 538 - protein, 2087 aa, synthetic construct
  source 1..2087: note = Description of Artificial Sequence: Synthetic polypeptide
MPAAKRVKLDGGDKKYSIGLDIGTNSVGWAVITDEYKVPSKKFKVLGNTDRHSIKKNLIGALLFDSGETAEATRLKRTARRRYTRRKNRICYLQEIFSNEMAKVDDSFFHRLEESFLVEEDKKHERHPIFGNIVDEVAYHEKYPTIYHLRKKLVDSTDKADLRLIYLALAHMIKFRGHFLIEGDLNPDNSDVDKLFIQLVQTYNQLFEENPINASGVDAKAILSARLSKSRRLENLIAQLPGEKKNGLFGNLIALSLGLTPNFKSNFDLAEDAKLQLSKDTYDDDLDNLLAQIGDQYADLFLAAKNLSDAILLSDILRVNTEITKAPLSASMIKRYDEHHQDLTLLKALVRQQLPEKYKEIFFDQSKNGYAGYIDGGASQEEFYKFIKPILEKMDGTEELLVKLNREDLLRKQRTFDNGSIPHQIHLGELHAILRRQEDFYPFLKDNREKIEKILTFRIPYYVGPLARGNSRFAWMTRKSEETITPWNFEEVVDKGASAQSFIERMTNFDKNLPNEKVLPKHSLLYEYFTVYNELTKVKYVTEGMRKPAFLSGEQKKAIVDLLFKTNRKVTVKQLKEDYFKKIECFDSVEISGVEDRFNASLGTYHDLLKIIKDKDFLDNEENEDILEDIVLTLTLFEDREMIEERLKTYAHLFDDKVMKQLKRRRYTGWGRLSRKLINGIRDKQSGKTILDFLKSDGFANRNFMQLIHDDSLTFKEDIQKAQVSGQGDSLHEHIANLAGSPAIKKGILQTVKVVDELVKVMGRHKPENIVIEMARENQTTQKGQKNSRERMKRIEEGIKELGSQILKEHPVENTQLQNEKLYLYYLQNGRDMYVDQELDINRLSDYDVDHIVPQSFLKDDSIDNKVLTRSDKARGKSDNVPSEEVVKKMKNYWRQLLNAKLITQRKFDNLTKAERGGLSELDKAGFIKRQLVETRQITKHVAQILDSRMNTKYDENDKLIREVKVITLKSKLVSDFRKDFQFYKVREINNYHHAHDAYLNAVVGTALIKKYPKLESEFVYGDYKVYDVRKMIAKSEQEIGKATAKYFFYSNIMNFFKTEITLANGEIRKRPLIETNGETGEIVWDKGRDFATVRKVLSMPQVNIVKKTEVQTGGFSKESILPKRNSDKLIARKKDWDPKKYGGFDSPTVAYSVLVVAKVEKGKSKKLKSVKELLGITIMERSSFEKNPIDFLEAKGYKEVKKDLIIKLPKYSLFELENGRKRMLASAGELQKGNELALPSKYVNFLYLASHYEKLKGSPEDNEQKQLFVEQHKHYLDEIIEQISEFSKRVILADANLDKVLSAYNKHRDKPIREQAENIIHLFTLTNLGAPAAFKYFDTTIDRKRYTSTKEVLDATLIHQSITGLYETRIDLSQLGGDGGPAPEAAAKGGSGGIPWLMKKPLQLTTLVPLQEYEERLLKQTMLTGSYKEKLQSLFLKYDALWQHWENQVGHRRIKPHHIATGTVNPRPQKQYPINPKAKASIQTVINDLLKQGVLIQQNSIMNTPVYPVPKPDGKWRMVLDYREVNKTIPLIAAQNQHSAGILSSIFRGKYKTTLDLSNGFWAHSITPESYWLTAFTWLGQQYCWTRLPQGFLNSPALFNADVVDLLKEVPNVQVYVDDIYISHDDPREHLEQLEKVFSLLLNAGYVVSLKKSEIAQHEVEFLGFNITKEGRGLTETFKQKLLNITPPRDLKQLQSILGLLNFARNFIPNFSELVKPLYNIIATAPGKYITWTTDNSQQLQNIISMLNSAENLEERNPEVRLIMKVNTSPSAGYIRFYNEFAKRPIMYLNYVYTKAEVKFTNTEKLLTTIHKGLIKALDLGMGQEILVYSPIVSMTKIQKTPLPERKALPIRWITWMSYLEDPRIQFHYDKTLPELQQVPTVTDDIIAKIKHPSEFSMVFYTDGSAIKHPNVNKSHNAGMGIAQVQFKPEFTVINTWSIPLGDHTAQLAEVAAVEFACKKALKIDGPVLIVTDSFYVAESVNKELPYWQSNGFFNNKKKPLKHVSKWKSIADCIQLKPDIIIIHEKGHQPTASTFHTEGNNLADKLATQGSYVVNAGKRTADGSEFEKRTADGSEFESPKKKAKVE

SEQ ID NO: 539 - protein, 2096 aa, synthetic construct
  source 1..2096: note = Description of Artificial Sequence: Synthetic polypeptide
MPAAKRVKLDGGDKKYSIGLDIGTNSVGWAVITDEYKVPSKKFKVLGNTDRHSIKKNLIGALLFDSGETAEATRLKRTARRRYTRRKNRICYLQEIFSNEMAKVDDSFFHRLEESFLVEEDKKHERHPIFGNIVDEVAYHEKYPTIYHLRKKLVDSTDKADLRLIYLALAHMIKFRGHFLIEGDLNPDNSDVDKLFIQLVQTYNQLFEENPINASGVDAKAILSARLSKSRRLENLIAQLPGEKKNGLFGNLIALSLGLTPNFKSNFDLAEDAKLQLSKDTYDDDLDNLLAQIGDQYADLFLAAKNLSDAILLSDILRVNTEITKAPLSASMIKRYDEHHQDLTLLKALVRQQLPEKYKEIFFDQSKNGYAGYIDGGASQEEFYKFIKPILEKMDGTEELLVKLNREDLLRKQRTFDNGSIPHQIHLGELHAILRRQEDFYPFLKDNREKIEKILTFRIPYYVGPLARGNSRFAWMTRKSEETITPWNFEEVVDKGASAQSFIERMTNFDKNLPNEKVLPKHSLLYEYFTVYNELTKVKYVTEGMRKPAFLSGEQKKAIVDLLFKTNRKVTVKQLKEDYFKKIECFDSVEISGVEDRFNASLGTYHDLLKIIKDKDFLDNEENEDILEDIVLTLTLFEDREMIEERLKTYAHLFDDKVMKQLKRRRYTGWGRLSRKLINGIRDKQSGKTILDFLKSDGFANRNFMQLIHDDSLTFKEDIQKAQVSGQGDSLHEHIANLAGSPAIKKGILQTVKVVDELVKVMGRHKPENIVIEMARENQTTQKGQKNSRERMKRIEEGIKELGSQILKEHPVENTQLQNEKLYLYYLQNGRDMYVDQELDINRLSDYDVDHIVPQSFLKDDSIDNKVLTRSDKARGKSDNVPSEEVVKKMKNYWRQLLNAKLITQRKFDNLTKAERGGLSELDKAGFIKRQLVETRQITKHVAQILDSRMNTKYDENDKLIREVKVITLKSKLVSDFRKDFQFYKVREINNYHHAHDAYLNAVVGTALIKKYPKLESEFVYGDYKVYDVRKMIAKSEQEIGKATAKYFFYSNIMNFFKTEITLANGEIRKRPLIETNGETGEIVWDKGRDFATVRKVLSMPQVNIVKKTEVQTGGFSKESILPKRNSDKLIARKKDWDPKKYGGFDSPTVAYSVLVVAKVEKGKSKKLKSVKELLGITIMERSSFEKNPIDFLEAKGYKEVKKDLIIKLPKYSLFELENGRKRMLASAGELQKGNELALPSKYVNFLYLASHYEKLKGSPEDNEQKQLFVEQHKHYLDEIIEQISEFSKRVILADANLDKVLSAYNKHRDKPIREQAENIIHLFTLTNLGAPAAFKYFDTTIDRKRYTSTKEVLDATLIHQSITGLYETRIDLSQLGGDGGEAAAKEAAAKEAAAKEAAAKGGIPWLMKKPLQLTTLVPLQEYEERLLKQTMLTGSYKEKLQSLFLKYDALWQHWENQVGHRRIKPHHIATGTVNPRPQKQYPINPKAKASIQTVINDLLKQGVLIQQNSIMNTPVYPVPKPDGKWRMVLDYREVNKTIPLIAAQNQHSAGILSSIFRGKYKTTLDLSNGFWAHSITPESYWLTAFTWLGQQYCWTRLPQGFLNSPALFNADVVDLLKEVPNVQVYVDDIYISHDDPREHLEQLEKVFSLLLNAGYVVSLKKSEIAQHEVEFLGFNITKEGRGLTETFKQKLLNITPPRDLKQLQSILGLLNFARNFIPNFSELVKPLYNIIATAPGKYITWTTDNSQQLQNIISMLNSAENLEERNPEVRLIMKVNTSPSAGYIRFYNEFAKRPIMYLNYVYTKAEVKFTNTEKLLTTIHKGLIKALDLGMGQEILVYSPIVSMTKIQKTPLPERKALPIRWITWMSYLEDPRIQFHYDKTLPELQQVPTVTDDIIAKIKHPSEFSMVFYTDGSAIKHPNVNKSHNAGMGIAQVQFKPEFTVINTWSIPLGDHTAQLAEVAAVEFACKKALKIDGPVLIVTDSFYVAESVNKELPYWQSNGFFNNKKKPLKHVSKWKSIADCIQLKPDIIIIHEKGHQPTASTFHTEGNNLADKLATQGSYVVNAGKRTADGSEFEKRTADGSEFESPKKKAKVE

SEQ ID NO: 540 - protein, 2085 aa, synthetic construct
  source 1..2085: note = Description of Artificial Sequence: Synthetic polypeptide
MPAAKRVKLDGGDKKYSIGLDIGTNSVGWAVITDEYKVPSKKFKVLGNTDRHSIKKNLIGALLFDSGETAEATRLKRTARRRYTRRKNRICYLQEIFSNEMAKVDDSFFHRLEESFLVEEDKKHERHPIFGNIVDEVAYHEKYPTIYHLRKKLVDSTDKADLRLIYLALAHMIKFRGHFLIEGDLNPDNSDVDKLFIQLVQTYNQLFEENPINASGVDAKAILSARLSKSRRLENLIAQLPGEKKNGLFGNLIALSLGLTPNFKSNFDLAEDAKLQLSKDTYDDDLDNLLAQIGDQYADLFLAAKNLSDAILLSDILRVNTEITKAPLSASMIKRYDEHHQDLTLLKALVRQQLPEKYKEIFFDQSKNGYAGYIDGGASQEEFYKFIKPILEKMDGTEELLVKLNREDLLRKQRTFDNGSIPHQIHLGELHAILRRQEDFYPFLKDNREKIEKILTFRIPYYVGPLARGNSRFAWMTRKSEETITPWNFEEVVDKGASAQSFIERMTNFDKNLPNEKVLPKHSLLYEYFTVYNELTKVKYVTEGMRKPAFLSGEQKKAIVDLLFKTNRKVTVKQLKEDYFKKIECFDSVEISGVEDRFNASLGTYHDLLKIIKDKDFLDNEENEDILEDIVLTLTLFEDREMIEERLKTYAHLFDDKVMKQLKRRRYTGWGRLSRKLINGIRDKQSGKTILDFLKSDGFANRNFMQLIHDDSLTFKEDIQKAQVSGQGDSLHEHIANLAGSPAIKKGILQTVKVVDELVKVMGRHKPENIVIEMARENQTTQKGQKNSRERMKRIEEGIKELGSQILKEHPVENTQLQNEKLYLYYLQNGRDMYVDQELDINRLSDYDVDHIVPQSFLKDDSIDNKVLTRSDKARGKSDNVPSEEVVKKMKNYWRQLLNAKLITQRKFDNLTKAERGGLSELDKAGFIKRQLVETRQITKHVAQILDSRMNTKYDENDKLIREVKVITLKSKLVSDFRKDFQFYKVREINNYHHAHDAYLNAVVGTALIKKYPKLESEFVYGDYKVYDVRKMIAKSEQEIGKATAKYFFYSNIMNFFKTEITLANGEIRKRPLIETNGETGEIVWDKGRDFATVRKVLSMPQVNIVKKTEVQTGGFSKESILPKRNSDKLIARKKDWDPKKYGGFDSPTVAYSVLVVAKVEKGKSKKLKSVKELLGITIMERSSFEKNPIDFLEAKGYKEVKKDLIIKLPKYSLFELENGRKRMLASAGELQKGNELALPSKYVNFLYLASHYEKLKGSPEDNEQKQLFVEQHKHYLDEIIEQISEFSKRVILADANLDKVLSAYNKHRDKPIREQAENIIHLFTLTNLGAPAAFKYFDTTIDRKRYTSTKEVLDATLIHQSITGLYETRIDLSQLGGDGGGGSPAPGSSGGIPWLMKKPLQLTTLVPLQEYEERLLKQTMLTGSYKEKLQSLFLKYDALWQHWENQVGHRRIKPHHIATGTVNPRPQKQYPINPKAKASIQTVINDLLKQGVLIQQNSIMNTPVYPVPKPDGKWRMVLDYREVNKTIPLIAAQNQHSAGILSSIFRGKYKTTLDLSNGFWAHSITPESYWLTAFTWLGQQYCWTRLPQGFLNSPALFNADVVDLLKEVPNVQVYVDDIYISHDDPREHLEQLEKVFSLLLNAGYVVSLKKSEIAQHEVEFLGFNITKEGRGLTETFKQKLLNITPPRDLKQLQSILGLLNFARNFIPNFSELVKPLYNIIATAPGKYITWTTDNSQQLQNIISMLNSAENLEERNPEVRLIMKVNTSPSAGYIRFYNEFAKRPIMYLNYVYTKAEVKFTNTEKLLTTIHKGLIKALDLGMGQEILVYSPIVSMTKIQKTPLPERKALPIRWITWMSYLEDPRIQFHYDKTLPELQQVPTVTDDIIAKIKHPSEFSMVFYTDGSAIKHPNVNKSHNAGMGIAQVQFKPEFTVINTWSIPLGDHTAQLAEVAAVEFACKKALKIDGPVLIVTDSFYVAESVNKELPYWQSNGFFNNKKKPLKHVSKWKSIADCIQLKPDIIIIHEKGHQPTASTFHTEGNNLADKLATQGSYVVNAGKRTADGSEFEKRTADGSEFESPKKKAKVE

SEQ ID NO: 541 - protein, 2091 aa, synthetic construct
  source 1..2091: note = Description of Artificial Sequence: Synthetic polypeptide
MPAAKRVKLDGGDKKYSIGLDIGTNSVGWAVITDEYKVPSKKFKVLGNTDRHSIKKNLIGALLFDSGETAEATRLKRTARRRYTRRKNRICYLQEIFSNEMAKVDDSFFHRLEESFLVEEDKKHERHPIFGNIVDEVAYHEKYPTIYHLRKKLVDSTDKADLRLIYLALAHMIKFRGHFLIEGDLNPDNSDVDKLFIQLVQTYNQLFEENPINASGVDAKAILSARLSKSRRLENLIAQLPGEKKNGLFGNLIALSLGLTPNFKSNFDLAEDAKLQLSKDTYDDDLDNLLAQIGDQYADLFLAAKNLSDAILLSDILRVNTEITKAPLSASMIKRYDEHHQDLTLLKALVRQQLPEKYKEIFFDQSKNGYAGYIDGGASQEEFYKFIKPILEKMDGTEELLVKLNREDLLRKQRTFDNGSIPHQIHLGELHAILRRQEDFYPFLKDNREKIEKILTFRIPYYVGPLARGNSRFAWMTRKSEETITPWNFEEVVDKGASAQSFIERMTNFDKNLPNEKVLPKHSLLYEYFTVYNELTKVKYVTEGMRKPAFLSGEQKKAIVDLLFKTNRKVTVKQLKEDYFKKIECFDSVEISGVEDRFNASLGTYHDLLKIIKDKDFLDNEENEDILEDIVLTLTLFEDREMIEERLKTYAHLFDDKVMKQLKRRRYTGWGRLSRKLINGIRDKQSGKTILDFLKSDGFANRNFMQLIHDDSLTFKEDIQKAQVSGQGDSLHEHIANLAGSPAIKKGILQTVKVVDELVKVMGRHKPENIVIEMARENQTTQKGQKNSRERMKRIEEGIKELGSQILKEHPVENTQLQNEKLYLYYLQNGRDMYVDQELDINRLSDYDVDHIVPQSFLKDDSIDNKVLTRSDKARGKSDNVPSEEVVKKMKNYWRQLLNAKLITQRKFDNLTKAERGGLSELDKAGFIKRQLVETRQITKHVAQILDSRMNTKYDENDKLIREVKVITLKSKLVSDFRKDFQFYKVREINNYHHAHDAYLNAVVGTALIKKYPKLESEFVYGDYKVYDVRKMIAKSEQEIGKATAKYFFYSNIMNFFKTEITLANGEIRKRPLIETNGETGEIVWDKGRDFATVRKVLSMPQVNIVKKTEVQTGGFSKESILPKRNSDKLIARKKDWDPKKYGGFDSPTVAYSVLVVAKVEKGKSKKLKSVKELLGITIMERSSFEKNPIDFLEAKGYKEVKKDLIIKLPKYSLFELENGRKRMLASAGELQKGNELALPSKYVNFLYLASHYEKLKGSPEDNEQKQLFVEQHKHYLDEIIEQISEFSKRVILADANLDKVLSAYNKHRDKPIREQAENIIHLFTLTNLGAPAAFKYFDTTIDRKRYTSTKEVLDATLIHQSITGLYETRIDLSQLGGDGGEAAAKGGGGSEAAAKGGIPWLMKKPLQLTTLVPLQEYEERLLKQTMLTGSYKEKLQSLFLKYDALWQHWENQVGHRRIKPHHIATGTVNPRPQKQYPINPKAKASIQTVINDLLKQGVLIQQNSIMNTPVYPVPKPDGKWRMVLDYREVNKTIPLIAAQNQHSAGILSSIFRGKYKTTLDLSNGFWAHSITPESYWLTAFTWLGQQYCWTRLPQGFLNSPALFNADVVDLLKEVPNVQVYVDDIYISHDDPREHLEQLEKVFSLLLNAGYVVSLKKSEIAQHEVEFLGFNITKEGRGLTETFKQKLLNITPPRDLKQLQSILGLLNFARNFIPNFSELVKPLYNIIATAPGKYITWTTDNSQQLQNIISMLNSAENLEERNPEVRLIMKVNTSPSAGYIRFYNEFAKRPIMYLNYVYTKAEVKFTNTEKLLTTIHKGLIKALDLGMGQEILVYSPIVSMTKIQKTPLPERKALPIRWITWMSYLEDPRIQFHYDKTLPELQQVPTVTDDIIAKIKHPSEFSMVFYTDGSAIKHPNVNKSHNAGMGIAQVQFKPEFTVINTWSIPLGDHTAQLAEVAAVEFACKKALKIDGPVLIVTDSFYVAESVNKELPYWQSNGFFNNKKKPLKHVSKWKSIADCIQLKPDIIIIHEKGHQPTASTFHTEGNNLADKLATQGSYVVNAGKRTADGSEFEKRTADGSEFESPKKKAKVE

SEQ ID NO: 542 - protein, 2085 aa, synthetic construct
  source 1..2085: note = Description of Artificial Sequence: Synthetic polypeptide
MPAAKRVKLDGGDKKYSIGLDIGTNSVGWAVITDEYKVPSKKFKVLGNTDRHSIKKNLIGALLFDSGETAEATRLKRTARRRYTRRKNRICYLQEIFSNEMAKVDDSFFHRLEESFLVEEDKKHERHPIFGNIVDEVAYHEKYPTIYHLRKKLVDSTDKADLRLIYLALAHMIKFRGHFLIEGDLNPDNSDVDKLFIQLVQTYNQLFEENPINASGVDAKAILSARLSKSRRLENLIAQLPGEKKNGLFGNLIALSLGLTPNFKSNFDLAEDAKLQLSKDTYDDDLDNLLAQIGDQYADLFLAAKNLSDAILLSDILRVNTEITKAPLSASMIKRYDEHHQDLTLLKALVRQQLPEKYKEIFFDQSKNGYAGYIDGGASQEEFYKFIKPILEKMDGTEELLVKLNREDLLRKQRTFDNGSIPHQIHLGELHAILRRQEDFYPFLKDNREKIEKILTFRIPYYVGPLARGNSRFAWMTRKSEETITPWNFEEVVDKGASAQSFIERMTNFDKNLPNEKVLPKHSLLYEYFTVYNELTKVKYVTEGMRKPAFLSGEQKKAIVDLLFKTNRKVTVKQLKEDYFKKIECFDSVEISGVEDRFNASLGTYHDLLKIIKDKDFLDNEENEDILEDIVLTLTLFEDREMIEERLKTYAHLFDDKVMKQLKRRRYTGWGRLSRKLINGIRDKQSGKTILDFLKSDGFANRNFMQLIHDDSLTFKEDIQKAQVSGQGDSLHEHIANLAGSPAIKKGILQTVKVVDELVKVMGRHKPENIVIEMARENQTTQKGQKNSRERMKRIEEGIKELGSQILKEHPVENTQLQNEKLYLYYLQNGRDMYVDQELDINRLSDYDVDHIVPQSFLKDDSIDNKVLTRSDKARGKSDNVPSEEVVKKMKNYWRQLLNAKLITQRKFDNLTKAERGGLSELDKAGFIKRQLVETRQITKHVAQILDSRMNTKYDENDKLIREVKVITLKSKLVSDFRKDFQFYKVREINNYHHAHDAYLNAVVGTALIKKYPKLESEFVYGDYKVYDVRKMIAKSEQEIGKATAKYFFYSNIMNFFKTEITLANGEIRKRPLIETNGETGEIVWDKGRDFATVRKVLSMPQVNIVKKTEVQTGGFSKESILPKRNSDKLIARKKDWDPKKYGGFDSPTVAYSVLVVAKVEKGKSKKLKSVKELLGITIMERSSFEKNPIDFLEAKGYKEVKKDLIIKLPKYSLFELENGRKRMLASAGELQKGNELALPSKYVNFLYLASHYEKLKGSPEDNEQKQLFVEQHKHYLDEIIEQISEFSKRVILADANLDKVLSAYNKHRDKPIREQAENIIHLFTLTNLGAPAAFKYFDTTIDRKRYTSTKEVLDATLIHQSITGLYETRIDLSQLGGDGGPAPGGGGGSGGIPWLMKKPLQLTTLVPLQEYEERLLKQTMLTGSYKEKLQSLFLKYDALWQHWENQVGHRRIKPHHIATGTVNPRPQKQYPINPKAKASIQTVINDLLKQGVLIQQNSIMNTPVYPVPKPDGKWRMVLDYREVNKTIPLIAAQNQHSAGILSSIFRGKYKTTLDLSNGFWAHSITPESYWLTAFTWLGQQYCWTRLPQGFLNSPALFNADVVDLLKEVPNVQVYVDDIYISHDDPREHLEQLEKVFSLLLNAGYVVSLKKSEIAQHEVEFLGFNITKEGRGLTETFKQKLLNITPPRDLKQLQSILGLLNFARNFIPNFSELVKPLYNIIATAPGKYITWTTDNSQQLQNIISMLNSAENLEERNPEVRLIMKVNTSPSAGYIRFYNEFAKRPIMYLNYVYTKAEVKFTNTEKLLTTIHKGLIKALDLGMGQEILVYSPIVSMTKIQKTPLPERKALPIRWITWMSYLEDPRIQFHYDKTLPELQQVPTVTDDIIAKIKHPSEFSMVFYTDGSAIKHPNVNKSHNAGMGIAQVQFKPEFTVINTWSIPLGDHTAQLAEVAAVEFACKKALKIDGPVLIVTDSFYVAESVNKELPYWQSNGFFNNKKKPLKHVSKWKSIADCIQLKPDIIIIHEKGHQPTASTFHTEGNNLADKLATQGSYVVNAGKRTADGSEFEKRTADGSEFESPKKKAKVE

SEQ ID NO: 543 - protein, 2087 aa, synthetic construct
  source 1..2087: note = Description of Artificial Sequence: Synthetic polypeptide
MPAAKRVKLDGGDKKYSIGLDIGTNSVGWAVITDEYKVPSKKFKVLGNTDRHSIKKNLIGALLFDSGETAEATRLKRTARRRYTRRKNRICYLQEIFSNEMAKVDDSFFHRLEESFLVEEDKKHERHPIFGNIVDEVAYHEKYPTIYHLRKKLVDSTDKADLRLIYLALAHMIKFRGHFLIEGDLNPDNSDVDKLFIQLVQTYNQLFEENPINASGVDAKAILSARLSKSRRLENLIAQLPGEKKNGLFGNLIALSLGLTPNFKSNFDLAEDAKLQLSKDTYDDDLDNLLAQIGDQYADLFLAAKNLSDAILLSDILRVNTEITKAPLSASMIKRYDEHHQDLTLLKALVRQQLPEKYKEIFFDQSKNGYAGYIDGGASQEEFYKFIKPILEKMDGTEELLVKLNREDLLRKQRTFDNGSIPHQIHLGELHAILRRQEDFYPFLKDNREKIEKILTFRIPYYVGPLARGNSRFAWMTRKSEETITPWNFEEVVDKGASAQSFIERMTNFDKNLPNEKVLPKHSLLYEYFTVYNELTKVKYVTEGMRKPAFLSGEQKKAIVDLLFKTNRKVTVKQLKEDYFKKIECFDSVEISGVEDRFNASLGTYHDLLKIIKDKDFLDNEENEDILEDIVLTLTLFEDREMIEERLKTYAHLFDDKVMKQLKRRRYTGWGRLSRKLINGIRDKQSGKTILDFLKSDGFANRNFMQLIHDDSLTFKEDIQKAQVSGQGDSLHEHIANLAGSPAIKKGILQTVKVVDELVKVMGRHKPENIVIEMARENQTTQKGQKNSRERMKRIEEGIKELGSQILKEHPVENTQLQNEKLYLYYLQNGRDMYVDQELDINRLSDYDVDHIVPQSFLKDDSIDNKVLTRSDKARGKSDNVPSEEVVKKMKNYWRQLLNAKLITQRKFDNLTKAERGGLSELDKAGFIKRQLVETRQITKHVAQILDSRMNTKYDENDKLIREVKVITLKSKLVSDFRKDFQFYKVREINNYHHAHDAYLNAVVGTALIKKYPKLESEFVYGDYKVYDVRKMIAKSEQEIGKATAKYFFYSNIMNFFKTEITLANGEIRKRPLIETNGETGEIVWDKGRDFATVRKVLSMPQVNIVKKTEVQTGGFSKESILPKRNSDKLIARKKDWDPKKYGGFDSPTVAYSVLVVAKVEKGKSKKLKSVKELLGITIMERSSFEKNPIDFLEAKGYKEVKKDLIIKLPKYSLFELENGRKRMLASAGELQKGNELALPSKYVNFLYLASHYEKLKGSPEDNEQKQLFVEQHKHYLDEIIEQISEFSKRVILADANLDKVLSAYNKHRDKPIREQAENIIHLFTLTNLGAPAAFKYFDTTIDRKRYTSTKEVLDATLIHQSITGLYETRIDLSQLGGDGGGGSEAAAKGGGGGIPWLMKKPLQLTTLVPLQEYEERLLKQTMLTGSYKEKLQSLFLKYDALWQHWENQVGHRRIKPHHIATGTVNPRPQKQYPINPKAKASIQTVINDLLKQGVLIQQNSIMNTPVYPVPKPDGKWRMVLDYREVNKTIPLIAAQNQHSAGILSSIFRGKYKTTLDLSNGFWAHSITPESYWLTAFTWLGQQYCWTRLPQGFLNSPALFNADVVDLLKEVPNVQVYVDDIYISHDDPREHLEQLEKVFSLLLNAGYVVSLKKSEIAQHEVEFLGFNITKEGRGLTETFKQKLLNITPPRDLKQLQSILGLLNFARNFIPNFSELVKPLYNIIATAPGKYITWTTDNSQQLQNIISMLNSAENLEERNPEVRLIMKVNTSPSAGYIRFYNEFAKRPIMYLNYVYTKAEVKFTNTEKLLTTIHKGLIKALDLGMGQEILVYSPIVSMTKIQKTPLPERKALPIRWITWMSYLEDPRIQFHYDKTLPELQQVPTVTDDIIAKIKHPSEFSMVFYTDGSAIKHPNVNKSHNAGMGIAQVQFKPEFTVINTWSIPLGDHTAQLAEVAAVEFACKKALKIDGPVLIVTDSFYVAESVNKELPYWQSNGFFNNKKKPLKHVSKWKSIADCIQLKPDIIIIHEKGHQPTASTFHTEGNNLADKLATQGSYVVNAGKRTADGSEFEKRTADGSEFESPKKKAKVE

SEQ ID NO: 544 - protein, 2082 aa, synthetic construct
  source 1..2082: note = Description of Artificial Sequence: Synthetic polypeptide
MPAAKRVKLDGGDKKYSIGLDIGTNSVGWAVITDEYKVPSKKFKVLGNTDRHSIKKNLIGALLFDSGETAEATRLKRTARRRYTRRKNRICYLQEIFSNEMAKVDDSFFHRLEESFLVEEDKKHERHPIFGNIVDEVAYHEKYPTIYHLRKKLVDSTDKADLRLIYLALAHMIKFRGHFLIEGDLNPDNSDVDKLFIQLVQTYNQLFEENPINASGVDAKAILSARLSKSRRLENLIAQLPGEKKNGLFGNLIALSLGLTPNFKSNFDLAEDAKLQLSKDTYDDDLDNLLAQIGDQYADLFLAAKNLSDAILLSDILRVNTEITKAPLSASMIKRYDEHHQDLTLLKALVRQQLPEKYKEIFFDQSKNGYAGYIDGGASQEEFYKFIKPILEKMDGTEELLVKLNREDLLRKQRTFDNGSIPHQIHLGELHAILRRQEDFYPFLKDNREKIEKILTFRIPYYVGPLARGNSRFAWMTRKSEETITPWNFEEVVDKGASAQSFIERMTNFDKNLPNEKVLPKHSLLYEYFTVYNELTKVKYVTEGMRKPAFLSGEQKKAIVDLLFKTNRKVTVKQLKEDYFKKIECFDSVEISGVEDRFNASLGTYHDLLKIIKDKDFLDNEENEDILEDIVLTLTLFEDREMIEERLKTYAHLFDDKVMKQLKRRRYTGWGRLSRKLINGIRDKQSGKTILDFLKSDGFANRNFMQLIHDDSLTFKEDIQKAQVSGQGDSLHEHIANLAGSPAIKKGILQTVKVVDELVKVMGRHKPENIVIEMARENQTTQKGQKNSRERMKRIEEGIKELGSQILKEHPVENTQLQNEKLYLYYLQNGRDMYVDQELDINRLSDYDVDHIVPQSFLKDDSIDNKVLTRSDKARGKSDNVPSEEVVKKMKNYWRQLLNAKLITQRKFDNLTKAERGGLSELDKAGFIKRQLVETRQITKHVAQILDSRMNTKYDENDKLIREVKVITLKSKLVSDFRKDFQFYKVREINNYHHAHDAYLNAVVGTALIKKYPKLESEFVYGDYKVYDVRKMIAKSEQEIGKATAKYFFYSNIMNFFKTEITLANGEIRKRPLIETNGETGEIVWDKGRDFATVRKVLSMPQVNIVKKTEVQTGGFSKESILPKRNSDKLIARKKDWDPKKYGGFDSPTVAYSVLVVAKVEKGKSKKLKSVKELLGITIMERSSFEKNPIDFLEAKGYKEVKKDLIIKLPKYSLFELENGRKRMLASAGELQKGNELALPSKYVNFLYLASHYEKLKGSPEDNEQKQLFVEQHKHYLDEIIEQISEFSKRVILADANLDKVLSAYNKHRDKPIREQAENIIHLFTLTNLGAPAAFKYFDTTIDRKRYTSTKEVLDATLIHQSITGLYETRIDLSQLGGDGGGSSGGGGGIPWLMKKPLQLTTLVPLQEYEERLLKQTMLTGSYKEKLQSLFLKYDALWQHWENQVGHRRIKPHHIATGTVNPRPQKQYPINPKAKASIQTVINDLLKQGVLIQQNSIMNTPVYPVPKPDGKWRMVLDYREVNKTIPLIAAQNQHSAGILSSIFRGKYKTTLDLSNGFWAHSITPESYWLTAFTWLGQQYCWTRLPQGFLNSPALFNADVVDLLKEVPNVQVYVDDIYISHDDPREHLEQLEKVFSLLLNAGYVVSLKKSEIAQHEVEFLGFNITKEGRGLTETFKQKLLNITPPRDLKQLQSILGLLNFARNFIPNFSELVKPLYNIIATAPGKYITWTTDNSQQLQNIISMLNSAENLEERNPEVRLIMKVNTSPSAGYIRFYNEFAKRPIMYLNYVYTKAEVKFTNTEKLLTTIHKGLIKALDLGMGQEILVYSPIVSMTKIQKTPLPERKALPIRWITWMSYLEDPRIQFHYDKTLPELQQVPTVTDDIIAKIKHPSEFSMVFYTDGSAIKHPNVNKSHNAGMGIAQVQFKPEFTVINTWSIPLGDHTAQLAEVAAVEFACKKALKIDGPVLIVTDSFYVAESVNKELPYWQSNGFFNNKKKPLKHVSKWKSIADCIQLKPDIIIIHEKGHQPTASTFHTEGNNLADKLATQGSYVVNAGKRTADGSEFEKRTADGSEFESPKKKAKVE

SEQ ID NO: 545 - protein, 2085 aa, synthetic construct
  source 1..2085: note = Description of Artificial Sequence: Synthetic polypeptide
MPAAKRVKLDGGDKKYSIGLDIGTNSVGWAVITDEYKVPSKKFKVLGNTDRHSIKKNLIGALLFDSGETAEATRLKRTARRRYTRRKNRICYLQEIFSNEMAKVDDSFFHRLEESFLVEEDKKHERHPIFGNIVDEVAYHEKYPTIYHLRKKLVDSTDKADLRLIYLALAHMIKFRGHFLIEGDLNPDNSDVDKLFIQLVQTYNQLFEENPINASGVDAKAILSARLSKSRRLENLIAQLPGEKKNGLFGNLIALSLGLTPNFKSNFDLAEDAKLQLSKDTYDDDLDNLLAQIGDQYADLFLAAKNLSDAILLSDILRVNTEITKAPLSASMIKRYDEHHQDLTLLKALVRQQLPEKYKEIFFDQSKNGYAGYIDGGASQEEFYKFIKPILEKMDGTEELLVKLNREDLLRKQRTFDNGSIPHQIHLGELHAILRRQEDFYPFLKDNREKIEKILTFRIPYYVGPLARGNSRFAWMTRKSEETITPWNFEEVVDKGASAQSFIERMTNFDKNLPNEKVLPKHSLLYEYFTVYNELTKVKYVTEGMRKPAFLSGEQKKAIVDLLFKTNRKVTVKQLKEDYFKKIECFDSVEISGVEDRFNASLGTYHDLLKIIKDKDFLDNEENEDILEDIVLTLTLFEDREMIEERLKTYAHLFDDKVMKQLKRRRYTGWGRLSRKLINGIRDKQSGKTILDFLKSDGFANRNFMQLIHDDSLTFKEDIQKAQVSGQGDSLHEHIANLAGSPAIKKGILQTVKVVDELVKVMGRHKPENIVIEMARENQTTQKGQKNSRERMKRIEEGIKELGSQILKEHPVENTQLQNEKLYLYYLQNGRDMYVDQELDINRLSDYDVDHIVPQSFLKDDSIDNKVLTRSDKARGKSDNVPSEEVVKKMKNYWRQLLNAKLITQRKFDNLTKAERGGLSELDKAGFIKRQLVETRQITKHVAQILDSRMNTKYDENDKLIREVKVITLKSKLVSDFRKDFQFYKVREINNYHHAHDAYLNAVVGTALIKKYPKLESEFVYGDYKVYDVRKMIAKSEQEIGKATAKYFFYSNIMNFFKTEITLANGEIRKRPLIETNGETGEIVWDKGRDFATVRKVLSMPQVNIVKKTEVQTGGFSKESILPKRNSDKLIARKKDWDPKKYGGFDSPTVAYSVLVVAKVEKGKSKKLKSVKELLGITIMERSSFEKNPIDFLEAKGYKEVKKDLIIKLPKYSLFELENGRKRMLASAGELQKGNELALPSKYVNFLYLASHYEKLKGSPEDNEQKQLFVEQHKHYLDEIIEQISEFSKRVILADANLDKVLSAYNKHRDKPIREQAENIIHLFTLTNLGAPAAFKYFDTTIDRKRYTSTKEVLDATLIHQSITGLYETRIDLSQLGGDGGGSSGGSPAPGGIPWLMKKPLQLTTLVPLQEYEERLLKQTMLTGSYKEKLQSLFLKYDALWQHWENQVGHRRIKPHHIATGTVNPRPQKQYPINPKAKASIQTVINDLLKQGVLIQQNSIMNTPVYPVPKPDGKWRMVLDYREVNKTIPLIAAQNQHSAGILSSIFRGKYKTTLDLSNGFWAHSITPESYWLTAFTWLGQQYCWTRLPQGFLNSPALFNADVVDLLKEVPNVQVYVDDIYISHDDPREHLEQLEKVFSLLLNAGYVVSLKKSEIAQHEVEFLGFNITKEGRGLTETFKQKLLNITPPRDLKQLQSILGLLNFARNFIPNFSELVKPLYNIIATAPGKYITWTTDNSQQLQNIISMLNSAENLEERNPEVRLIMKVNTSPSAGYIRFYNEFAKRPIMYLNYVYTKAEVKFTNTEKLLTTIHKGLIKALDLGMGQEILVYSPIVSMTKIQKTPLPERKALPIRWITWMSYLEDPRIQFHYDKTLPELQQVPTVTDDIIAKIKHPSEFSMVFYTDGSAIKHPNVNKSHNAGMGIAQVQFKPEFTVINTWSIPLGDHTAQLAEVAAVEFACKKALKIDGPVLIVTDSFYVAESVNKELPYWQSNGFFNNKKKPLKHVSKWKSIADCIQLKPDIIIIHEKGHQPTASTFHTEGNNLADKLATQGSYVVNAGKRTADGSEFEKRTADGSEFESPKKKAKVE

SEQ ID NO: 546 - protein, 2085 aa, synthetic construct
  source 1..2085: note = Description of Artificial Sequence: Synthetic polypeptide
MPAAKRVKLDGGDKKYSIGLDIGTNSVGWAVITDEYKVPSKKFKVLGNTDRHSIKKNLIGALLFDSGETAEATRLKRTARRRYTRRKNRICYLQEIFSNEMAKVDDSFFHRLEESFLVEEDKKHERHPIFGNIVDEVAYHEKYPTIYHLRKKLVDSTDKADLRLIYLALAHMIKFRGHFLIEGDLNPDNSDVDKLFIQLVQTYNQLFEENPINASGVDAKAILSARLSKSRRLENLIAQLPGEKKNGLFGNLIALSLGLTPNFKSNFDLAEDAKLQLSKDTYDDDLDNLLAQIGDQYADLFLAAKNLSDAILLSDILRVNTEITKAPLSASMIKRYDEHHQDLTLLKALVRQQLPEKYKEIFFDQSKNGYAGYIDGGASQEEFYKFIKPILEKMDGTEELLVKLNREDLLRKQRTFDNGSIPHQIHLGELHAILRRQEDFYPFLKDNREKIEKILTFRIPYYVGPLARGNSRFAWMTRKSEETITPWNFEEVVDKGASAQSFIERMTNFDKNLPNEKVLPKHSLLYEYFTVYNELTKVKYVTEGMRKPAFLSGEQKKAIVDLLFKTNRKVTVKQLKEDYFKKIECFDSVEISGVEDRFNASLGTYHDLLKIIKDKDFLDNEENEDILEDIVLTLTLFEDREMIEERLKTYAHLFDDKVMKQLKRRRYTGWGRLSRKLINGIRDKQSGKTILDFLKSDGFANRNFMQLIHDDSLTFKEDIQKAQVSGQGDSLHEHIANLAGSPAIKKGILQTVKVVDELVKVMGRHKPENIVIEMARENQTTQKGQKNSRERMKRIEEGIKELGSQILKEHPVENTQLQNEKLYLYYLQNGRDMYVDQELDINRLSDYDVDHIVPQSFLKDDSIDNKVLTRSDKARGKSDNVPSEEVVKKMKNYWRQLLNAKLITQRKFDNLTKAERGGLSELDKAGFIKRQLVETRQITKHVAQILDSRMNTKYDENDKLIREVKVITLKSKLVSDFRKDFQFYKVREINNYHHAHDAYLNAVVGTALIKKYPKLESEFVYGDYKVYDVRKMIAKSEQEIGKATAKYFFYSNIMNFFKTEITLANGEIRKRPLIETNGETGEIVWDKGRDFATVRKVLSMPQVNIVKKTEVQTGGFSKESILPKRNSDKLIARKKDWDPKKYGGFDSPTVAYSVLVVAKVEKGKSKKLKSVKELLGITIMERSSFEKNPIDFLEAKGYKEVKKDLIIKLPKYSLFELENGRKRMLASAGELQKGNELALPSKYVNFLYLASHYEKLKGSPEDNEQKQLFVEQHKHYLDEIIEQISEFSKRVILADANLDKVLSAYNKHRDKPIREQAENIIHLFTLTNLGAPAAFKYFDTTIDRKRYTSTKEVLDATLIHQSITGLYETRIDLSQLGGDGGPAPGSSGGGGGIPWLMKKPLQLTTLVPLQEYEERLLKQTMLTGSYKEKLQSLFLKYDALWQHWENQVGHRRIKPHHIATGTVNPRPQKQYPINPKAKASIQTVINDLLKQGVLIQQNSIMNTPVYPVPKPDGKWRMVLDYREVNKTIPLIAAQNQHSAGILSSIFRGKYKTTLDLSNGFWAHSITPESYWLTAFTWLGQQYCWTRLPQGFLNSPALFNADVVDLLKEVPNVQVYVDDIYISHDDPREHLEQLEKVFSLLLNAGYVVSLKKSEIAQHEVEFLGFNITKEGRGLTETFKQKLLNITPPRDLKQLQSILGLLNFARNFIPNFSELVKPLYNIIATAPGKYITWTTDNSQQLQNIISMLNSAENLEERNPEVRLIMKVNTSPSAGYIRFYNEFAKRPIMYLNYVYTKAEVKFTNTEKLLTTIHKGLIKALDLGMGQEILVYSPIVSMTKIQKTPLPERKALPIRWITWMSYLEDPRIQFHYDKTLPELQQVPTVTDDIIAKIKHPSEFSMVFYTDGSAIKHPNVNKSHNAGMGIAQVQFKPEFTVINTWSIPLGDHTAQLAEVAAVEFACKKALKIDGPVLIVTDSFYVAESVNKELPYWQSNGFFNNKKKPLKHVSKWKSIADCIQLKPDIIIIHEKGHQPTASTFHTEGNNLADKLATQGSYVVNAGKRTADGSEFEKRTADGSEFESPKKKAKVE

SEQ ID NO: 547 - protein, 2085 aa, synthetic construct
  source 1..2085: note = Description of Artificial Sequence: Synthetic polypeptide
MPAAKRVKLDGGDKKYSIGLDIGTNSVGWAVITDEYKVPSKKFKVLGNTDRHSIKKNLIGALLFDSGETAEATRLKRTARRRYTRRKNRICYLQEIFSNEMAKVDDSFFHRLEESFLVEEDKKHERHPIFGNIVDEVAYHEKYPTIYHLRKKLVDSTDKADLRLIYLALAHMIKFRGHFLIEGDLNPDNSDVDKLFIQLVQTYNQLFEENPINASGVDAKAILSARLSKSRRLENLIAQLPGEKKNGLFGNLIALSLGLTPNFKSNFDLAEDAKLQLSKDTYDDDLDNLLAQIGDQYADLFLAAKNLSDAILLSDILRVNTEITKAPLSASMIKRYDEHHQDLTLLKALVRQQLPEKYKEIFFDQSKNGYAGYIDGGASQEEFYKFIKPILEKMDGTEELLVKLNREDLLRKQRTFDNGSIPHQIHLGELHAILRRQEDFYPFLKDNREKIEKILTFRIPYYVGPLARGNSRFAWMTRKSEETITPWNFEEVVDKGASAQSFIERMTNFDKNLPNEKVLPKHSLLYEYFTVYNELTKVKYVTEGMRKPAFLSGEQKKAIVDLLFKTNRKVTVKQLKEDYFKKIECFDSVEISGVEDRFNASLGTYHDLLKIIKDKDFLDNEENEDILEDIVLTLTLFEDREMIEERLKTYAHLFDDKVMKQLKRRRYTGWGRLSRKLINGIRDKQSGKTILDFLKSDGFANRNFMQLIHDDSLTFKEDIQKAQVSGQGDSLHEHIANLAGSPAIKKGILQTVKVVDELVKVMGRHKPENIVIEMARENQTTQKGQKNSRERMKRIEEGIKELGSQILKEHPVENTQLQNEKLYLYYLQNGRDMYVDQELDINRLSDYDVDHIVPQSFLKDDSIDNKVLTRSDKARGKSDNVPSEEVVKKMKNYWRQLLNAKLITQRKFDNLTKAERGGLSELDKAGFIKRQLVETRQITKHVAQILDSRMNTKYDENDKLIREVKVITLKSKLVSDFRKDFQFYKVREINNYHHAHDAYLNAVVGTALIKKYPKLESEFVYGDYKVYDVRKMIAKSEQEIGKATAKYFFYSNIMNFFKTEITLANGEIRKRPLIETNGETGEIVWDKGRDFATVRKVLSMPQVNIVKKTEVQTGGFSKESILPKRNSDKLIARKKDWDPKKYGGFDSPTVAYSVLVVAKVEKGKSKKLKSVKELLGITIMERSSFEKNPIDFLEAKGYKEVKKDLIIKLPKYSLFELENGRKRMLASAGELQKGNELALPSKYVNFLYLASHYEKLKGSPEDNEQKQLFVEQHKHYLDEIIEQISEFSKRVILADANLDKVLSAYNKHRDKPIREQAENIIHLFTLTNLGAPAAFKYFDTTIDRKRYTSTKEVLDATLIHQSITGLYETRIDLSQLGGDGGGSSGGGPAPGGIPWLMKKPLQLTTLVPLQEYEERLLKQTMLTGSYKEKLQSLFLKYDALWQHWENQVGHRRIKPHHIATGTVNPRPQKQYPINPKAKASIQTVINDLLKQGVLIQQNSIMNTPVYPVPKPDGKWRMVLDYREVNKTIPLIAAQNQHSAGILSSIFRGKYKTTLDLSNGFWAHSITPESYWLTAFTWLGQQYCWTRLPQGFLNSPALFNADVVDLLKEVPNVQVYVDDIYISHDDPREHLEQLEKVFSLLLNAGYVVSLKKSEIAQHEVEFLGFNITKEGRGLTETFKQKLLNITPPRDLKQLQSILGLLNFARNFIPNFSELVKPLYNIIATAPGKYITWTTDNSQQLQNIISMLNSAENLEERNPEVRLIMKVNTSPSAGYIRFYNEFAKRPIMYLNYVYTKAEVKFTNTEKLLTTIHKGLIKALDLGMGQEILVYSPIVSMTKIQKTPLPERKALPIRWITWMSYLEDPRIQFHYDKTLPELQQVPTVTDDIIAKIKHPSEFSMVFYTDGSAIKHPNVNKSHNAGMGIAQVQFKPEFTVINTWSIPLGDHTAQLAEVAAVEFACKKALKIDGPVLIVTDSFYVAESVNKELPYWQSNGFFNNKKKPLKHVSKWKSIADCIQLKPDIIIIHEKGHQPTASTFHTEGNNLADKLATQGSYVVNAGKRTADGSEFEKRTADGSEFESPKKKAKVE

SEQ ID NO: 548 - protein, 2087 aa, synthetic construct
  source 1..2087: note = Description of Artificial Sequence: Synthetic polypeptide
MPAAKRVKLDGGDKKYSIGLDIGTNSVGWAVITDEYKVPSKKFKVLGNTDRHSIKKNLIGALLFDSGETAEATRLKRTARRRYTRRKNRICYLQEIFSNEMAKVDDSFFHRLEESFLVEEDKKHERHPIFGNIVDEVAYHEKYPTIYHLRKKLVDSTDKADLRLIYLALAHMIKFRGHFLIEGDLNPDNSDVDKLFIQLVQTYNQLFEENPINASGVDAKAILSARLSKSRRLENLIAQLPGEKKNGLFGNLIALSLGLTPNFKSNFDLAEDAKLQLSKDTYDDDLDNLLAQIGDQYADLFLAAKNLSDAILLSDILRVNTEITKAPLSASMIKRYDEHHQDLTLLKALVRQQLPEKYKEIFFDQSKNGYAGYIDGGASQEEFYKFIKPILEKMDGTEELLVKLNREDLLRKQRTFDNGSIPHQIHLGELHAILRRQEDFYPFLKDNREKIEKILTFRIPYYVGPLARGNSRFAWMTRKSEETITPWNFEEVVDKGASAQSFIERMTNFDKNLPNEKVLPKHSLLYEYFTVYNELTKVKYVTEGMRKPAFLSGEQKKAIVDLLFKTNRKVTVKQLKEDYFKKIECFDSVEISGVEDRFNASLGTYHDLLKIIKDKDFLDNEENEDILEDIVLTLTLFEDREMIEERLKTYAHLFDDKVMKQLKRRRYTGWGRLSRKLINGIRDKQSGKTILDFLKSDGFANRNFMQLIHDDSLTFKEDIQKAQVSGQGDSLHEHIANLAGSPAIKKGILQTVKVVDELVKVMGRHKPENIVIEMARENQTTQKGQKNSRERMKRIEEGIKELGSQILKEHPVENTQLQNEKLYLYYLQNGRDMYVDQELDINRLSDYDVDHIVPQSFLKDDSIDNKVLTRSDKARGKSDNVPSEEVVKKMKNYWRQLLNAKLITQRKFDNLTKAERGGLSELDKAGFIKRQLVETRQITKHVAQILDSRMNTKYDENDKLIREVKVITLKSKLVSDFRKDFQFYKVREINNYHHAHDAYLNAVVGTALIKKYPKLESEFVYGDYKVYDVRKMIAKSEQEIGKATAKYFFYSNIMNFFKTEITLANGEIRKRPLIETNGETGEIVWDKGRDFATVRKVLSMPQVNIVKKTEVQTGGFSKESILPKRNSDKLIARKKDWDPKKYGGFDSPTVAYSVLVVAKVEKGKSKKLKSVKELLGITIMERSSFEKNPIDFLEAKGYKEVKKDLIIKLPKYSLFELENGRKRMLASAGELQKGNELALPSKYVNFLYLASHYEKLKGSPEDNEQKQLFVEQHKHYLDEIIEQISEFSKRVILADANLDKVLSAYNKHRDKPIREQAENIIHLFTLTNLGAPAAFKYFDTTIDRKRYTSTKEVLDATLIHQSITGLYETRIDLSQLGGDGGGGSEAAAKPAPGGIPWLMKKPLQLTTLVPLQEYEERLLKQTMLTGSYKEKLQSLFLKYDALWQHWENQVGHRRIKPHHIATGTVNPRPQKQYPINPKAKASIQTVINDLLKQGVLIQQNSIMNTPVYPVPKPDGKWRMVLDYREVNKTIPLIAAQNQHSAGILSSIFRGKYKTTLDLSNGFWAHSITPESYWLTAFTWLGQQYCWTRLPQGFLNSPALFNADVVDLLKEVPNVQVYVDDIYISHDDPREHLEQLEKVFSLLLNAGYVVSLKKSEIAQHEVEFLGFNITKEGRGLTETFKQKLLNITPPRDLKQLQSILGLLNFARNFIPNFSELVKPLYNIIATAPGKYITWTTDNSQQLQNIISMLNSAENLEERNPEVRLIMKVNTSPSAGYIRFYNEFAKRPIMYLNYVYTKAEVKFTNTEKLLTTIHKGLIKALDLGMGQEILVYSPIVSMTKIQKTPLPERKALPIRWITWMSYLEDPRIQFHYDKTLPELQQVPTVTDDIIAKIKHPSEFSMVFYTDGSAIKHPNVNKSHNAGMGIAQVQFKPEFTVINTWSIPLGDHTAQLAEVAAVEFACKKALKIDGPVLIVTDSFYVAESVNKELPYWQSNGFFNNKKKPLKHVSKWKSIADCIQLKPDIIIIHEKGHQPTASTFHTEGNNLADKLATQGSYVVNAGKRTADGSEFEKRTADGSEFESPKKKAKVE

SEQ ID NO: 549 - protein, 2087 aa, synthetic construct
  source 1..2087: note = Description of Artificial Sequence: Synthetic polypeptide
MPAAKRVKLDGGDKKYSIGLDIGTNSVGWAVITDEYKVPSKKFKVLGNTDRHSIKKNLIGALLFDSGETAEATRLKRTARRRYTRRKNRICYLQEIFSNEMAKVDDSFFHRLEESFLVEEDKKHERHPIFGNIVDEVAYHEKYPTIYHLRKKLVDSTDKADLRLIYLALAHMIKFRGHFLIEGDLNPDNSDVDKLFIQLVQTYNQLFEENPINASGVDAKAILSARLSKSRRLENLIAQLPGEKKNGLFGNLIALSLGLTPNFKSNFDLAEDAKLQLSKDTYDDDLDNLLAQIGDQYADLFLAAKNLSDAILLSDILRVNTEITKAPLSASMIKRYDEHHQDLTLLKALVRQQLPEKYKEIFFDQSKNGYAGYIDGGASQEEFYKFIKPILEKMDGTEELLVKLNREDLLRKQRTFDNGSIPHQIHLGELHAILRRQEDFYPFLKDNREKIEKILTFRIPYYVGPLARGNSRFAWMTRKSEETITPWNFEEVVDKGASAQSFIERMTNFDKNLPNEKVLPKHSLLYEYFTVYNELTKVKYVTEGMRKPAFLSGEQKKAIVDLLFKTNRKVTVKQLKEDYFKKIECFDSVEISGVEDRFNASLGTYHDLLKIIKDKDFLDNEENEDILEDIVLTLTLFEDREMIEERLKTYAHLFDDKVMKQLKRRRYTGWGRLSRKLINGIRDKQSGKTILDFLKSDGFANRNFMQLIHDDSLTFKEDIQKAQVSGQGDSLHEHIANLAGSPAIKKGILQTVKVVDELVKVMGRHKPENIVIEMARENQTTQKGQKNSRERMKRIEEGIKELGSQILKEHPVENTQLQNEKLYLYYLQNGRDMYVDQELDINRLSDYDVDHIVPQSFLKDDSIDNKVLTRSDKARGKSDNVPSEEVVKKMKNYWRQLLNAKLITQRKFDNLTKAERGGLSELDKAGFIKRQLVETRQITKHVAQILDSRMNTKYDENDKLIREVKVITLKSKLVSDFRKDFQFYKVREINNYHHAHDAYLNAVVGTALIKKYPKLESEFVYGDYKVYDVRKMIAKSEQEIGKATAKYFFYSNIMNFFKTEITLANGEIRKRPLIETNGETGEIVWDKGRDFATVRKVLSMPQVNIVKKTEVQTGGFSKESILPKRNSDKLIARKKDWDPKKYGGFDSPTVAYSVLVVAKVEKGKSKKLKSVKELLGITIMERSSFEKNPIDFLEAKGYKEVKKDLIIKLPKYSLFELENGRKRMLASAGELQKGNELALPSKYVNFLYLASHYEKLKGSPEDNEQKQLFVEQHKHYLDEIIEQISEFSKRVILADANLDKVLSAYNKHRDKPIREQAENIIHLFTLTNLGAPAAFKYFDTTIDRKRYTSTKEVLDATLIHQSITGLYETRIDLSQLGGDGGGGGPAPEAAAKGGIPWLMKKPLQLTTLVPLQEYEERLLKQTMLTGSYKEKLQSLFLKYDALWQHWENQVGHRRIKPHHIATGTVNPRPQKQYPINPKAKASIQTVINDLLKQGVLIQQNSIMNTPVYPVPKPDGKWRMVLDYREVNKTIPLIAAQNQHSAGILSSIFRGKYKTTLDLSNGFWAHSITPESYWLTAFTWLGQQYCWTRLPQGFLNSPALFNADVVDLLKEVPNVQVYVDDIYISHDDPREHLEQLEKVFSLLLNAGYVVSLKKSEIAQHEVEFLGFNITKEGRGLTETFKQKLLNITPPRDLKQLQSILGLLNFARNFIPNFSELVKPLYNIIATAPGKYITWTTDNSQQLQNIISMLNSAENLEERNPEVRLIMKVNTSPSAGYIRFYNEFAKRPIMYLNYVYTKAEVKFTNTEKLLTTIHKGLIKALDLGMGQEILVYSPIVSMTKIQKTPLPERKALPIRWITWMSYLEDPRIQFHYDKTLPELQQVPTVTDDIIAKIKHPSEFSMVFYTDGSAIKHPNVNKSHNAGMGIAQVQFKPEFTVINTWSIPLGDHTAQLAEVAAVEFACKKALKIDGPVLIVTDSFYVAESVNKELPYWQSNGFFNNKKKPLKHVSKWKSIADCIQLKPDIIIIHEKGHQPTASTFHTEGNNLADKLATQGSYVVNAGKRTADGSEFEKRTADGSEFESPKKKAKVE

SEQ ID NO: 550 - protein, 2106 aa, synthetic construct
  source 1..2106: note = Description of Artificial Sequence: Synthetic polypeptide
MPAAKRVKLDGGDKKYSIGLDIGTNSVGWAVITDEYKVPSKKFKVLGNTDRHSIKKNLIGALLFDSGETAEATRLKRTARRRYTRRKNRICYLQEIFSNEMAKVDDSFFHRLEESFLVEEDKKHERHPIFGNIVDEVAYHEKYPTIYHLRKKLVDSTDKADLRLIYLALAHMIKFRGHFLIEGDLNPDNSDVDKLFIQLVQTYNQLFEENPINASGVDAKAILSARLSKSRRLENLIAQLPGEKKNGLFGNLIALSLGLTPNFKSNFDLAEDAKLQLSKDTYDDDLDNLLAQIGDQYADLFLAAKNLSDAILLSDILRVNTEITKAPLSASMIKRYDEHHQDLTLLKALVRQQLPEKYKEIFFDQSKNGYAGYIDGGASQEEFYKFIKPILEKMDGTEELLVKLNREDLLRKQRTFDNGSIPHQIHLGELHAILRRQEDFYPFLKDNREKIEKILTFRIPYYVGPLARGNSRFAWMTRKSEETITPWNFEEVVDKGASAQSFIERMTNFDKNLPNEKVLPKHSLLYEYFTVYNELTKVKYVTEGMRKPAFLSGEQKKAIVDLLFKTNRKVTVKQLKEDYFKKIECFDSVEISGVEDRFNASLGTYHDLLKIIKDKDFLDNEENEDILEDIVLTLTLFEDREMIEERLKTYAHLFDDKVMKQLKRRRYTGWGRLSRKLINGIRDKQSGKTILDFLKSDGFANRNFMQLIHDDSLTFKEDIQKAQVSGQGDSLHEHIANLAGSPAIKKGILQTVKVVDELVKVMGRHKPENIVIEMARENQTTQKGQKNSRERMKRIEEGIKELGSQILKEHPVENTQLQNEKLYLYYLQNGRDMYVDQELDINRLSDYDVDHIVPQSFLKDDSIDNKVLTRSDKARGKSDNVPSEEVVKKMKNYWRQLLNAKLITQRKFDNLTKAERGGLSELDKAGFIKRQLVETRQITKHVAQILDSRMNTKYDENDKLIREVKVITLKSKLVSDFRKDFQFYKVREINNYHHAHDAYLNAVVGTALIKKYPKLESEFVYGDYKVYDVRKMIAKSEQEIGKATAKYFFYSNIMNFFKTEITLANGEIRKRPLIETNGETGEIVWDKGRDFATVRKVLSMPQVNIVKKTEVQTGGFSKESILPKRNSDKLIARKKDWDPKKYGGFDSPTVAYSVLVVAKVEKGKSKKLKSVKELLGITIMERSSFEKNPIDFLEAKGYKEVKKDLIIKLPKYSLFELENGRKRMLASAGELQKGNELALPSKYVNFLYLASHYEKLKGSPEDNEQKQLFVEQHKHYLDEIIEQISEFSKRVILADANLDKVLSAYNKHRDKPIREQAENIIHLFTLTNLGAPAAFKYFDTTIDRKRYTSTKEVLDATLIHQSITGLYETRIDLSQLGGDGGEAAAKEAAAKEAAAKEAAAKEAAAKEAAAKGGIPWLMKKPLQLTTLVPLQEYEERLLKQTMLTGSYKEKLQSLFLKYDALWQHWENQVGHRRIKPHHIATGTVNPRPQKQYPINPKAKASIQTVINDLLKQGVLIQQNSIMNTPVYPVPKPDGKWRMVLDYREVNKTIPLIAAQNQHSAGILSSIFRGKYKTTLDLSNGFWAHSITPESYWLTAFTWLGQQYCWTRLPQGFLNSPALFNADVVDLLKEVPNVQVYVDDIYISHDDPREHLEQLEKVFSLLLNAGYVVSLKKSEIAQHEVEFLGFNITKEGRGLTETFKQKLLNITPPRDLKQLQSILGKLNFARNFIPNFSELVKPLYNIIATAPGKYITWTTDNSQQLQNIISMLNSAENLEERNPEVRLIMKVNTSPSAGYIRFYNEFAKRPIMYLNYVYTKAEVKFTNTEKLLTTIHKGLIKALDLGMGQEILVYSPIVSMTKIQKTPLPERKALPIRWITWMSYLEDPRIQFHYDKTLPELQQVPTVTDDIIAKIKHPSEFSMVFYTDGSAIKHPNVNKSHNAGMGIAQVQFKPEFTVINTWSIPLGDHTAQLAEVAAVEFACKKALKIDGPVLIVTDSFYVAESVNKELPYWQSNGFFNNKKKPLKHVSKWKSIADCIQLKPDIIIIHEKGHQPTASTFHTEGNNLADKLATQGSYVVNAGKRTADGSEFEKRTADGSEFESPKKKAKVE

SEQ ID NO: 551 - protein, 2079 aa, synthetic construct
  source 1..2079: note = Description of Artificial Sequence: Synthetic polypeptide
MPAAKRVKLDGGDKKYSIGLDIGTNSVGWAVITDEYKVPSKKFKVLGNTDRHSIKKNLIGALLFDSGETAEATRLKRTARRRYTRRKNRICYLQEIFSNEMAKVDDSFFHRLEESFLVEEDKKHERHPIFGNIVDEVAYHEKYPTIYHLRKKLVDSTDKADLRLIYLALAHMIKFRGHFLIEGDLNPDNSDVDKLFIQLVQTYNQLFEENPINASGVDAKAILSARLSKSRRLENLIAQLPGEKKNGLFGNLIALSLGLTPNFKSNFDLAEDAKLQLSKDTYDDDLDNLLAQIGDQYADLFLAAKNLSDAILLSDILRVNTEITKAPLSASMIKRYDEHHQDLTLLKALVRQQLPEKYKEIFFDQSKNGYAGYIDGGASQEEFYKFIKPILEKMDGTEELLVKLNREDLLRKQRTFDNGSIPHQIHLGELHAILRRQEDFYPFLKDNREKIEKILTFRIPYYVGPLARGNSRFAWMTRKSEETITPWNFEEVVDKGASAQSFIERMTNFDKNLPNEKVLPKHSLLYEYFTVYNELTKVKYVTEGMRKPAFLSGEQKKAIVDLLFKTNRKVTVKQLKEDYFKKIECFDSVEISGVEDRFNASLGTYHDLLKIIKDKDFLDNEENEDILEDIVLTLTLFEDREMIEERLKTYAHLFDDKVMKQLKRRRYTGWGRLSRKLINGIRDKQSGKTILDFLKSDGFANRNFMQLIHDDSLTFKEDIQKAQVSGQGDSLHEHIANLAGSPAIKKGILQTVKVVDELVKVMGRHKPENIVIEMARENQTTQKGQKNSRERMKRIEEGIKELGSQILKEHPVENTQLQNEKLYLYYLQNGRDMYVDQELDINRLSDYDVDHIVPQSFLKDDSIDNKVLTRSDKARGKSDNVPSEEVVKKMKNYWRQLLNAKLITQRKFDNLTKAERGGLSELDKAGFIKRQLVETRQITKHVAQILDSRMNTKYDENDKLIREVKVITLKSKLVSDFRKDFQFYKVREINNYHHAHDAYLNAVVGTALIKKYPKLESEFVYGDYKVYDVRKMIAKSEQEIGKATAKYFFYSNIMNFFKTEITLANGEIRKRPLIETNGETGEIVWDKGRDFATVRKVLSMPQVNIVKKTEVQTGGFSKESILPKRNSDKLIARKKDWDPKKYGGFDSPTVAYSVLVVAKVEKGKSKKLKSVKELLGITIMERSSFEKNPIDFLEAKGYKEVKKDLIIKLPKYSLFELENGRKRMLASAGELQKGNELALPSKYVNFLYLASHYEKLKGSPEDNEQKQLFVEQHKHYLDEIIEQISEFSKRVILADANLDKVLSAYNKHRDKPIREQAENIIHLFTLTNLGAPAAFKYFDTTIDRKRYTSTKEVLDATLIHQSITGLYETRIDLSQLGGDGGGSSGGIPWLMKKPLQLTTLVPLQEYEERLLKQTMLTGSYKEKLQSLFLKYDALWQHWENQVGHRRIKPHHIATGTVNPRPQKQYPINPKAKASIQTVINDLLKQGVLIQQNSIMNTPVYPVPKPDGKWRMVLDYREVNKTIPLIAAQNQHSAGILSSIFRGKYKTTLDLSNGFWAHSITPESYWLTAFTWLGQQYCWTRLPQGFLNSPALFNADVVDLLKEVPNVQVYVDDIYISHDDPREHLEQLEKVFSLLLNAGYVVSLKKSEIAQHEVEFLGFNITKEGRGLTETFKQKLLNITPPRDLKQLQSILGKLNFARNFIPNFSELVKPLYNIIATAPGKYITWTTDNSQQLQNIISMLNSAENLEERNPEVRLIMKVNTSPSAGYIRFYNEFAKRPIMYLNYVYTKAEVKFTNTEKLLTTIHKGLIKALDLGMGQEILVYSPIVSMTKIQKTPLPERKALPIRWITWMSYLEDPRIQFHYDKTLPELQQVPTVTDDIIAKIKHPSEFSMVFYTDGSAIKHPNVNKSHNAGMGIAQVQFKPEFTVINTWSIPLGDHTAQLAEVAAVEFACKKALKIDGPVLIVTDSFYVAESVNKELPYWQSNGFFNNKKKPLKHVSKWKSIADCIQLKPDIIIIHEKGHQPTASTFHTEGNNLADKLATQGSYVVNAGKRTADGSEFEKRTADGSEFESPKKKAKVE

SEQ ID NO: 552 - protein, 2079 aa, synthetic construct
  source 1..2079: note = Description of Artificial Sequence: Synthetic polypeptide
MPAAKRVKLDGGDKKYSIGLDIGTNSVGWAVITDEYKVPSKKFKVLGNTDRHSIKKNLIGALLFDSGETAEATRLKRTARRRYTRRKNRICYLQEIFSNEMAKVDDSFFHRLEESFLVEEDKKHERHPIFGNIVDEVAYHEKYPTIYHLRKKLVDSTDKADLRLIYLALAHMIKFRGHFLIEGDLNPDNSDVDKLFIQLVQTYNQLFEENPINASGVDAKAILSARLSKSRRLENLIAQLPGEKKNGLFGNLIALSLGLTPNFKSNFDLAEDAKLQLSKDTYDDDLDNLLAQIGDQYADLFLAAKNLSDAILLSDILRVNTEITKAPLSASMIKRYDEHHQDLTLLKALVRQQLPEKYKEIFFDQSKNGYAGYIDGGASQEEFYKFIKPILEKMDGTEELLVKLNREDLLRKQRTFDNGSIPHQIHLGELHAILRRQEDFYPFLKDNREKIEKILTFRIPYYVGPLARGNSRFAWMTRKSEETITPWNFEEVVDKGASAQSFIERMTNFDKNLPNEKVLPKHSLLYEYFTVYNELTKVKYVTEGMRKPAFLSGEQKKAIVDLLFKTNRKVTVKQLKEDYFKKIECFDSVEISGVEDRFNASLGTYHDLLKIIKDKDFLDNEENEDILEDIVLTLTLFEDREMIEERLKTYAHLFDDKVMKQLKRRRYTGWGRLSRKLINGIRDKQSGKTILDFLKSDGFANRNFMQLIHDDSLTFKEDIQKAQVSGQGDSLHEHIANLAGSPAIKKGILQTVKVVDELVKVMGRHKPENIVIEMARENQTTQKGQKNSRERMKRIEEGIKELGSQILKEHPVENTQLQNEKLYLYYLQNGRDMYVDQELDINRLSDYDVDHIVPQSFLKDDSIDNKVLTRSDKARGKSDNVPSEEVVKKMKNYWRQLLNAKLITQRKFDNLTKAERGGLSELDKAGFIKRQLVETRQITKHVAQILDSRMNTKYDENDKLIREVKVITLKSKLVSDFRKDFQFYKVREINNYHHAHDAYLNAVVGTALIKKYPKLESEFVYGDYKVYDVRKMIAKSEQEIGKATAKYFFYSNIMNFFKTEITLANGEIRKRPLIETNGETGEIVWDKGRDFATVRKVLSMPQVNIVKKTEVQTGGFSKESILPKRNSDKLIARKKDWDPKKYGGFDSPTVAYSVLVVAKVEKGKSKKLKSVKELLGITIMERSSFEKNPIDFLEAKGYKEVKKDLIIKLPKYSLFELENGRKRMLASAGELQKGNELALPSKYVNFLYLASHYEKLKGSPEDNEQKQLFVEQHKHYLDEIIEQISEFSKRVILADANLDKVLSAYNKHRDKPIREQAENIIHLFTLTNLGAPAAFKYFDTTIDRKRYTSTKEVLDATLIHQSITGLYETRIDLSQLGGDGGGGSGGIPWLMKKPLQLTTLVPLQEYEERLLKQTMLTGSYKEKLQSLFLKYDALWQHWENQVGHRRIKPHHIATGTVNPRPQKQYPINPKAKASIQTVINDLLKQGVLIQQNSIMNTPVYPVPKPDGKWRMVLDYREVNKTIPLIAAQNQHSAGILSSIFRGKYKTTLDLSNGFWAHSITPESYWLTAFTWLGQQYCWTRLPQGFLNSPALFNADVVDLLKEVPNVQVYVDDIYISHDDPREHLEQLEKVFSLLLNAGYVVSLKKSEIAQHEVEFLGFNITKEGRGLTETFKQKLLNITPPRDLKQLQSILGKLNFARNFIPNFSELVKPLYNIIATAPGKYITWTTDNSQQLQNIISMLNSAENLEERNPEVRLIMKVNTSPSAGYIRFYNEFAKRPIMYLNYVYTKAEVKFTNTEKLLTTIHKGLIKALDLGMGQEILVYSPIVSMTKIQKTPLPERKALPIRWITWMSYLEDPRIQFHYDKTLPELQQVPTVTDDIIAKIKHPSEFSMVFYTDGSAIKHPNVNKSHNAGMGIAQVQFKPEFTVINTWSIPLGDHTAQLAEVAAVEFACKKALKIDGPVLIVTDSFYVAESVNKELPYWQSNGFFNNKKKPLKHVSKWKSIADCIQLKPDIIIIHEKGHQPTASTFHTEGNNLADKLATQGSYVVNAGKRTADGSEFEKRTADGSEFESPKKKAKVE

SEQ ID NO: 553 - protein, 2087 aa, synthetic construct
  source 1..2087: note = Description of Artificial Sequence: Synthetic polypeptide
MPAAKRVKLDGGDKKYSIGLDIGTNSVGWAVITDEYKVPSKKFKVLGNTDRHSIKKNLIGALLFDSGETAEATRLKRTARRRYTRRKNRICYLQEIFSNEMAKVDDSFFHRLEESFLVEEDKKHERHPIFGNIVDEVAYHEKYPTIYHLRKKLVDSTDKADLRLIYLALAHMIKFRGHFLIEGDLNPDNSDVDKLFIQLVQTYNQLFEENPINASGVDAKAILSARLSKSRRLENLIAQLPGEKKNGLFGNLIALSLGLTPNFKSNFDLAEDAKLQLSKDTYDDDLDNLLAQIGDQYADLFLAAKNLSDAILLSDILRVNTEITKAPLSASMIKRYDEHHQDLTLLKALVRQQLPEKYKEIFFDQSKNGYAGYIDGGASQEEFYKFIKPILEKMDGTEELLVKLNREDLLRKQRTFDNGSIPHQIHLGELHAILRRQEDFYPFLKDNREKIEKILTFRIPYYVGPLARGNSRFAWMTRKSEETITPWNFEEVVDKGASAQSFIERMTNFDKNLPNEKVLPKHSLLYEYFTVYNELTKVKYVTEGMRKPAFLSGEQKKAIVDLLFKTNRKVTVKQLKEDYFKKIECFDSVEISGVEDRFNASLGTYHDLLKIIKDKDFLDNEENEDILEDIVLTLTLFEDREMIEERLKTYAHLFDDKVMKQLKRRRYTGWGRLSRKLINGIRDKQSGKTILDFLKSDGFANRNFMQLIHDDSLTFKEDIQKAQVSGQGDSLHEHIANLAGSPAIKKGILQTVKVVDELVKVMGRHKPENIVIEMARENQTTQKGQKNSRERMKRIEEGIKELGSQILKEHPVENTQLQNEKLYLYYLQNGRDMYVDQELDINRLSDYDVDHIVPQSFLKDDSIDNKVLTRSDKARGKSDNVPSEEVVKKMKNYWRQLLNAKLITQRKFDNLTKAERGGLSELDKAGFIKRQLVETRQITKHVAQILDSRMNTKYDENDKLIREVKVITLKSKLVSDFRKDFQFYKVREINNYHHAHDAYLNAVVGTALIKKYPKLESEFVYGDYKVYDVRKMIAKSEQEIGKATAKYFFYSNIMNFFKTEITLANGEIRKRPLIETNGETGEIVWDKGRDFATVRKVLSMPQVNIVKKTEVQTGGFSKESILPKRNSDKLIARKKDWDPKKYGGFDSPTVAYSVLVVAKVEKGKSKKLKSVKELLGITIMERSSFEKNPIDFLEAKGYKEVKKDLIIKLPKYSLFELENGRKRMLASAGELQKGNELALPSKYVNFLYLASHYEKLKGSPEDNEQKQLFVEQHKHYLDEIIEQISEFSKRVILADANLDKVLSAYNKHRDKPIREQAENIIHLFTLTNLGAPAAFKYFDTTIDRKRYTSTKEVLDATLIHQSITGLYETRIDLSQLGGDGGGSSEAAAKPAPGGIPWLMKKPLQLTTLVPLQEYEERLLKQTMLTGSYKEKLQSLFLKYDALWQHWENQVGHRRIKPHHIATGTVNPRPQKQYPINPKAKASIQTVINDLLKQGVLIQQNSIMNTPVYPVPKPDGKWRMVLDYREVNKTIPLIAAQNQHSAGILSSIFRGKYKTTLDLSNGFWAHSITPESYWLTAFTWLGQQYCWTRLPQGFLNSPALFNADVVDLLKEVPNVQVYVDDIYISHDDPREHLEQLEKVFSLLLNAGYVVSLKKSEIAQHEVEFLGFNITKEGRGLTETFKQKLLNITPPRDLKQLQSILGKLNFARNFIPNFSELVKPLYNIIATAPGKYITWTTDNSQQLQNIISMLNSAENLEERNPEVRLIMKVNTSPSAGYIRFYNEFAKRPIMYLNYVYTKAEVKFTNTEKLLTTIHKGLIKALDLGMGQEILVYSPIVSMTKIQKTPLPERKALPIRWITWMSYLEDPRIQFHYDKTLPELQQVPTVTDDIIAKIKHPSEFSMVFYTDGSAIKHPNVNKSHNAGMGIAQVQFKPEFTVINTWSIPLGDHTAQLAEVAAVEFACKKALKIDGPVLIVTDSFYVAESVNKELPYWQSNGFFNNKKKPLKHVSKWKSIADCIQLKPDIIIIHEKGHQPTASTFHTEGNNLADKLATQGSYVVNAGKRTADGSEFEKRTADGSEFESPKKKAKVE

SEQ ID NO: 554 - protein, 2081 aa, synthetic construct
  source 1..2081: note = Description of Artificial Sequence: Synthetic polypeptide
MPAAKRVKLDGGDKKYSIGLDIGTNSVGWAVITDEYKVPSKKFKVLGNTDRHSIKKNLIGALLFDSGETAEATRLKRTARRRYTRRKNRICYLQEIFSNEMAKVDDSFFHRLEESFLVEEDKKHERHPIFGNIVDEVAYHEKYPTIYHLRKKLVDSTDKADLRLIYLALAHMIKFRGHFLIEGDLNPDNSDVDKLFIQLVQTYNQLFEENPINASGVDAKAILSARLSKSRRLENLIAQLPGEKKNGLFGNLIALSLGLTPNFKSNFDLAEDAKLQLSKDTYDDDLDNLLAQIGDQYADLFLAAKNLSDAILLSDILRVNTEITKAPLSASMIKRYDEHHQDLTLLKALVRQQLPEKYKEIFFDQSKNGYAGYIDGGASQEEFYKFIKPILEKMDGTEELLVKLNREDLLRKQRTFDNGSIPHQIHLGELHAILRRQEDFYPFLKDNREKIEKILTFRIPYYVGPLARGNSRFAWMTRKSEETITPWNFEEVVDKGASAQSFIERMTNFDKNLPNEKVLPKHSLLYEYFTVYNELTKVKYVTEGMRKPAFLSGEQKKAIVDLLFKTNRKVTVKQLKEDYFKKIECFDSVEISGVEDRFNASLGTYHDLLKIIKDKDFLDNEENEDILEDIVLTLTLFEDREMIEERLKTYAHLFDDKVMKQLKRRRYTGWGRLSRKLINGIRDKQSGKTILDFLKSDGFANRNFMQLIHDDSLTFKEDIQKAQVSGQGDSLHEHIANLAGSPAIKKGILQTVKVVDELVKVMGRHKPENIVIEMARENQTTQKGQKNSRERMKRIEEGIKELGSQILKEHPVENTQLQNEKLYLYYLQNGRDMYVDQELDINRLSDYDVDHIVPQSFLKDDSIDNKVLTRSDKARGKSDNVPSEEVVKKMKNYWRQLLNAKLITQRKFDNLTKAERGGLSELDKAGFIKRQLVETRQITKHVAQILDSRMNTKYDENDKLIREVKVITLKSKLVSDFRKDFQFYKVREINNYHHAHDAYLNAVVGTALIKKYPKLESEFVYGDYKVYDVRKMIAKSEQEIGKATAKYFFYSNIMNFFKTEITLANGEIRKRPLIETNGETGEIVWDKGRDFATVRKVLSMPQVNIVKKTEVQTGGFSKESILPKRNSDKLIARKKDWDPKKYGGFDSPTVAYSVLVVAKVEKGKSKKLKSVKELLGITIMERSSFEKNPIDFLEAKGYKEVKKDLIIKLPKYSLFELENGRKRMLASAGELQKGNELALPSKYVNFLYLASHYEKLKGSPEDNEQKQLFVEQHKHYLDEIIEQISEFSKRVILADANLDKVLSAYNKHRDKPIREQAENIIHLFTLTNLGAPAAFKYFDTTIDRKRYTSTKEVLDATLIHQSITGLYETRIDLSQLGGDGGEAAAKGGIPWLMKKPLQLTTLVPLQEYEERLLKQTMLTGSYKEKLQSLFLKYDALWQHWENQVGHRRIKPHHIATGTVNPRPQKQYPINPKAKASIQTVINDLLKQGVLIQQNSIMNTPVYPVPKPDGKWRMVLDYREVNKTIPLIAAQNQHSAGILSSIFRGKYKTTLDLSNGFWAHSITPESYWLTAFTWLGQQYCWTRLPQGFLNSPALFNADVVDLLKEVPNVQVYVDDIYISHDDPREHLEQLEKVFSLLLNAGYVVSLKKSEIAQHEVEFLGFNITKEGRGLTETFKQKLLNITPPRDLKQLQSILGKLNFARNFIPNFSELVKPLYNIIATAPGKYITWTTDNSQQLQNIISMLNSAENLEERNPEVRLIMKVNTSPSAGYIRFYNEFAKRPIMYLNYVYTKAEVKFTNTEKLLTTIHKGLIKALDLGMGQEILVYSPIVSMTKIQKTPLPERKALPIRWITWMSYLEDPRIQFHYDKTLPELQQVPTVTDDIIAKIKHPSEFSMVFYTDGSAIKHPNVNKSHNAGMGIAQVQFKPEFTVINTWSIPLGDHTAQLAEVAAVEFACKKALKIDGPVLIVTDSFYVAESVNKELPYWQSNGFFNNKKKPLKHVSKWKSIADCIQLKPDIIIIHEKGHQPTASTFHTEGNNLADKLATQGSYVVNAGKRTADGSEFEKRTADGSEFESPKKKAKVE

SEQ ID NO: 555 - protein, 2087 aa, synthetic construct
  source 1..2087: note = Description of Artificial Sequence: Synthetic polypeptide
MPAAKRVKLDGGDKKYSIGLDIGTNSVGWAVITDEYKVPSKKFKVLGNTDRHSIKKNLIGALLFDSGETAEATRLKRTARRRYTRRKNRICYLQEIFSNEMAKVDDSFFHRLEESFLVEEDKKHERHPIFGNIVDEVAYHEKYPTIYHLRKKLVDSTDKADLRLIYLALAHMIKFRGHFLIEGDLNPDNSDVDKLFIQLVQTYNQLFEENPINASGVDAKAILSARLSKSRRLENLIAQLPGEKKNGLFGNLIALSLGLTPNFKSNFDLAEDAKLQLSKDTYDDDLDNLLAQIGDQYADLFLAAKNLSDAILLSDILRVNTEITKAPLSASMIKRYDEHHQDLTLLKALVRQQLPEKYKEIFFDQSKNGYAGYIDGGASQEEFYKFIKPILEKMDGTEELLVKLNREDLLRKQRTFDNGSIPHQIHLGELHAILRRQEDFYPFLKDNREKIEKILTFRIPYYVGPLARGNSRFAWMTRKSEETITPWNFEEVVDKGASAQSFIERMTNFDKNLPNEKVLPKHSLLYEYFTVYNELTKVKYVTEGMRKPAFLSGEQKKAIVDLLFKTNRKVTVKQLKEDYFKKIECFDSVEISGVEDRFNASLGTYHDLLKIIKDKDFLDNEENEDILEDIVLTLTLFEDREMIEERLKTYAHLFDDKVMKQLKRRRYTGWGRLSRKLINGIRDKQSGKTILDFLKSDGFANRNFMQLIHDDSLTFKEDIQKAQVSGQGDSLHEHIANLAGSPAIKKGILQTVKVVDELVKVMGRHKPENIVIEMARENQTTQKGQKNSRERMKRIEEGIKELGSQILKEHPVENTQLQNEKLYLYYLQNGRDMYVDQELDINRLSDYDVDHIVPQSFLKDDSIDNKVLTRSDKARGKSDNVPSEEVVKKMKNYWRQLLNAKLITQRKFDNLTKAERGGLSELDKAGFIKRQLVETRQITKHVAQILDSRMNTKYDENDKLIREVKVITLKSKLVSDFRKDFQFYKVREINNYHHAHDAYLNAVVGTALIKKYPKLESEFVYGDYKVYDVRKMIAKSEQEIGKATAKYFFYSNIMNFFKTEITLANGEIRKRPLIETNGETGEIVWDKGRDFATVRKVLSMPQVNIVKKTEVQTGGFSKESILPKRNSDKLIARKKDWDPKKYGGFDSPTVAYSVLVVAKVEKGKSKKLKSVKELLGITIMERSSFEKNPIDFLEAKGYKEVKKDLIIKLPKYSLFELENGRKRMLASAGELQKGNELALPSKYVNFLYLASHYEKLKGSPEDNEQKQLFVEQHKHYLDEIIEQISEFSKRVILADANLDKVLSAYNKHRDKPIREQAENIIHLFTLTNLGAPAAFKYFDTTIDRKRYTSTKEVLDATLIHQSITGLYETRIDLSQLGGDGGEAAAKGGSGGGGGIPWLMKKPLQLTTLVPLQEYEERLLKQTMLTGSYKEKLQSLFLKYDALWQHWENQVGHRRIKPHHIATGTVNPRPQKQYPINPKAKASIQTVINDLLKQGVLIQQNSIMNTPVYPVPKPDGKWRMVLDYREVNKTIPLIAAQNQHSAGILSSIFRGKYKTTLDLSNGFWAHSITPESYWLTAFTWLGQQYCWTRLPQGFLNSPALFNADVVDLLKEVPNVQVYVDDIYISHDDPREHLEQLEKVFSLLLNAGYVVSLKKSEIAQHEVEFLGFNITKEGRGLTETFKQKLLNITPPRDLKQLQSILGKLNFARNFIPNFSELVKPLYNIIATAPGKYITWTTDNSQQLQNIISMLNSAENLEERNPEVRLIMKVNTSPSAGYIRFYNEFAKRPIMYLNYVYTKAEVKFTNTEKLLTTIHKGLIKALDLGMGQEILVYSPIVSMTKIQKTPLPERKALPIRWITWMSYLEDPRIQFHYDKTLPELQQVPTVTDDIIAKIKHPSEFSMVFYTDGSAIKHPNVNKSHNAGMGIAQVQFKPEFTVINTWSIPLGDHTAQLAEVAAVEFACKKALKIDGPVLIVTDSFYVAESVNKELPYWQSNGFFNNKKKPLKHVSKWKSIADCIQLKPDIIIIHEKGHQPTASTFHTEGNNLADKLATQGSYVVNAGKRTADGSEFEKRTADGSEFESPKKKAKVE

SEQ ID NO: 556 - protein, 2096 aa, synthetic construct
  source 1..2096: note = Description of Artificial Sequence: Synthetic polypeptide
MPAAKRVKLDGGDKKYSIGLDIGTNSVGWAVITDEYKVPSKKFKVLGNTDRHSIKKNLIGALLFDSGETAEATRLKRTARRRYTRRKNRICYLQEIFSNEMAKVDDSFFHRLEESFLVEEDKKHERHPIFGNIVDEVAYHEKYPTIYHLRKKLVDSTDKADLRLIYLALAHMIKFRGHFLIEGDLNPDNSDVDKLFIQLVQTYNQLFEENPINASGVDAKAILSARLSKSRRLENLIAQLPGEKKNGLFGNLIALSLGLTPNFKSNFDLAEDAKLQLSKDTYDDDLDNLLAQIGDQYADLFLAAKNLSDAILLSDILRVNTEITKAPLSASMIKRYDEHHQDLTLLKALVRQQLPEKYKEIFFDQSKNGYAGYIDGGASQEEFYKFIKPILEKMDGTEELLVKLNREDLLRKQRTFDNGSIPHQIHLGELHAILRRQEDFYPFLKDNREKIEKILTFRIPYYVGPLARGNSRFAWMTRKSEETITPWNFEEVVDKGASAQSFIERMTNFDKNLPNEKVLPKHSLLYEYFTVYNELTKVKYVTEGMRKPAFLSGEQKKAIVDLLFKTNRKVTVKQLKEDYFKKIECFDSVEISGVEDRFNASLGTYHDLLKIIKDKDFLDNEENEDILEDIVLTLTLFEDREMIEERLKTYAHLFDDKVMKQLKRRRYTGWGRLSRKLINGIRDKQSGKTILDFLKSDGFANRNFMQLIHDDSLTFKEDIQKAQVSGQGDSLHEHIANLAGSPAIKKGILQTVKVVDELVKVMGRHKPENIVIEMARENQTTQKGQKNSRERMKRIEEGIKELGSQILKEHPVENTQLQNEKLYLYYLQNGRDMYVDQELDINRLSDYDVDHIVPQSFLKDDSIDNKVLTRSDKARGKSDNVPSEEVVKKMKNYWRQLLNAKLITQRKFDNLTKAERGGLSELDKAGFIKRQLVETRQITKHVAQILDSRMNTKYDENDKLIREVKVITLKSKLVSDFRKDFQFYKVREINNYHHAHDAYLNAVVGTALIKKYPKLESEFVYGDYKVYDVRKMIAKSEQEIGKATAKYFFYSNIMNFFKTEITLANGEIRKRPLIETNGETGEIVWDKGRDFATVRKVLSMPQVNIVKKTEVQTGGFSKESILPKRNSDKLIARKKDWDPKKYGGFDSPTVAYSVLVVAKVEKGKSKKLKSVKELLGITIMERSSFEKNPIDFLEAKGYKEVKKDLIIKLPKYSLFELENGRKRMLASAGELQKGNELALPSKYVNFLYLASHYEKLKGSPEDNEQKQLFVEQHKHYLDEIIEQISEFSKRVILADANLDKVLSAYNKHRDKPIREQAENIIHLFTLTNLGAPAAFKYFDTTIDRKRYTSTKEVLDATLIHQSITGLYETRIDLSQLGGDGGEAAAKEAAAKEAAAKEAAAKGGIPWLMKKPLQLTTLVPLQEYEERLLKQTMLTGSYKEKLQSLFLKYDALWQHWENQVGHRRIKPHHIATGTVNPRPQKQYPINPKAKASIQTVINDLLKQGVLIQQNSIMNTPVYPVPKPDGKWRMVLDYREVNKTIPLIAAQNQHSAGILSSIFRGKYKTTLDLSNGFWAHSITPESYWLTAFTWLGQQYCWTRLPQGFLNSPALFNADVVDLLKEVPNVQVYVDDIYISHDDPREHLEQLEKVFSLLLNAGYVVSLKKSEIAQHEVEFLGFNITKEGRGLTETFKQKLLNITPPRDLKQLQSILGKLNFARNFIPNFSELVKPLYNIIATAPGKYITWTTDNSQQLQNIISMLNSAENLEERNPEVRLIMKVNTSPSAGYIRFYNEFAKRPIMYLNYVYTKAEVKFTNTEKLLTTIHKGLIKALDLGMGQEILVYSPIVSMTKIQKTPLPERKALPIRWITWMSYLEDPRIQFHYDKTLPELQQVPTVTDDIIAKIKHPSEFSMVFYTDGSAIKHPNVNKSHNAGMGIAQVQFKPEFTVINTWSIPLGDHTAQLAEVAAVEFACKKALKIDGPVLIVTDSFYVAESVNKELPYWQSNGFFNNKKKPLKHVSKWKSIADCIQLKPDIIIIHEKGHQPTASTFHTEGNNLADKLATQGSYVVNAGKRTADGSEFEKRTADGSEFESPKKKAKVE

SEQ ID NO: 557 - protein, 2086 aa, synthetic construct
  source 1..2086: note = Description of Artificial Sequence: Synthetic polypeptide
MPAAKRVKLDGGDKKYSIGLDIGTNSVGWAVITDEYKVPSKKFKVLGNTDRHSIKKNLIGALLFDSGETAEATRLKRTARRRYTRRKNRICYLQEIFSNEMAKVDDSFFHRLEESFLVEEDKKHERHPIFGNIVDEVAYHEKYPTIYHLRKKLVDSTDKADLRLIYLALAHMIKFRGHFLIEGDLNPDNSDVDKLFIQLVQTYNQLFEENPINASGVDAKAILSARLSKSRRLENLIAQLPGEKKNGLFGNLIALSLGLTPNFKSNFDLAEDAKLQLSKDTYDDDLDNLLAQIGDQYADLFLAAKNLSDAILLSDILRVNTEITKAPLSASMIKRYDEHHQDLTLLKALVRQQLPEKYKEIFFDQSKNGYAGYIDGGASQEEFYKFIKPILEKMDGTEELLVKLNREDLLRKQRTFDNGSIPHQIHLGELHAILRRQEDFYPFLKDNREKIEKILTFRIPYYVGPLARGNSRFAWMTRKSEETITPWNFEEVVDKGASAQSFIERMTNFDKNLPNEKVLPKHSLLYEYFTVYNELTKVKYVTEGMRKPAFLSGEQKKAIVDLLFKTNRKVTVKQLKEDYFKKIECFDSVEISGVEDRFNASLGTYHDLLKIIKDKDFLDNEENEDILEDIVLTLTLFEDREMIEERLKTYAHLFDDKVMKQLKRRRYTGWGRLSRKLINGIRDKQSGKTILDFLKSDGFANRNFMQLIHDDSLTFKEDIQKAQVSGQGDSLHEHIANLAGSPAIKKGILQTVKVVDELVKVMGRHKPENIVIEMARENQTTQKGQKNSRERMKRIEEGIKELGSQILKEHPVENTQLQNEKLYLYYLQNGRDMYVDQELDINRLSDYDVDHIVPQSFLKDDSIDNKVLTRSDKARGKSDNVPSEEVVKKMKNYWRQLLNAKLITQRKFDNLTKAERGGLSELDKAGFIKRQLVETRQITKHVAQILDSRMNTKYDENDKLIREVKVITLKSKLVSDFRKDFQFYKVREINNYHHAHDAYLNAVVGTALIKKYPKLESEFVYGDYKVYDVRKMIAKSEQEIGKATAKYFFYSNIMNFFKTEITLANGEIRKRPLIETNGETGEIVWDKGRDFATVRKVLSMPQVNIVKKTEVQTGGFSKESILPKRNSDKLIARKKDWDPKKYGGFDSPTVAYSVLVVAKVEKGKSKKLKSVKELLGITIMERSSFEKNPIDFLEAKGYKEVKKDLIIKLPKYSLFELENGRKRMLASAGELQKGNELALPSKYVNFLYLASHYEKLKGSPEDNEQKQLFVEQHKHYLDEIIEQISEFSKRVILADANLDKVLSAYNKHRDKPIREQAENIIHLFTLTNLGAPAAFKYFDTTIDRKRYTSTKEVLDATLIHQSITGLYETRIDLSQLGGDGGGGGGSGGGGSGGIPWLMKKPLQLTTLVPLQEYEERLLKQTMLTGSYKEKLQSLFLKYDALWQHWENQVGHRRIKPHHIATGTVNPRPQKQYPINPKAKASIQTVINDLLKQGVLIQQNSIMNTPVYPVPKPDGKWRMVLDYREVNKTIPLIAAQNQHSAGILSSIFRGKYKTTLDLSNGFWAHSITPESYWLTAFTWLGQQYCWTRLPQGFLNSPALFNADVVDLLKEVPNVQVYVDDIYISHDDPREHLEQLEKVFSLLLNAGYVVSLKKSEIAQHEVEFLGFNITKEGRGLTETFKQKLLNITPPRDLKQLQSILGKLNFARNFIPNFSELVKPLYNIIATAPGKYITWTTDNSQQLQNIISMLNSAENLEERNPEVRLIMKVNTSPSAGYIRFYNEFAKRPIMYLNYVYTKAEVKFTNTEKLLTTIHKGLIKALDLGMGQEILVYSPIVSMTKIQKTPLPERKALPIRWITWMSYLEDPRIQFHYDKTLPELQQVPTVTDDIIAKIKHPSEFSMVFYTDGSAIKHPNVNKSHNAGMGIAQVQFKPEFTVINTWSIPLGDHTAQLAEVAAVEFACKKALKIDGPVLIVTDSFYVAESVNKELPYWQSNGFFNNKKKPLKHVSKWKSIADCIQLKPDIIIIHEKGHQPTASTFHTEGNNLADKLATQGSYVVNAGKRTADGSEFEKRTADGSEFESPKKKAKVE

SEQ ID NO: 558 - protein, 2087 aa, synthetic construct
  source 1..2087: note = Description of Artificial Sequence: Synthetic polypeptide
MPAAKRVKLDGGDKKYSIGLDIGTNSVGWAVITDEYKVPSKKFKVLGNTDRHSIKKNLIGALLFDSGETAEATRLKRTARRRYTRRKNRICYLQEIFSNEMAKVDDSFFHRLEESFLVEEDKKHERHPIFGNIVDEVAYHEKYPTIYHLRKKLVDSTDKADLRLIYLALAHMIKFRGHFLIEGDLNPDNSDVDKLFIQLVQTYNQLFEENPINASGVDAKAILSARLSKSRRLENLIAQLPGEKKNGLFGNLIALSLGLTPNFKSNFDLAEDAKLQLSKDTYDDDLDNLLAQIGDQYADLFLAAKNLSDAILLSDILRVNTEITKAPLSASMIKRYDEHHQDLTLLKALVRQQLPEKYKEIFFDQSKNGYAGYIDGGASQEEFYKFIKPILEKMDGTEELLVKLNREDLLRKQRTFDNGSIPHQIHLGELHAILRRQEDFYPFLKDNREKIEKILTFRIPYYVGPLARGNSRFAWMTRKSEETITPWNFEEVVDKGASAQSFIERMTNFDKNLPNEKVLPKHSLLYEYFTVYNELTKVKYVTEGMRKPAFLSGEQKKAIVDLLFKTNRKVTVKQLKEDYFKKIECFDSVEISGVEDRFNASLGTYHDLLKIIKDKDFLDNEENEDILEDIVLTLTLFEDREMIEERLKTYAHLFDDKVMKQLKRRRYTGWGRLSRKLINGIRDKQSGKTILDFLKSDGFANRNFMQLIHDDSLTFKEDIQKAQVSGQGDSLHEHIANLAGSPAIKKGILQTVKVVDELVKVMGRHKPENIVIEMARENQTTQKGQKNSRERMKRIEEGIKELGSQILKEHPVENTQLQNEKLYLYYLQNGRDMYVDQELDINRLSDYDVDHIVPQSFLKDDSIDNKVLTRSDKARGKSDNVPSEEVVKKMKNYWRQLLNAKLITQRKFDNLTKAERGGLSELDKAGFIKRQLVETRQITKHVAQILDSRMNTKYDENDKLIREVKVITLKSKLVSDFRKDFQFYKVREINNYHHAHDAYLNAVVGTALIKKYPKLESEFVYGDYKVYDVRKMIAKSEQEIGKATAKYFFYSNIMNFFKTEITLANGEIRKRPLIETNGETGEIVWDKGRDFATVRKVLSMPQVNIVKKTEVQTGGFSKESILPKRNSDKLIARKKDWDPKKYGGFDSPTVAYSVLVVAKVEKGKSKKLKSVKELLGITIMERSSFEKNPIDFLEAKGYKEVKKDLIIKLPKYSLFELENGRKRMLASAGELQKGNELALPSKYVNFLYLASHYEKLKGSPEDNEQKQLFVEQHKHYLDEIIEQISEFSKRVILADANLDKVLSAYNKHRDKPIREQAENIIHLFTLTNLGAPAAFKYFDTTIDRKRYTSTKEVLDATLIHQSITGLYETRIDLSQLGGDGGEAAAKPAPGSSGGIPWLMKKPLQLTTLVPLQEYEERLLKQTMLTGSYKEKLQSLFLKYDALWQHWENQVGHRRIKPHHIATGTVNPRPQKQYPINPKAKASIQTVINDLLKQGVLIQQNSIMNTPVYPVPKPDGKWRMVLDYREVNKTIPLIAAQNQHSAGILSSIFRGKYKTTLDLSNGFWAHSITPESYWLTAFTWLGQQYCWTRLPQGFLNSPALFNADVVDLLKEVPNVQVYVDDIYISHDDPREHLEQLEKVFSLLLNAGYVVSLKKSEIAQHEVEFLGFNITKEGRGLTETFKQKLLNITPPRDLKQLQSILGKLNFARNFIPNFSELVKPLYNIIATAPGKYITWTTDNSQQLQNIISMLNSAENLEERNPEVRLIMKVNTSPSAGYIRFYNEFAKRPIMYLNYVYTKAEVKFTNTEKLLTTIHKGLIKALDLGMGQEILVYSPIVSMTKIQKTPLPERKALPIRWITWMSYLEDPRIQFHYDKTLPELQQVPTVTDDIIAKIKHPSEFSMVFYTDGSAIKHPNVNKSHNAGMGIAQVQFKPEFTVINTWSIPLGDHTAQLAEVAAVEFACKKALKIDGPVLIVTDSFYVAESVNKELPYWQSNGFFNNKKKPLKHVSKWKSIADCIQLKPDIIIIHEKGHQPTASTFHTEGNNLADKLATQGSYVVNAGKRTADGSEFEKRTADGSEFESPKKKAKVE

SEQ ID NO: 559 - protein, 2087 aa, synthetic construct
  source 1..2087: note = Description of Artificial Sequence: Synthetic polypeptide
MPAAKRVKLDGGDKKYSIGLDIGTNSVGWAVITDEYKVPSKKFKVLGNTDRHSIKKNLIGALLFDSGETAEATRLKRTARRRYTRRKNRICYLQEIFSNEMAKVDDSFFHRLEESFLVEEDKKHERHPIFGNIVDEVAYHEKYPTIYHLRKKLVDSTDKADLRLIYLALAHMIKFRGHFLIEGDLNPDNSDVDKLFIQLVQTYNQLFEENPINASGVDAKAILSARLSKSRRLENLIAQLPGEKKNGLFGNLIALSLGLTPNFKSNFDLAEDAKLQLSKDTYDDDLDNLLAQIGDQYADLFLAAKNLSDAILLSDILRVNTEITKAPLSASMIKRYDEHHQDLTLLKALVRQQLPEKYKEIFFDQSKNGYAGYIDGGASQEEFYKFIKPILEKMDGTEELLVKLNREDLLRKQRTFDNGSIPHQIHLGELHAILRRQEDFYPFLKDNREKIEKILTFRIPYYVGPLARGNSRFAWMTRKSEETITPWNFEEVVDKGASAQSFIERMTNFDKNLPNEKVLPKHSLLYEYFTVYNELTKVKYVTEGMRKPAFLSGEQKKAIVDLLFKTNRKVTVKQLKEDYFKKIECFDSVEISGVEDRFNASLGTYHDLLKIIKDKDFLDNEENEDILEDIVLTLTLFEDREMIEERLKTYAHLFDDKVMKQLKRRRYTGWGRLSRKLINGIRDKQSGKTILDFLKSDGFANRNFMQLIHDDSLTFKEDIQKAQVSGQGDSLHEHIANLAGSPAIKKGILQTVKVVDELVKVMGRHKPENIVIEMARENQTTQKGQKNSRERMKRIEEGIKELGSQILKEHPVENTQLQNEKLYLYYLQNGRDMYVDQELDINRLSDYDVDHIVPQSFLKDDSIDNKVLTRSDKARGKSDNVPSEEVVKKMKNYWRQLLNAKLITQRKFDNLTKAERGGLSELDKAGFIKRQLVETRQITKHVAQILDSRMNTKYDENDKLIREVKVITLKSKLVSDFRKDFQFYKVREINNYHHAHDAYLNAVVGTALIKKYPKLESEFVYGDYKVYDVRKMIAKSEQEIGKATAKYFFYSNIMNFFKTEITLANGEIRKRPLIETNGETGEIVWDKGRDFATVRKVLSMPQVNIVKKTEVQTGGFSKESILPKRNSDKLIARKKDWDPKKYGGFDSPTVAYSVLVVAKVEKGKSKKLKSVKELLGITIMERSSFEKNPIDFLEAKGYKEVKKDLIIKLPKYSLFELENGRKRMLASAGELQKGNELALPSKYVNFLYLASHYEKLKGSPEDNEQKQLFVEQHKHYLDEIIEQISEFSKRVILADANLDKVLSAYNKHRDKPIREQAENIIHLFTLTNLGAPAAFKYFDTTIDRKRYTSTKEVLDATLIHQSITGLYETRIDLSQLGGDGGPAPEAAAKGGGGGIPWLMKKPLQLTTLVPLQEYEERLLKQTMLTGSYKEKLQSLFLKYDALWQHWENQVGHRRIKPHHIATGTVNPRPQKQYPINPKAKASIQTVINDLLKQGVLIQQNSIMNTPVYPVPKPDGKWRMVLDYREVNKTIPLIAAQNQHSAGILSSIFRGKYKTTLDLSNGFWAHSITPESYWLTAFTWLGQQYCWTRLPQGFLNSPALFNADVVDLLKEVPNVQVYVDDIYISHDDPREHLEQLEKVFSLLLNAGYVVSLKKSEIAQHEVEFLGFNITKEGRGLTETFKQKLLNITPPRDLKQLQSILGKLNFARNFIPNFSELVKPLYNIIATAPGKYITWTTDNSQQLQNIISMLNSAENLEERNPEVRLIMKVNTSPSAGYIRFYNEFAKRPIMYLNYVYTKAEVKFTNTEKLLTTIHKGLIKALDLGMGQEILVYSPIVSMTKIQKTPLPERKALPIRWITWMSYLEDPRIQFHYDKTLPELQQVPTVTDDIIAKIKHPSEFSMVFYTDGSAIKHPNVNKSHNAGMGIAQVQFKPEFTVINTWSIPLGDHTAQLAEVAAVEFACKKALKIDGPVLIVTDSFYVAESVNKELPYWQSNGFFNNKKKPLKHVSKWKSIADCIQLKPDIIIIHEKGHQPTASTFHTEGNNLADKLATQGSYVVNAGKRTADGSEFEKRTADGSEFESPKKKAKVE

SEQ ID NO: 560 - protein, 2083 aa, synthetic construct
  source 1..2083: note = Description of Artificial Sequence: Synthetic polypeptide
MPAAKRVKLDGGDKKYSIGLDIGTNSVGWAVITDEYKVPSKKFKVLGNTDRHSIKKNLIGALLFDSGETAEATRLKRTARRRYTRRKNRICYLQEIFSNEMAKVDDSFFHRLEESFLVEEDKKHERHPIFGNIVDEVAYHEKYPTIYHLRKKLVDSTDKADLRLIYLALAHMIKFRGHFLIEGDLNPDNSDVDKLFIQLVQTYNQLFEENPINASGVDAKAILSARLSKSRRLENLIAQLPGEKKNGLFGNLIALSLGLTPNFKSNFDLAEDAKLQLSKDTYDDDLDNLLAQIGDQYADLFLAAKNLSDAILLSDILRVNTEITKAPLSASMIKRYDEHHQDLTLLKALVRQQLPEKYKEIFFDQSKNGYAGYIDGGASQEEFYKFIKPILEKMDGTEELLVKLNREDLLRKQRTFDNGSIPHQIHLGELHAILRRQEDFYPFLKDNREKIEKILTFRIPYYVGPLARGNSRFAWMTRKSEETITPWNFEEVVDKGASAQSFIERMTNFDKNLPNEKVLPKHSLLYEYFTVYNELTKVKYVTEGMRKPAFLSGEQKKAIVDLLFKTNRKVTVKQLKEDYFKKIECFDSVEISGVEDRFNASLGTYHDLLKIIKDKDFLDNEENEDILEDIVLTLTLFEDREMIEERLKTYAHLFDDKVMKQLKRRRYTGWGRLSRKLINGIRDKQSGKTILDFLKSDGFANRNFMQLIHDDSLTFKEDIQKAQVSGQGDSLHEHIANLAGSPAIKKGILQTVKVVDELVKVMGRHKPENIVIEMARENQTTQKGQKNSRERMKRIEEGIKELGSQILKEHPVENTQLQNEKLYLYYLQNGRDMYVDQELDINRLSDYDVDHIVPQSFLKDDSIDNKVLTRSDKARGKSDNVPSEEVVKKMKNYWRQLLNAKLITQRKFDNLTKAERGGLSELDKAGFIKRQLVETRQITKHVAQILDSRMNTKYDENDKLIREVKVITLKSKLVSDFRKDFQFYKVREINNYHHAHDAYLNAVVGTALIKKYPKLESEFVYGDYKVYDVRKMIAKSEQEIGKATAKYFFYSNIMNFFKTEITLANGEIRKRPLIETNGETGEIVWDKGRDFATVRKVLSMPQVNIVKKTEVQTGGFSKESILPKRNSDKLIARKKDWDPKKYGGFDSPTVAYSVLVVAKVEKGKSKKLKSVKELLGITIMERSSFEKNPIDFLEAKGYKEVKKDLIIKLPKYSLFELENGRKRMLASAGELQKGNELALPSKYVNFLYLASHYEKLKGSPEDNEQKQLFVEQHKHYLDEIIEQISEFSKRVILADANLDKVLSAYNKHRDKPIREQAENIIHLFTLTNLGAPAAFKYFDTTIDRKRYTSTKEVLDATLIHQSITGLYETRIDLSQLGGDGGPAPAPAPGGIPWLMKKPLQLTTLVPLQEYEERLLKQTMLTGSYKEKLQSLFLKYDALWQHWENQVGHRRIKPHHIATGTVNPRPQKQYPINPKAKASIQTVINDLLKQGVLIQQNSIMNTPVYPVPKPDGKWRMVLDYREVNKTIPLIAAQNQHSAGILSSIFRGKYKTTLDLSNGFWAHSITPESYWLTAFTWLGQQYCWTRLPQGFLNSPALFNADVVDLLKEVPNVQVYVDDIYISHDDPREHLEQLEKVFSLLLNAGYVVSLKKSEIAQHEVEFLGFNITKEGRGLTETFKQKLLNITPPRDLKQLQSILGKLNFARNFIPNFSELVKPLYNIIATAPGKYITWTTDNSQQLQNIISMLNSAENLEERNPEVRLIMKVNTSPSAGYIRFYNEFAKRPIMYLNYVYTKAEVKFTNTEKLLTTIHKGLIKALDLGMGQEILVYSPIVSMTKIQKTPLPERKALPIRWITWMSYLEDPRIQFHYDKTLPELQQVPTVTDDIIAKIKHPSEFSMVFYTDGSAIKHPNVNKSHNAGMGIAQVQFKPEFTVINTWSIPLGDHTAQLAEVAAVEFACKKALKIDGPVLIVTDSFYVAESVNKELPYWQSNGFFNNKKKPLKHVSKWKSIADCIQLKPDIIIIHEKGHQPTASTFHTEGNNLADKLATQGSYVVNAGKRTADGSEFEKRTADGSEFESPKKKAKVE

SEQ ID NO: 561 - protein, 2087 aa, synthetic construct
  source 1..2087: note = Description of Artificial Sequence: Synthetic polypeptide
MPAAKRVKLDGGDKKYSIGLDIGTNSVGWAVITDEYKVPSKKFKVLGNTDRHSIKKNLIGALLFDSGETAEATRLKRTARRRYTRRKNRICYLQEIFSNEMAKVDDSFFHRLEESFLVEEDKKHERHPIFGNIVDEVAYHEKYPTIYHLRKKLVDSTDKADLRLIYLALAHMIKFRGHFLIEGDLNPDNSDVDKLFIQLVQTYNQLFEENPINASGVDAKAILSARLSKSRRLENLIAQLPGEKKNGLFGNLIALSLGLTPNFKSNFDLAEDAKLQLSKDTYDDDLDNLLAQIGDQYADLFLAAKNLSDAILLSDILRVNTEITKAPLSASMIKRYDEHHQDLTLLKALVRQQLPEKYKEIFFDQSKNGYAGYIDGGASQEEFYKFIKPILEKMDGTEELLVKLNREDLLRKQRTFDNGSIPHQIHLGELHAILRRQEDFYPFLKDNREKIEKILTFRIPYYVGPLARGNSRFAWMTRKSEETITPWNFEEVVDKGASAQSFIERMTNFDKNLPNEKVLPKHSLLYEYFTVYNELTKVKYVTEGMRKPAFLSGEQKKAIVDLLFKTNRKVTVKQLKEDYFKKIECFDSVEISGVEDRFNASLGTYHDLLKIIKDKDFLDNEENEDILEDIVLTLTLFEDREMIEERLKTYAHLFDDKVMKQLKRRRYTGWGRLSRKLINGIRDKQSGKTILDFLKSDGFANRNFMQLIHDDSLTFKEDIQKAQVSGQGDSLHEHIANLAGSPAIKKGILQTVKVVDELVKVMGRHKPENIVIEMARENQTTQKGQKNSRERMKRIEEGIKELGSQILKEHPVENTQLQNEKLYLYYLQNGRDMYVDQELDINRLSDYDVDHIVPQSFLKDDSIDNKVLTRSDKARGKSDNVPSEEVVKKMKNYWRQLLNAKLITQRKFDNLTKAERGGLSELDKAGFIKRQLVETRQITKHVAQILDSRMNTKYDENDKLIREVKVITLKSKLVSDFRKDFQFYKVREINNYHHAHDAYLNAVVGTALIKKYPKLESEFVYGDYKVYDVRKMIAKSEQEIGKATAKYFFYSNIMNFFKTEITLANGEIRKRPLIETNGETGEIVWDKGRDFATVRKVLSMPQVNIVKKTEVQTGGFSKESILPKRNSDKLIARKKDWDPKKYGGFDSPTVAYSVLVVAKVEKGKSKKLKSVKELLGITIMERSSFEKNPIDFLEAKGYKEVKKDLIIKLPKYSLFELENGRKRMLASAGELQKGNELALPSKYVNFLYLASHYEKLKGSPEDNEQKQLFVEQHKHYLDEIIEQISEFSKRVILADANLDKVLSAYNKHRDKPIREQAENIIHLFTLTNLGAPAAFKYFDTTIDRKRYTSTKEVLDATLIHQSITGLYETRIDLSQLGGDGGGGSEAAAKGSSGGIPWLMKKPLQLTTLVPLQEYEERLLKQTMLTGSYKEKLQSLFLKYDALWQHWENQVGHRRIKPHHIATGTVNPRPQKQYPINPKAKASIQTVINDLLKQGVLIQQNSIMNTPVYPVPKPDGKWRMVLDYREVNKTIPLIAAQNQHSAGILSSIFRGKYKTTLDLSNGFWAHSITPESYWLTAFTWLGQQYCWTRLPQGFLNSPALFNADVVDLLKEVPNVQVYVDDIYISHDDPREHLEQLEKVFSLLLNAGYVVSLKKSEIAQHEVEFLGFNITKEGRGLTETFKQKLLNITPPRDLKQLQSILGKLNFARNFIPNFSELVKPLYNIIATAPGKYITWTTDNSQQLQNIISMLNSAENLEERNPEVRLIMKVNTSPSAGYIRFYNEFAKRPIMYLNYVYTKAEVKFTNTEKLLTTIHKGLIKALDLGMGQEILVYSPIVSMTKIQKTPLPERKALPIRWITWMSYLEDPRIQFHYDKTLPELQQVPTVTDDIIAKIKHPSEFSMVFYTDGSAIKHPNVNKSHNAGMGIAQVQFKPEFTVINTWSIPLGDHTAQLAEVAAVEFACKKALKIDGPVLIVTDSFYVAESVNKELPYWQSNGFFNNKKKPLKHVSKWKSIADCIQLKPDIIIIHEKGHQPTASTFHTEGNNLADKLATQGSYVVNAGKRTADGSEFEKRTADGSEFESPKKKAKVE

SEQ ID NO: 562 - protein, 2085 aa, synthetic construct
  source 1..2085: note = Description of Artificial Sequence: Synthetic polypeptide
MPAAKRVKLDGGDKKYSIGLDIGTNSVGWAVITDEYKVPSKKFKVLGNTDRHSIKKNLIGALLFDSGETAEATRLKRTARRRYTRRKNRICYLQEIFSNEMAKVDDSFFHRLEESFLVEEDKKHERHPIFGNIVDEVAYHEKYPTIYHLRKKLVDSTDKADLRLIYLALAHMIKFRGHFLIEGDLNPDNSDVDKLFIQLVQTYNQLFEENPINASGVDAKAILSARLSKSRRLENLIAQLPGEKKNGLFGNLIALSLGLTPNFKSNFDLAEDAKLQLSKDTYDDDLDNLLAQIGDQYADLFLAAKNLSDAILLSDILRVNTEITKAPLSASMIKRYDEHHQDLTLLKALVRQQLPEKYKEIFFDQSKNGYAGYIDGGASQEEFYKFIKPILEKMDGTEELLVKLNREDLLRKQRTFDNGSIPHQIHLGELHAILRRQEDFYPFLKDNREKIEKILTFRIPYYVGPLARGNSRFAWMTRKSEETITPWNFEEVVDKGASAQSFIERMTNFDKNLPNEKVLPKHSLLYEYFTVYNELTKVKYVTEGMRKPAFLSGEQKKAIVDLLFKTNRKVTVKQLKEDYFKKIECFDSVEISGVEDRFNASLGTYHDLLKIIKDKDFLDNEENEDILEDIVLTLTLFEDREMIEERLKTYAHLFDDKVMKQLKRRRYTGWGRLSRKLINGIRDKQSGKTILDFLKSDGFANRNFMQLIHDDSLTFKEDIQKAQVSGQGDSLHEHIANLAGSPAIKKGILQTVKVVDELVKVMGRHKPENIVIEMARENQTTQKGQKNSRERMKRIEEGIKELGSQILKEHPVENTQLQNEKLYLYYLQNGRDMYVDQELDINRLSDYDVDHIVPQSFLKDDSIDNKVLTRSDKARGKSDNVPSEEVVKKMKNYWRQLLNAKLITQRKFDNLTKAERGGLSELDKAGFIKRQLVETRQITKHVAQILDSRMNTKYDENDKLIREVKVITLKSKLVSDFRKDFQFYKVREINNYHHAHDAYLNAVVGTALIKKYPKLESEFVYGDYKVYDVRKMIAKSEQEIGKATAKYFFYSNIMNFFKTEITLANGEIRKRPLIETNGETGEIVWDKGRDFATVRKVLSMPQVNIVKKTEVQTGGFSKESILPKRNSDKLIARKKDWDPKKYGGFDSPTVAYSVLVVAKVEKGKSKKLKSVKELLGITIMERSSFEKNPIDFLEAKGYKEVKKDLIIKLPKYSLFELENGRKRMLASAGELQKGNELALPSKYVNFLYLASHYEKLKGSPEDNEQKQLFVEQHKHYLDEIIEQISEFSKRVILADANLDKVLSAYNKHRDKPIREQAENIIHLFTLTNLGAPAAFKYFDTTIDRKRYTSTKEVLDATLIHQSITGLYETRIDLSQLGGDGGGSSPAPGGGGGIPWLMKKPLQLTTLVPLQEYEERLLKQTMLTGSYKEKLQSLFLKYDALWQHWENQVGHRRIKPHHIATGTVNPRPQKQYPINPKAKASIQTVINDLLKQGVLIQQNSIMNTPVYPVPKPDGKWRMVLDYREVNKTIPLIAAQNQHSAGILSSIFRGKYKTTLDLSNGFWAHSITPESYWLTAFTWLGQQYCWTRLPQGFLNSPALFNADVVDLLKEVPNVQVYVDDIYISHDDPREHLEQLEKVFSLLLNAGYVVSLKKSEIAQHEVEFLGFNITKEGRGLTETFKQKLLNITPPRDLKQLQSILGKLNFARNFIPNFSELVKPLYNIIATAPGKYITWTTDNSQQLQNIISMLNSAENLEERNPEVRLIMKVNTSPSAGYIRFYNEFAKRPIMYLNYVYTKAEVKFTNTEKLLTTIHKGLIKALDLGMGQEILVYSPIVSMTKIQKTPLPERKALPIRWITWMSYLEDPRIQFHYDKTLPELQQVPTVTDDIIAKIKHPSEFSMVFYTDGSAIKHPNVNKSHNAGMGIAQVQFKPEFTVINTWSIPLGDHTAQLAEVAAVEFACKKALKIDGPVLIVTDSFYVAESVNKELPYWQSNGFFNNKKKPLKHVSKWKSIADCIQLKPDIIIIHEKGHQPTASTFHTEGNNLADKLATQGSYVVNAGKRTADGSEFEKRTADGSEFESPKKKAKVE

SEQ ID NO: 563 - protein, 2087 aa, synthetic construct
  source 1..2087: note = Description of Artificial Sequence: Synthetic polypeptide
MPAAKRVKLDGGDKKYSIGLDIGTNSVGWAVITDEYKVPSKKFKVLGNTDRHSIKKNLIGALLFDSGETAEATRLKRTARRRYTRRKNRICYLQEIFSNEMAKVDDSFFHRLEESFLVEEDKKHERHPIFGNIVDEVAYHEKYPTIYHLRKKLVDSTDKADLRLIYLALAHMIKFRGHFLIEGDLNPDNSDVDKLFIQLVQTYNQLFEENPINASGVDAKAILSARLSKSRRLENLIAQLPGEKKNGLFGNLIALSLGLTPNFKSNFDLAEDAKLQLSKDTYDDDLDNLLAQIGDQYADLFLAAKNLSDAILLSDILRVNTEITKAPLSASMIKRYDEHHQDLTLLKALVRQQLPEKYKEIFFDQSKNGYAGYIDGGASQEEFYKFIKPILEKMDGTEELLVKLNREDLLRKQRTFDNGSIPHQIHLGELHAILRRQEDFYPFLKDNREKIEKILTFRIPYYVGPLARGNSRFAWMTRKSEETITPWNFEEVVDKGASAQSFIERMTNFDKNLPNEKVLPKHSLLYEYFTVYNELTKVKYVTEGMRKPAFLSGEQKKAIVDLLFKTNRKVTVKQLKEDYFKKIECFDSVEISGVEDRFNASLGTYHDLLKIIKDKDFLDNEENEDILEDIVLTLTLFEDREMIEERLKTYAHLFDDKVMKQLKRRRYTGWGRLSRKLINGIRDKQSGKTILDFLKSDGFANRNFMQLIHDDSLTFKEDIQKAQVSGQGDSLHEHIANLAGSPAIKKGILQTVKVVDELVKVMGRHKPENIVIEMARENQTTQKGQKNSRERMKRIEEGIKELGSQILKEHPVENTQLQNEKLYLYYLQNGRDMYVDQELDINRLSDYDVDHIVPQSFLKDDSIDNKVLTRSDKARGKSDNVPSEEVVKKMKNYWRQLLNAKLITQRKFDNLTKAERGGLSELDKAGFIKRQLVETRQITKHVAQILDSRMNTKYDENDKLIREVKVITLKSKLVSDFRKDFQFYKVREINNYHHAHDAYLNAVVGTALIKKYPKLESEFVYGDYKVYDVRKMIAKSEQEIGKATAKYFFYSNIMNFFKTEITLANGEIRKRPLIETNGETGEIVWDKGRDFATVRKVLSMPQVNIVKKTEVQTGGFSKESILPKRNSDKLIARKKDWDPKKYGGFDSPTVAYSVLVVAKVEKGKSKKLKSVKELLGITIMERSSFEKNPIDFLEAKGYKEVKKDLIIKLPKYSLFELENGRKRMLASAGELQKGNELALPSKYVNFLYLASHYEKLKGSPEDNEQKQLFVEQHKHYLDEIIEQISEFSKRVILADANLDKVLSAYNKHRDKPIREQAENIIHLFTLTNLGAPAAFKYFDTTIDRKRYTSTKEVLDATLIHQSITGLYETRIDLSQLGGDGGGGSEAAAKGGGGGIPWLMKKPLQLTTLVPLQEYEERLLKQTMLTGSYKEKLQSLFLKYDALWQHWENQVGHRRIKPHHIATGTVNPRPQKQYPINPKAKASIQTVINDLLKQGVLIQQNSIMNTPVYPVPKPDGKWRMVLDYREVNKTIPLIAAQNQHSAGILSSIFRGKYKTTLDLSNGFWAHSITPESYWLTAFTWLGQQYCWTRLPQGFLNSPALFNADVVDLLKEVPNVQVYVDDIYISHDDPREHLEQLEKVFSLLLNAGYVVSLKKSEIAQHEVEFLGFNITKEGRGLTETFKQKLLNITPPRDLKQLQSILGKLNFARNFIPNFSELVKPLYNIIATAPGKYITWTTDNSQQLQNIISMLNSAENLEERNPEVRLIMKVNTSPSAGYIRFYNEFAKRPIMYLNYVYTKAEVKFTNTEKLLTTIHKGLIKALDLGMGQEILVYSPIVSMTKIQKTPLPERKALPIRWITWMSYLEDPRIQFHYDKTLPELQQVPTVTDDIIAKIKHPSEFSMVFYTDGSAIKHPNVNKSHNAGMGIAQVQFKPEFTVINTWSIPLGDHTAQLAEVAAVEFACKKALKIDGPVLIVTDSFYVAESVNKELPYWQSNGFFNNKKKPLKHVSKWKSIADCIQLKPDIIIIHEKGHQPTASTFHTEGNNLADKLATQGSYVVNAGKRTADGSEFEKRTADGSEFESPKKKAKVE

SEQ ID NO: 564 - protein, 2082 aa, synthetic construct
  source 1..2082: note = Description of Artificial Sequence: Synthetic polypeptide
MPAAKRVKLDGGDKKYSIGLDIGTNSVGWAVITDEYKVPSKKFKVLGNTDRHSIKKNLIGALLFDSGETAEATRLKRTARRRYTRRKNRICYLQEIFSNEMAKVDDSFFHRLEESFLVEEDKKHERHPIFGNIVDEVAYHEKYPTIYHLRKKLVDSTDKADLRLIYLALAHMIKFRGHFLIEGDLNPDNSDVDKLFIQLVQTYNQLFEENPINASGVDAKAILSARLSKSRRLENLIAQLPGEKKNGLFGNLIALSLGLTPNFKSNFDLAEDAKLQLSKDTYDDDLDNLLAQIGDQYADLFLAAKNLSDAILLSDILRVNTEITKAPLSASMIKRYDEHHQDLTLLKALVRQQLPEKYKEIFFDQSKNGYAGYIDGGASQEEFYKFIKPILEKMDGTEELLVKLNREDLLRKQRTFDNGSIPHQIHLGELHAILRRQEDFYPFLKDNREKIEKILTFRIPYYVGPLARGNSRFAWMTRKSEETITPWNFEEVVDKGASAQSFIERMTNFDKNLPNEKVLPKHSLLYEYFTVYNELTKVKYVTEGMRKPAFLSGEQKKAIVDLLFKTNRKVTVKQLKEDYFKKIECFDSVEISGVEDRFNASLGTYHDLLKIIKDKDFLDNEENEDILEDIVLTLTLFEDREMIEERLKTYAHLFDDKVMKQLKRRRYTGWGRLSRKLINGIRDKQSGKTILDFLKSDGFANRNFMQLIHDDSLTFKEDIQKAQVSGQGDSLHEHIANLAGSPAIKKGILQTVKVVDELVKVMGRHKPENIVIEMARENQTTQKGQKNSRERMKRIEEGIKELGSQILKEHPVENTQLQNEKLYLYYLQNGRDMYVDQELDINRLSDYDVDHIVPQSFLKDDSIDNKVLTRSDKARGKSDNVPSEEVVKKMKNYWRQLLNAKLITQRKFDNLTKAERGGLSELDKAGFIKRQLVETRQITKHVAQILDSRMNTKYDENDKLIREVKVITLKSKLVSDFRKDFQFYKVREINNYHHAHDAYLNAVVGTALIKKYPKLESEFVYGDYKVYDVRKMIAKSEQEIGKATAKYFFYSNIMNFFKTEITLANGEIRKRPLIETNGETGEIVWDKGRDFATVRKVLSMPQVNIVKKTEVQTGGFSKESILPKRNSDKLIARKKDWDPKKYGGFDSPTVAYSVLVVAKVEKGKSKKLKSVKELLGITIMERSSFEKNPIDFLEAKGYKEVKKDLIIKLPKYSLFELENGRKRMLASAGELQKGNELALPSKYVNFLYLASHYEKLKGSPEDNEQKQLFVEQHKHYLDEIIEQISEFSKRVILADANLDKVLSAYNKHRDKPIREQAENIIHLFTLTNLGAPAAFKYFDTTIDRKRYTSTKEVLDATLIHQSITGLYETRIDLSQLGGDGGGGGGSSGGIPWLMKKPLQLTTLVPLQEYEERLLKQTMLTGSYKEKLQSLFLKYDALWQHWENQVGHRRIKPHHIATGTVNPRPQKQYPINPKAKASIQTVINDLLKQGVLIQQNSIMNTPVYPVPKPDGKWRMVLDYREVNKTIPLIAAQNQHSAGILSSIFRGKYKTTLDLSNGFWAHSITPESYWLTAFTWLGQQYCWTRLPQGFLNSPALFNADVVDLLKEVPNVQVYVDDIYISHDDPREHLEQLEKVFSLLLNAGYVVSLKKSEIAQHEVEFLGFNITKEGRGLTETFKQKLLNITPPRDLKQLQSILGKLNFARNFIPNFSELVKPLYNIIATAPGKYITWTTDNSQQLQNIISMLNSAENLEERNPEVRLIMKVNTSPSAGYIRFYNEFAKRPIMYLNYVYTKAEVKFTNTEKLLTTIHKGLIKALDLGMGQEILVYSPIVSMTKIQKTPLPERKALPIRWITWMSYLEDPRIQFHYDKTLPELQQVPTVTDDIIAKIKHPSEFSMVFYTDGSAIKHPNVNKSHNAGMGIAQVQFKPEFTVINTWSIPLGDHTAQLAEVAAVEFACKKALKIDGPVLIVTDSFYVAESVNKELPYWQSNGFFNNKKKPLKHVSKWKSIADCIQLKPDIIIIHEKGHQPTASTFHTEGNNLADKLATQGSYVVNAGKRTADGSEFEKRTADGSEFESPKKKAKVE

SEQ ID NO: 565 - protein, 2085 aa, synthetic construct
  source 1..2085: note = Description of Artificial Sequence: Synthetic polypeptide
MPAAKRVKLDGGDKKYSIGLDIGTNSVGWAVITDEYKVPSKKFKVLGNTDRHSIKKNLIGALLFDSGETAEATRLKRTARRRYTRRKNRICYLQEIFSNEMAKVDDSFFHRLEESFLVEEDKKHERHPIFGNIVDEVAYHEKYPTIYHLRKKLVDSTDKADLRLIYLALAHMIKFRGHFLIEGDLNPDNSDVDKLFIQLVQTYNQLFEENPINASGVDAKAILSARLSKSRRLENLIAQLPGEKKNGLFGNLIALSLGLTPNFKSNFDLAEDAKLQLSKDTYDDDLDNLLAQIGDQYADLFLAAKNLSDAILLSDILRVNTEITKAPLSASMIKRYDEHHQDLTLLKALVRQQLPEKYKEIFFDQSKNGYAGYIDGGASQEEFYKFIKPILEKMDGTEELLVKLNREDLLRKQRTFDNGSIPHQIHLGELHAILRRQEDFYPFLKDNREKIEKILTFRIPYYVGPLARGNSRFAWMTRKSEETITPWNFEEVVDKGASAQSFIERMTNFDKNLPNEKVLPKHSLLYEYFTVYNELTKVKYVTEGMRKPAFLSGEQKKAIVDLLFKTNRKVTVKQLKEDYFKKIECFDSVEISGVEDRFNASLGTYHDLLKIIKDKDFLDNEENEDILEDIVLTLTLFEDREMIEERLKTYAHLFDDKVMKQLKRRRYTGWGRLSRKLINGIRDKQSGKTILDFLKSDGFANRNFMQLIHDDSLTFKEDIQKAQVSGQGDSLHEHIANLAGSPAIKKGILQTVKVVDELVKVMGRHKPENIVIEMARENQTTQKGQKNSRERMKRIEEGIKELGSQILKEHPVENTQLQNEKLYLYYLQNGRDMYVDQELDINRLSDYDVDHIVPQSFLKDDSIDNKVLTRSDKARGKSDNVPSEEVVKKMKNYWRQLLNAKLITQRKFDNLTKAERGGLSELDKAGFIKRQLVETRQITKHVAQILDSRMNTKYDENDKLIREVKVITLKSKLVSDFRKDFQFYKVREINNYHHAHDAYLNAVVGTALIKKYPKLESEFVYGDYKVYDVRKMIAKSEQEIGKATAKYFFYSNIMNFFKTEITLANGEIRKRPLIETNGETGEIVWDKGRDFATVRKVLSMPQVNIVKKTEVQTGGFSKESILPKRNSDKLIARKKDWDPKKYGGFDSPTVAYSVLVVAKVEKGKSKKLKSVKELLGITIMERSSFEKNPIDFLEAKGYKEVKKDLIIKLPKYSLFELENGRKRMLASAGELQKGNELALPSKYVNFLYLASHYEKLKGSPEDNEQKQLFVEQHKHYLDEIIEQISEFSKRVILADANLDKVLSAYNKHRDKPIREQAENIIHLFTLTNLGAPAAFKYFDTTIDRKRYTSTKEVLDATLIHQSITGLYETRIDLSQLGGDGGGGSGSSGGGGGIPWLMKKPLQLTTLVPLQEYEERLLKQTMLTGSYKEKLQSLFLKYDALWQHWENQVGHRRIKPHHIATGTVNPRPQKQYPINPKAKASIQTVINDLLKQGVLIQQNSIMNTPVYPVPKPDGKWRMVLDYREVNKTIPLIAAQNQHSAGILSSIFRGKYKTTLDLSNGFWAHSITPESYWLTAFTWLGQQYCWTRLPQGFLNSPALFNADVVDLLKEVPNVQVYVDDIYISHDDPREHLEQLEKVFSLLLNAGYVVSLKKSEIAQHEVEFLGFNITKEGRGLTETFKQKLLNITPPRDLKQLQSILGKLNFARNFIPNFSELVKPLYNIIATAPGKYITWTTDNSQQLQNIISMLNSAENLEERNPEVRLIMKVNTSPSAGYIRFYNEFAKRPIMYLNYVYTKAEVKFTNTEKLLTTIHKGLIKALDLGMGQEILVYSPIVSMTKIQKTPLPERKALPIRWITWMSYLEDPRIQFHYDKTLPELQQVPTVTDDIIAKIKHPSEFSMVFYTDGSAIKHPNVNKSHNAGMGIAQVQFKPEFTVINTWSIPLGDHTAQLAEVAAVEFACKKALKIDGPVLIVTDSFYVAESVNKELPYWQSNGFFNNKKKPLKHVSKWKSIADCIQLKPDIIIIHEKGHQPTASTFHTEGNNLADKLATQGSYVVNAGKRTADGSEFEKRTADGSEFESPKKKAKVE

SEQ ID NO: 566 - protein, 2091 aa, synthetic construct
  source 1..2091: note = Description of Artificial Sequence: Synthetic polypeptide
MPAAKRVKLDGGDKKYSIGLDIGTNSVGWAVITDEYKVPSKKFKVLGNTDRHSIKKNLIGALLFDSGETAEATRLKRTARRRYTRRKNRICYLQEIFSNEMAKVDDSFFHRLEESFLVEEDKKHERHPIFGNIVDEVAYHEKYPTIYHLRKKLVDSTDKADLRLIYLALAHMIKFRGHFLIEGDLNPDNSDVDKLFIQLVQTYNQLFEENPINASGVDAKAILSARLSKSRRLENLIAQLPGEKKNGLFGNLIALSLGLTPNFKSNFDLAEDAKLQLSKDTYDDDLDNLLAQIGDQYADLFLAAKNLSDAILLSDILRVNTEITKAPLSASMIKRYDEHHQDLTLLKALVRQQLPEKYKEIFFDQSKNGYAGYIDGGASQEEFYKFIKPILEKMDGTEELLVKLNREDLLRKQRTFDNGSIPHQIHLGELHAILRRQEDFYPFLKDNREKIEKILTFRIPYYVGPLARGNSRFAWMTRKSEETITPWNFEEVVDKGASAQSFIERMTNFDKNLPNEKVLPKHSLLYEYFTVYNELTKVKYVTEGMRKPAFLSGEQKKAIVDLLFKTNRKVTVKQLKEDYFKKIECFDSVEISGVEDRFNASLGTYHDLLKIIKDKDFLDNEENEDILEDIVLTLTLFEDREMIEERLKTYAHLFDDKVMKQLKRRRYTGWGRLSRKLINGIRDKQSGKTILDFLKSDGFANRNFMQLIHDDSLTFKEDIQKAQVSGQGDSLHEHIANLAGSPAIKKGILQTVKVVDELVKVMGRHKPENIVIEMARENQTTQKGQKNSRERMKRIEEGIKELGSQILKEHPVENTQLQNEKLYLYYLQNGRDMYVDQELDINRLSDYDVDHIVPQSFLKDDSIDNKVLTRSDKARGKSDNVPSEEVVKKMKNYWRQLLNAKLITQRKFDNLTKAERGGLSELDKAGFIKRQLVETRQITKHVAQILDSRMNTKYDENDKLIREVKVITLKSKLVSDFRKDFQFYKVREINNYHHAHDAYLNAVVGTALIKKYPKLESEFVYGDYKVYDVRKMIAKSEQEIGKATAKYFFYSNIMNFFKTEITLANGEIRKRPLIETNGETGEIVWDKGRDFATVRKVLSMPQVNIVKKTEVQTGGFSKESILPKRNSDKLIARKKDWDPKKYGGFDSPTVAYSVLVVAKVEKGKSKKLKSVKELLGITIMERSSFEKNPIDFLEAKGYKEVKKDLIIKLPKYSLFELENGRKRMLASAGELQKGNELALPSKYVNFLYLASHYEKLKGSPEDNEQKQLFVEQHKHYLDEIIEQISEFSKRVILADANLDKVLSAYNKHRDKPIREQAENIIHLFTLTNLGAPAAFKYFDTTIDRKRYTSTKEVLDATLIHQSITGLYETRIDLSQLGGDGGGGSGGSGGSGGSGGSGGIPWLMKKPLQLTTLVPLQEYEERLLKQTMLTGSYKEKLQSLFLKYDALWQHWENQVGHRRIKPHHIATGTVNPRPQKQYPINPKAKASIQTVINDLLKQGVLIQQNSIMNTPVYPVPKPDGKWRMVLDYREVNKTIPLIAAQNQHSAGILSSIFRGKYKTTLDLSNGFWAHSITPESYWLTAFTWLGQQYCWTRLPQGFLNSPALFNADVVDLLKEVPNVQVYVDDIYISHDDPREHLEQLEKVFSLLLNAGYVVSLKKSEIAQHEVEFLGFNITKEGRGLTETFKQKLLNITPPRDLKQLQSILGKLNFARNFIPNFSELVKPLYNIIATAPGKYITWTTDNSQQLQNIISMLNSAENLEERNPEVRLIMKVNTSPSAGYIRFYNEFAKRPIMYLNYVYTKAEVKFTNTEKLLTTIHKGLIKALDLGMGQEILVYSPIVSMTKIQKTPLPERKALPIRWITWMSYLEDPRIQFHYDKTLPELQQVPTVTDDIIAKIKHPSEFSMVFYTDGSAIKHPNVNKSHNAGMGIAQVQFKPEFTVINTWSIPLGDHTAQLAEVAAVEFACKKALKIDGPVLIVTDSFYVAESVNKELPYWQSNGFFNNKKKPLKHVSKWKSIADCIQLKPDIIIIHEKGHQPTASTFHTEGNNLADKLATQGSYVVNAGKRTADGSEFEKRTADGSEFESPKKKAKVE

SEQ ID NO: 567 - protein, 2087 aa, synthetic construct
  source 1..2087: note = Description of Artificial Sequence: Synthetic polypeptide
MPAAKRVKLDGGDKKYSIGLDIGTNSVGWAVITDEYKVPSKKFKVLGNTDRHSIKKNLIGALLFDSGETAEATRLKRTARRRYTRRKNRICYLQEIFSNEMAKVDDSFFHRLEESFLVEEDKKHERHPIFGNIVDEVAYHEKYPTIYHLRKKLVDSTDKADLRLIYLALAHMIKFRGHFLIEGDLNPDNSDVDKLFIQLVQTYNQLFEENPINASGVDAKAILSARLSKSRRLENLIAQLPGEKKNGLFGNLIALSLGLTPNFKSNFDLAEDAKLQLSKDTYDDDLDNLLAQIGDQYADLFLAAKNLSDAILLSDILRVNTEITKAPLSASMIKRYDEHHQDLTLLKALVRQQLPEKYKEIFFDQSKNGYAGYIDGGASQEEFYKFIKPILEKMDGTEELLVKLNREDLLRKQRTFDNGSIPHQIHLGELHAILRRQEDFYPFLKDNREKIEKILTFRIPYYVGPLARGNSRFAWMTRKSEETITPWNFEEVVDKGASAQSFIERMTNFDKNLPNEKVLPKHSLLYEYFTVYNELTKVKYVTEGMRKPAFLSGEQKKAIVDLLFKTNRKVTVKQLKEDYFKKIECFDSVEISGVEDRFNASLGTYHDLLKIIKDKDFLDNEENEDILEDIVLTLTLFEDREMIEERLKTYAHLFDDKVMKQLKRRRYTGWGRLSRKLINGIRDKQSGKTILDFLKSDGFANRNFMQLIHDDSLTFKEDIQKAQVSGQGDSLHEHIANLAGSPAIKKGILQTVKVVDELVKVMGRHKPENIVIEMARENQTTQKGQKNSRERMKRIEEGIKELGSQILKEHPVENTQLQNEKLYLYYLQNGRDMYVDQELDINRLSDYDVDHIVPQSFLKDDSIDNKVLTRSDKARGKSDNVPSEEVVKKMKNYWRQLLNAKLITQRKFDNLTKAERGGLSELDKAGFIKRQLVETRQITKHVAQILDSRMNTKYDENDKLIREVKVITLKSKLVSDFRKDFQFYKVREINNYHHAHDAYLNAVVGTALIKKYPKLESEFVYGDYKVYDVRKMIAKSEQEIGKATAKYFFYSNIMNFFKTEITLANGEIRKRPLIETNGETGEIVWDKGRDFATVRKVLSMPQVNIVKKTEVQTGGFSKESILPKRNSDKLIARKKDWDPKKYGGFDSPTVAYSVLVVAKVEKGKSKKLKSVKELLGITIMERSSFEKNPIDFLEAKGYKEVKKDLIIKLPKYSLFELENGRKRMLASAGELQKGNELALPSKYVNFLYLASHYEKLKGSPEDNEQKQLFVEQHKHYLDEIIEQISEFSKRVILADANLDKVLSAYNKHRDKPIREQAENIIHLFTLTNLGAPAAFKYFDTTIDRKRYTSTKEVLDATLIHQSITGLYETRIDLSQLGGDGGGSSEAAAKGGGGGIPWLMKKPLQLTTLVPLQEYEERLLKQTMLTGSYKEKLQSLFLKYDALWQHWENQVGHRRIKPHHIATGTVNPRPQKQYPINPKAKASIQTVINDLLKQGVLIQQNSIMNTPVYPVPKPDGKWRMVLDYREVNKTIPLIAAQNQHSAGILSSIFRGKYKTTLDLSNGFWAHSITPESYWLTAFTWLGQQYCWTRLPQGFLNSPALFNADVVDLLKEVPNVQVYVDDIYISHDDPREHLEQLEKVFSLLLNAGYVVSLKKSEIAQHEVEFLGFNITKEGRGLTETFKQKLLNITPPRDLKQLQSILGKLNFARNFIPNFSELVKPLYNIIATAPGKYITWTTDNSQQLQNIISMLNSAENLEERNPEVRLIMKVNTSPSAGYIRFYNEFAKRPIMYLNYVYTKAEVKFTNTEKLLTTIHKGLIKALDLGMGQEILVYSPIVSMTKIQKTPLPERKALPIRWITWMSYLEDPRIQFHYDKTLPELQQVPTVTDDIIAKIKHPSEFSMVFYTDGSAIKHPNVNKSHNAGMGIAQVQFKPEFTVINTWSIPLGDHTAQLAEVAAVEFACKKALKIDGPVLIVTDSFYVAESVNKELPYWQSNGFFNNKKKPLKHVSKWKSIADCIQLKPDIIIIHEKGHQPTASTFHTEGNNLADKLATQGSYVVNAGKRTADGSEFEKRTADGSEFESPKKKAKVE

SEQ ID NO: 568 - protein, 2085 aa, synthetic construct
  source 1..2085: note = Description of Artificial Sequence: Synthetic polypeptide
MPAAKRVKLDGGDKKYSIGLDIGTNSVGWAVITDEYKVPSKKFKVLGNTDRHSIKKNLIGALLFDSGETAEATRLKRTARRRYTRRKNRICYLQEIFSNEMAKVDDSFFHRLEESFLVEEDKKHERHPIFGNIVDEVAYHEKYPTIYHLRKKLVDSTDKADLRLIYLALAHMIKFRGHFLIEGDLNPDNSDVDKLFIQLVQTYNQLFEENPINASGVDAKAILSARLSKSRRLENLIAQLPGEKKNGLFGNLIALSLGLTPNFKSNFDLAEDAKLQLSKDTYDDDLDNLLAQIGDQYADLFLAAKNLSDAILLSDILRVNTEITKAPLSASMIKRYDEHHQDLTLLKALVRQQLPEKYKEIFFDQSKNGYAGYIDGGASQEEFYKFIKPILEKMDGTEELLVKLNREDLLRKQRTFDNGSIPHQIHLGELHAILRRQEDFYPFLKDNREKIEKILTFRIPYYVGPLARGNSRFAWMTRKSEETITPWNFEEVVDKGASAQSFIERMTNFDKNLPNEKVLPKHSLLYEYFTVYNELTKVKYVTEGMRKPAFLSGEQKKAIVDLLFKTNRKVTVKQLKEDYFKKIECFDSVEISGVEDRFNASLGTYHDLLKIIKDKDFLDNEENEDILEDIVLTLTLFEDREMIEERLKTYAHLFDDKVMKQLKRRRYTGWGRLSRKLINGIRDKQSGKTILDFLKSDGFANRNFMQLIHDDSLTFKEDIQKAQVSGQGDSLHEHIANLAGSPAIKKGILQTVKVVDELVKVMGRHKPENIVIEMARENQTTQKGQKNSRERMKRIEEGIKELGSQILKEHPVENTQLQNEKLYLYYLQNGRDMYVDQELDINRLSDYDVDHIVPQSFLKDDSIDNKVLTRSDKARGKSDNVPSEEVVKKMKNYWRQLLNAKLITQRKFDNLTKAERGGLSELDKAGFIKRQLVETRQITKHVAQILDSRMNTKYDENDKLIREVKVITLKSKLVSDFRKDFQFYKVREINNYHHAHDAYLNAVVGTALIKKYPKLESEFVYGDYKVYDVRKMIAKSEQEIGKATAKYFFYSNIMNFFKTEITLANGEIRKRPLIETNGETGEIVWDKGRDFATVRKVLSMPQVNIVKKTEVQTGGFSKESILPKRNSDKLIARKKDWDPKKYGGFDSPTVAYSVLVVAKVEKGKSKKLKSVKELLGITIMERSSFEKNPIDFLEAKGYKEVKKDLIIKLPKYSLFELENGRKRMLASAGELQKGNELALPSKYVNFLYLASHYEKLKGSPEDNEQKQLFVEQHKHYLDEIIEQISEFSKRVILADANLDKVLSAYNKHRDKPIREQAENIIHLFTLTNLGAPAAFKYFDTTIDRKRYTSTKEVLDATLIHQSITGLYETRIDLSQLGGDGGGGGPAPGSSGGIPWLMKKPLQLTTLVPLQEYEERLLKQTMLTGSYKEKLQSLFLKYDALWQHWENQVGHRRIKPHHIATGTVNPRPQKQYPINPKAKASIQTVINDLLKQGVLIQQNSIMNTPVYPVPKPDGKWRMVLDYREVNKTIPLIAAQNQHSAGILSSIFRGKYKTTLDLSNGFWAHSITPESYWLTAFTWLGQQYCWTRLPQGFLNSPALFNADVVDLLKEVPNVQVYVDDIYISHDDPREHLEQLEKVFSLLLNAGYVVSLKKSEIAQHEVEFLGFNITKEGRGLTETFKQKLLNITPPRDLKQLQSILGKLNFARNFIPNFSELVKPLYNIIATAPGKYITWTTDNSQQLQNIISMLNSAENLEERNPEVRLIMKVNTSPSAGYIRFYNEFAKRPIMYLNYVYTKAEVKFTNTEKLLTTIHKGLIKALDLGMGQEILVYSPIVSMTKIQKTPLPERKALPIRWITWMSYLEDPRIQFHYDKTLPELQQVPTVTDDIIAKIKHPSEFSMVFYTDGSAIKHPNVNKSHNAGMGIAQVQFKPEFTVINTWSIPLGDHTAQLAEVAAVEFACKKALKIDGPVLIVTDSFYVAESVNKELPYWQSNGFFNNKKKPLKHVSKWKSIADCIQLKPDIIIIHEKGHQPTASTFHTEGNNLADKLATQGSYVVNAGKRTADGSEFEKRTADGSEFESPKKKAKVE

SEQ ID NO: 569 - protein, 2087 aa, synthetic construct
  source 1..2087: note = Description of Artificial Sequence: Synthetic polypeptide
MPAAKRVKLDGGDKKYSIGLDIGTNSVGWAVITDEYKVPSKKFKVLGNTDRHSIKKNLIGALLFDSGETAEATRLKRTARRRYTRRKNRICYLQEIFSNEMAKVDDSFFHRLEESFLVEEDKKHERHPIFGNIVDEVAYHEKYPTIYHLRKKLVDSTDKADLRLIYLALAHMIKFRGHFLIEGDLNPDNSDVDKLFIQLVQTYNQLFEENPINASGVDAKAILSARLSKSRRLENLIAQLPGEKKNGLFGNLIALSLGLTPNFKSNFDLAEDAKLQLSKDTYDDDLDNLLAQIGDQYADLFLAAKNLSDAILLSDILRVNTEITKAPLSASMIKRYDEHHQDLTLLKALVRQQLPEKYKEIFFDQSKNGYAGYIDGGASQEEFYKFIKPILEKMDGTEELLVKLNREDLLRKQRTFDNGSIPHQIHLGELHAILRRQEDFYPFLKDNREKIEKILTFRIPYYVGPLARGNSRFAWMTRKSEETITPWNFEEVVDKGASAQSFIERMTNFDKNLPNEKVLPKHSLLYEYFTVYNELTKVKYVTEGMRKPAFLSGEQKKAIVDLLFKTNRKVTVKQLKEDYFKKIECFDSVEISGVEDRFNASLGTYHDLLKIIKDKDFLDNEENEDILEDIVLTLTLFEDREMIEERLKTYAHLFDDKVMKQLKRRRYTGWGRLSRKLINGIRDKQSGKTILDFLKSDGFANRNFMQLIHDDSLTFKEDIQKAQVSGQGDSLHEHIANLAGSPAIKKGILQTVKVVDELVKVMGRHKPENIVIEMARENQTTQKGQKNSRERMKRIEEGIKELGSQILKEHPVENTQLQNEKLYLYYLQNGRDMYVDQELDINRLSDYDVDHIVPQSFLKDDSIDNKVLTRSDKARGKSDNVPSEEVVKKMKNYWRQLLNAKLITQRKFDNLTKAERGGLSELDKAGFIKRQLVETRQITKHVAQILDSRMNTKYDENDKLIREVKVITLKSKLVSDFRKDFQFYKVREINNYHHAHDAYLNAVVGTALIKKYPKLESEFVYGDYKVYDVRKMIAKSEQEIGKATAKYFFYSNIMNFFKTEITLANGEIRKRPLIETNGETGEIVWDKGRDFATVRKVLSMPQVNIVKKTEVQTGGFSKESILPKRNSDKLIARKKDWDPKKYGGFDSPTVAYSVLVVAKVEKGKSKKLKSVKELLGITIMERSSFEKNPIDFLEAKGYKEVKKDLIIKLPKYSLFELENGRKRMLASAGELQKGNELALPSKYVNFLYLASHYEKLKGSPEDNEQKQLFVEQHKHYLDEIIEQISEFSKRVILADANLDKVLSAYNKHRDKPIREQAENIIHLFTLTNLGAPAAFKYFDTTIDRKRYTSTKEVLDATLIHQSITGLYETRIDLSQLGGDGGPAPAPAPAPAPGGIPWLMKKPLQLTTLVPLQEYEERLLKQTMLTGSYKEKLQSLFLKYDALWQHWENQVGHRRIKPHHIATGTVNPRPQKQYPINPKAKASIQTVINDLLKQGVLIQQNSIMNTPVYPVPKPDGKWRMVLDYREVNKTIPLIAAQNQHSAGILSSIFRGKYKTTLDLSNGFWAHSITPESYWLTAFTWLGQQYCWTRLPQGFLNSPALFNADVVDLLKEVPNVQVYVDDIYISHDDPREHLEQLEKVFSLLLNAGYVVSLKKSEIAQHEVEFLGFNITKEGRGLTETFKQKLLNITPPRDLKQLQSILGKLNFARNFIPNFSELVKPLYNIIATAPGKYITWTTDNSQQLQNIISMLNSAENLEERNPEVRLIMKVNTSPSAGYIRFYNEFAKRPIMYLNYVYTKAEVKFTNTEKLLTTIHKGLIKALDLGMGQEILVYSPIVSMTKIQKTPLPERKALPIRWITWMSYLEDPRIQFHYDKTLPELQQVPTVTDDIIAKIKHPSEFSMVFYTDGSAIKHPNVNKSHNAGMGIAQVQFKPEFTVINTWSIPLGDHTAQLAEVAAVEFACKKALKIDGPVLIVTDSFYVAESVNKELPYWQSNGFFNNKKKPLKHVSKWKSIADCIQLKPDIIIIHEKGHQPTASTFHTEGNNLADKLATQGSYVVNAGKRTADGSEFEKRTADGSEFESPKKKAKVE

SEQ ID NO: 570 - protein, 2101 aa, synthetic construct
  source 1..2101: note = Description of Artificial Sequence: Synthetic polypeptide
MPAAKRVKLDGGDKKYSIGLDIGTNSVGWAVITDEYKVPSKKFKVLGNTDRHSIKKNLIGALLFDSGETAEATRLKRTARRRYTRRKNRICYLQEIFSNEMAKVDDSFFHRLEESFLVEEDKKHERHPIFGNIVDEVAYHEKYPTIYHLRKKLVDSTDKADLRLIYLALAHMIKFRGHFLIEGDLNPDNSDVDKLFIQLVQTYNQLFEENPINASGVDAKAILSARLSKSRRLENLIAQLPGEKKNGLFGNLIALSLGLTPNFKSNFDLAEDAKLQLSKDTYDDDLDNLLAQIGDQYADLFLAAKNLSDAILLSDILRVNTEITKAPLSASMIKRYDEHHQDLTLLKALVRQQLPEKYKEIFFDQSKNGYAGYIDGGASQEEFYKFIKPILEKMDGTEELLVKLNREDLLRKQRTFDNGSIPHQIHLGELHAILRRQEDFYPFLKDNREKIEKILTFRIPYYVGPLARGNSRFAWMTRKSEETITPWNFEEVVDKGASAQSFIERMTNFDKNLPNEKVLPKHSLLYEYFTVYNELTKVKYVTEGMRKPAFLSGEQKKAIVDLLFKTNRKVTVKQLKEDYFKKIECFDSVEISGVEDRFNASLGTYHDLLKIIKDKDFLDNEENEDILEDIVLTLTLFEDREMIEERLKTYAHLFDDKVMKQLKRRRYTGWGRLSRKLINGIRDKQSGKTILDFLKSDGFANRNFMQLIHDDSLTFKEDIQKAQVSGQGDSLHEHIANLAGSPAIKKGILQTVKVVDELVKVMGRHKPENIVIEMARENQTTQKGQKNSRERMKRIEEGIKELGSQILKEHPVENTQLQNEKLYLYYLQNGRDMYVDQELDINRLSDYDVDHIVPQSFLKDDSIDNKVLTRSDKARGKSDNVPSEEVVKKMKNYWRQLLNAKLITQRKFDNLTKAERGGLSELDKAGFIKRQLVETRQITKHVAQILDSRMNTKYDENDKLIREVKVITLKSKLVSDFRKDFQFYKVREINNYHHAHDAYLNAVVGTALIKKYPKLESEFVYGDYKVYDVRKMIAKSEQEIGKATAKYFFYSNIMNFFKTEITLANGEIRKRPLIETNGETGEIVWDKGRDFATVRKVLSMPQVNIVKKTEVQTGGFSKESILPKRNSDKLIARKKDWDPKKYGGFDSPTVAYSVLVVAKVEKGKSKKLKSVKELLGITIMERSSFEKNPIDFLEAKGYKEVKKDLIIKLPKYSLFELENGRKRMLASAGELQKGNELALPSKYVNFLYLASHYEKLKGSPEDNEQKQLFVEQHKHYLDEIIEQISEFSKRVILADANLDKVLSAYNKHRDKPIREQAENIIHLFTLTNLGAPAAFKYFDTTIDRKRYTSTKEVLDATLIHQSITGLYETRIDLSQLGGDGGEAAAKEAAAKEAAAKEAAAKEAAAKGGIPWLMKKPLQLTTLVPLQEYEERLLKQTMLTGSYKEKLQSLFLKYDALWQHWENQVGHRRIKPHHIATGTVNPRPQKQYPINPKAKASIQTVINDLLKQGVLIQQNSIMNTPVYPVPKPDGKWRMVLDYREVNKTIPLIAAQNQHSAGILSSIFRGKYKTTLDLSNGFWAHSITPESYWLTAFTWLGQQYCWTRLPQGFLNSPALFNADVVDLLKEVPNVQVYVDDIYISHDDPREHLEQLEKVFSLLLNAGYVVSLKKSEIAQHEVEFLGFNITKEGRGLTETFKQKLLNITPPRDLKQLQSILGKLNFARNFIPNFSELVKPLYNIIATAPGKYITWTTDNSQQLQNIISMLNSAENLEERNPEVRLIMKVNTSPSAGYIRFYNEFAKRPIMYLNYVYTKAEVKFTNTEKLLTTIHKGLIKALDLGMGQEILVYSPIVSMTKIQKTPLPERKALPIRWITWMSYLEDPRIQFHYDKTLPELQQVPTVTDDIIAKIKHPSEFSMVFYTDGSAIKHPNVNKSHNAGMGIAQVQFKPEFTVINTWSIPLGDHTAQLAEVAAVEFACKKALKIDGPVLIVTDSFYVAESVNKELPYWQSNGFFNNKKKPLKHVSKWKSIADCIQLKPDIIIIHEKGHQPTASTFHTEGNNLADKLATQGSYVVNAGKRTADGSEFEKRTADGSEFESPKKKAKVE

SEQ ID NO: 571 - protein, 2087 aa, synthetic construct
  source 1..2087: note = Description of Artificial Sequence: Synthetic polypeptide
MPAAKRVKLDGGDKKYSIGLDIGTNSVGWAVITDEYKVPSKKFKVLGNTDRHSIKKNLIGALLFDSGETAEATRLKRTARRRYTRRKNRICYLQEIFSNEMAKVDDSFFHRLEESFLVEEDKKHERHPIFGNIVDEVAYHEKYPTIYHLRKKLVDSTDKADLRLIYLALAHMIKFRGHFLIEGDLNPDNSDVDKLFIQLVQTYNQLFEENPINASGVDAKAILSARLSKSRRLENLIAQLPGEKKNGLFGNLIALSLGLTPNFKSNFDLAEDAKLQLSKDTYDDDLDNLLAQIGDQYADLFLAAKNLSDAILLSDILRVNTEITKAPLSASMIKRYDEHHQDLTLLKALVRQQLPEKYKEIFFDQSKNGYAGYIDGGASQEEFYKFIKPILEKMDGTEELLVKLNREDLLRKQRTFDNGSIPHQIHLGELHAILRRQEDFYPFLKDNREKIEKILTFRIPYYVGPLARGNSRFAWMTRKSEETITPWNFEEVVDKGASAQSFIERMTNFDKNLPNEKVLPKHSLLYEYFTVYNELTKVKYVTEGMRKPAFLSGEQKKAIVDLLFKTNRKVTVKQLKEDYFKKIECFDSVEISGVEDRFNASLGTYHDLLKIIKDKDFLDNEENEDILEDIVLTLTLFEDREMIEERLKTYAHLFDDKVMKQLKRRRYTGWGRLSRKLINGIRDKQSGKTILDFLKSDGFANRNFMQLIHDDSLTFKEDIQKAQVSGQGDSLHEHIANLAGSPAIKKGILQTVKVVDELVKVMGRHKPENIVIEMARENQTTQKGQKNSRERMKRIEEGIKELGSQILKEHPVENTQLQNEKLYLYYLQNGRDMYVDQELDINRLSDYDVDHIVPQSFLKDDSIDNKVLTRSDKARGKSDNVPSEEVVKKMKNYWRQLLNAKLITQRKFDNLTKAERGGLSELDKAGFIKRQLVETRQITKHVAQILDSRMNTKYDENDKLIREVKVITLKSKLVSDFRKDFQFYKVREINNYHHAHDAYLNAVVGTALIKKYPKLESEFVYGDYKVYDVRKMIAKSEQEIGKATAKYFFYSNIMNFFKTEITLANGEIRKRPLIETNGETGEIVWDKGRDFATVRKVLSMPQVNIVKKTEVQTGGFSKESILPKRNSDKLIARKKDWDPKKYGGFDSPTVAYSVLVVAKVEKGKSKKLKSVKELLGITIMERSSFEKNPIDFLEAKGYKEVKKDLIIKLPKYSLFELENGRKRMLASAGELQKGNELALPSKYVNFLYLASHYEKLKGSPEDNEQKQLFVEQHKHYLDEIIEQISEFSKRVILADANLDKVLSAYNKHRDKPIREQAENIIHLFTLTNLGAPAAFKYFDTTIDRKRYTSTKEVLDATLIHQSITGLYETRIDLSQLGGDGGGGSGSSEAAAKGGIPWLMKKPLQLTTLVPLQEYEERLLKQTMLTGSYKEKLQSLFLKYDALWQHWENQVGHRRIKPHHIATGTVNPRPQKQYPINPKAKASIQTVINDLLKQGVLIQQNSIMNTPVYPVPKPDGKWRMVLDYREVNKTIPLIAAQNQHSAGILSSIFRGKYKTTLDLSNGFWAHSITPESYWLTAFTWLGQQYCWTRLPQGFLNSPALFNADVVDLLKEVPNVQVYVDDIYISHDDPREHLEQLEKVFSLLLNAGYVVSLKKSEIAQHEVEFLGFNITKEGRGLTETFKQKLLNITPPRDLKQLQSILGKLNFARNFIPNFSELVKPLYNIIATAPGKYITWTTDNSQQLQNIISMLNSAENLEERNPEVRLIMKVNTSPSAGYIRFYNEFAKRPIMYLNYVYTKAEVKFTNTEKLLTTIHKGLIKALDLGMGQEILVYSPIVSMTKIQKTPLPERKALPIRWITWMSYLEDPRIQFHYDKTLPELQQVPTVTDDIIAKIKHPSEFSMVFYTDGSAIKHPNVNKSHNAGMGIAQVQFKPEFTVINTWSIPLGDHTAQLAEVAAVEFACKKALKIDGPVLIVTDSFYVAESVNKELPYWQSNGFFNNKKKPLKHVSKWKSIADCIQLKPDIIIIHEKGHQPTASTFHTEGNNLADKLATQGSYVVNAGKRTADGSEFEKRTADGSEFESPKKKAKVE

SEQ ID NO: 572 - protein, 2087 aa, synthetic construct
  source 1..2087: note = Description of Artificial Sequence: Synthetic polypeptide
MPAAKRVKLDGGDKKYSIGLDIGTNSVGWAVITDEYKVPSKKFKVLGNTDRHSIKKNLIGALLFDSGETAEATRLKRTARRRYTRRKNRICYLQEIFSNEMAKVDDSFFHRLEESFLVEEDKKHERHPIFGNIVDEVAYHEKYPTIYHLRKKLVDSTDKADLRLIYLALAHMIKFRGHFLIEGDLNPDNSDVDKLFIQLVQTYNQLFEENPINASGVDAKAILSARLSKSRRLENLIAQLPGEKKNGLFGNLIALSLGLTPNFKSNFDLAEDAKLQLSKDTYDDDLDNLLAQIGDQYADLFLAAKNLSDAILLSDILRVNTEITKAPLSASMIKRYDEHHQDLTLLKALVRQQLPEKYKEIFFDQSKNGYAGYIDGGASQEEFYKFIKPILEKMDGTEELLVKLNREDLLRKQRTFDNGSIPHQIHLGELHAILRRQEDFYPFLKDNREKIEKILTFRIPYYVGPLARGNSRFAWMTRKSEETITPWNFEEVVDKGASAQSFIERMTNFDKNLPNEKVLPKHSLLYEYFTVYNELTKVKYVTEGMRKPAFLSGEQKKAIVDLLFKTNRKVTVKQLKEDYFKKIECFDSVEISGVEDRFNASLGTYHDLLKIIKDKDFLDNEENEDILEDIVLTLTLFEDREMIEERLKTYAHLFDDKVMKQLKRRRYTGWGRLSRKLINGIRDKQSGKTILDFLKSDGFANRNFMQLIHDDSLTFKEDIQKAQVSGQGDSLHEHIANLAGSPAIKKGILQTVKVVDELVKVMGRHKPENIVIEMARENQTTQKGQKNSRERMKRIEEGIKELGSQILKEHPVENTQLQNEKLYLYYLQNGRDMYVDQELDINRLSDYDVDHIVPQSFLKDDSIDNKVLTRSDKARGKSDNVPSEEVVKKMKNYWRQLLNAKLITQRKFDNLTKAERGGLSELDKAGFIKRQLVETRQITKHVAQILDSRMNTKYDENDKLIREVKVITLKSKLVSDFRKDFQFYKVREINNYHHAHDAYLNAVVGTALIKKYPKLESEFVYGDYKVYDVRKMIAKSEQEIGKATAKYFFYSNIMNFFKTEITLANGEIRKRPLIETNGETGEIVWDKGRDFATVRKVLSMPQVNIVKKTEVQTGGFSKESILPKRNSDKLIARKKDWDPKKYGGFDSPTVAYSVLVVAKVEKGKSKKLKSVKELLGITIMERSSFEKNPIDFLEAKGYKEVKKDLIIKLPKYSLFELENGRKRMLASAGELQKGNELALPSKYVNFLYLASHYEKLKGSPEDNEQKQLFVEQHKHYLDEIIEQISEFSKRVILADANLDKVLSAYNKHRDKPIREQAENIIHLFTLTNLGAPAAFKYFDTTIDRKRYTSTKEVLDATLIHQSITGLYETRIDLSQLGGDGGEAAAKGGSPAPGGIPWLMKKPLQLTTLVPLQEYEERLLKQTMLTGSYKEKLQSLFLKYDALWQHWENQVGHRRIKPHHIATGTVNPRPQKQYPINPKAKASIQTVINDLLKQGVLIQQNSIMNTPVYPVPKPDGKWRMVLDYREVNKTIPLIAAQNQHSAGILSSIFRGKYKTTLDLSNGFWAHSITPESYWLTAFTWLGQQYCWTRLPQGFLNSPALFNADVVDLLKEVPNVQVYVDDIYISHDDPREHLEQLEKVFSLLLNAGYVVSLKKSEIAQHEVEFLGFNITKEGRGLTETFKQKLLNITPPRDLKQLQSILGKLNFARNFIPNFSELVKPLYNIIATAPGKYITWTTDNSQQLQNIISMLNSAENLEERNPEVRLIMKVNTSPSAGYIRFYNEFAKRPIMYLNYVYTKAEVKFTNTEKLLTTIHKGLIKALDLGMGQEILVYSPIVSMTKIQKTPLPERKALPIRWITWMSYLEDPRIQFHYDKTLPELQQVPTVTDDIIAKIKHPSEFSMVFYTDGSAIKHPNVNKSHNAGMGIAQVQFKPEFTVINTWSIPLGDHTAQLAEVAAVEFACKKALKIDGPVLIVTDSFYVAESVNKELPYWQSNGFFNNKKKPLKHVSKWKSIADCIQLKPDIIIIHEKGHQPTASTFHTEGNNLADKLATQGSYVVNAGKRTADGSEFEKRTADGSEFESPKKKAKVE

SEQ ID NO: 573 - protein, 2085 aa, synthetic construct
  source 1..2085: note = Description of Artificial Sequence: Synthetic polypeptide
MPAAKRVKLDGGDKKYSIGLDIGTNSVGWAVITDEYKVPSKKFKVLGNTDRHSIKKNLIGALLFDSGETAEATRLKRTARRRYTRRKNRICYLQEIFSNEMAKVDDSFFHRLEESFLVEEDKKHERHPIFGNIVDEVAYHEKYPTIYHLRKKLVDSTDKADLRLIYLALAHMIKFRGHFLIEGDLNPDNSDVDKLFIQLVQTYNQLFEENPINASGVDAKAILSARLSKSRRLENLIAQLPGEKKNGLFGNLIALSLGLTPNFKSNFDLAEDAKLQLSKDTYDDDLDNLLAQIGDQYADLFLAAKNLSDAILLSDILRVNTEITKAPLSASMIKRYDEHHQDLTLLKALVRQQLPEKYKEIFFDQSKNGYAGYIDGGASQEEFYKFIKPILEKMDGTEELLVKLNREDLLRKQRTFDNGSIPHQIHLGELHAILRRQEDFYPFLKDNREKIEKILTFRIPYYVGPLARGNSRFAWMTRKSEETITPWNFEEVVDKGASAQSFIERMTNFDKNLPNEKVLPKHSLLYEYFTVYNELTKVKYVTEGMRKPAFLSGEQKKAIVDLLFKTNRKVTVKQLKEDYFKKIECFDSVEISGVEDRFNASLGTYHDLLKIIKDKDFLDNEENEDILEDIVLTLTLFEDREMIEERLKTYAHLFDDKVMKQLKRRRYTGWGRLSRKLINGIRDKQSGKTILDFLKSDGFANRNFMQLIHDDSLTFKEDIQKAQVSGQGDSLHEHIANLAGSPAIKKGILQTVKVVDELVKVMGRHKPENIVIEMARENQTTQKGQKNSRERMKRIEEGIKELGSQILKEHPVENTQLQNEKLYLYYLQNGRDMYVDQELDINRLSDYDVDHIVPQSFLKDDSIDNKVLTRSDKARGKSDNVPSEEVVKKMKNYWRQLLNAKLITQRKFDNLTKAERGGLSELDKAGFIKRQLVETRQITKHVAQILDSRMNTKYDENDKLIREVKVITLKSKLVSDFRKDFQFYKVREINNYHHAHDAYLNAVVGTALIKKYPKLESEFVYGDYKVYDVRKMIAKSEQEIGKATAKYFFYSNIMNFFKTEITLANGEIRKRPLIETNGETGEIVWDKGRDFATVRKVLSMPQVNIVKKTEVQTGGFSKESILPKRNSDKLIARKKDWDPKKYGGFDSPTVAYSVLVVAKVEKGKSKKLKSVKELLGITIMERSSFEKNPIDFLEAKGYKEVKKDLIIKLPKYSLFELENGRKRMLASAGELQKGNELALPSKYVNFLYLASHYEKLKGSPEDNEQKQLFVEQHKHYLDEIIEQISEFSKRVILADANLDKVLSAYNKHRDKPIREQAENIIHLFTLTNLGAPAAFKYFDTTIDRKRYTSTKEVLDATLIHQSITGLYETRIDLSQLGGDGGGGSPAPGGGGGIPWLMKKPLQLTTLVPLQEYEERLLKQTMLTGSYKEKLQSLFLKYDALWQHWENQVGHRRIKPHHIATGTVNPRPQKQYPINPKAKASIQTVINDLLKQGVLIQQNSIMNTPVYPVPKPDGKWRMVLDYREVNKTIPLIAAQNQHSAGILSSIFRGKYKTTLDLSNGFWAHSITPESYWLTAFTWLGQQYCWTRLPQGFLNSPALFNADVVDLLKEVPNVQVYVDDIYISHDDPREHLEQLEKVFSLLLNAGYVVSLKKSEIAQHEVEFLGFNITKEGRGLTETFKQKLLNITPPRDLKQLQSILGKLNFARNFIPNFSELVKPLYNIIATAPGKYITWTTDNSQQLQNIISMLNSAENLEERNPEVRLIMKVNTSPSAGYIRFYNEFAKRPIMYLNYVYTKAEVKFTNTEKLLTTIHKGLIKALDLGMGQEILVYSPIVSMTKIQKTPLPERKALPIRWITWMSYLEDPRIQFHYDKTLPELQQVPTVTDDIIAKIKHPSEFSMVFYTDGSAIKHPNVNKSHNAGMGIAQVQFKPEFTVINTWSIPLGDHTAQLAEVAAVEFACKKALKIDGPVLIVTDSFYVAESVNKELPYWQSNGFFNNKKKPLKHVSKWKSIADCIQLKPDIIIIHEKGHQPTASTFHTEGNNLADKLATQGSYVVNAGKRTADGSEFEKRTADGSEFESPKKKAKVE

SEQ ID NO: 574 - protein, 2091 aa, synthetic construct
  source 1..2091: note = Description of Artificial Sequence: Synthetic polypeptide
MPAAKRVKLDGGDKKYSIGLDIGTNSVGWAVITDEYKVPSKKFKVLGNTDRHSIKKNLIGALLFDSGETAEATRLKRTARRRYTRRKNRICYLQEIFSNEMAKVDDSFFHRLEESFLVEEDKKHERHPIFGNIVDEVAYHEKYPTIYHLRKKLVDSTDKADLRLIYLALAHMIKFRGHFLIEGDLNPDNSDVDKLFIQLVQTYNQLFEENPINASGVDAKAILSARLSKSRRLENLIAQLPGEKKNGLFGNLIALSLGLTPNFKSNFDLAEDAKLQLSKDTYDDDLDNLLAQIGDQYADLFLAAKNLSDAILLSDILRVNTEITKAPLSASMIKRYDEHHQDLTLLKALVRQQLPEKYKEIFFDQSKNGYAGYIDGGASQEEFYKFIKPILEKMDGTEELLVKLNREDLLRKQRTFDNGSIPHQIHLGELHAILRRQEDFYPFLKDNREKIEKILTFRIPYYVGPLARGNSRFAWMTRKSEETITPWNFEEVVDKGASAQSFIERMTNFDKNLPNEKVLPKHSLLYEYFTVYNELTKVKYVTEGMRKPAFLSGEQKKAIVDLLFKTNRKVTVKQLKEDYFKKIECFDSVEISGVEDRFNASLGTYHDLLKIIKDKDFLDNEENEDILEDIVLTLTLFEDREMIEERLKTYAHLFDDKVMKQLKRRRYTGWGRLSRKLINGIRDKQSGKTILDFLKSDGFANRNFMQLIHDDSLTFKEDIQKAQVSGQGDSLHEHIANLAGSPAIKKGILQTVKVVDELVKVMGRHKPENIVIEMARENQTTQKGQKNSRERMKRIEEGIKELGSQILKEHPVENTQLQNEKLYLYYLQNGRDMYVDQELDINRLSDYDVDHIVPQSFLKDDSIDNKVLTRSDKARGKSDNVPSEEVVKKMKNYWRQLLNAKLITQRKFDNLTKAERGGLSELDKAGFIKRQLVETRQITKHVAQILDSRMNTKYDENDKLIREVKVITLKSKLVSDFRKDFQFYKVREINNYHHAHDAYLNAVVGTALIKKYPKLESEFVYGDYKVYDVRKMIAKSEQEIGKATAKYFFYSNIMNFFKTEITLANGEIRKRPLIETNGETGEIVWDKGRDFATVRKVLSMPQVNIVKKTEVQTGGFSKESILPKRNSDKLIARKKDWDPKKYGGFDSPTVAYSVLVVAKVEKGKSKKLKSVKELLGITIMERSSFEKNPIDFLEAKGYKEVKKDLIIKLPKYSLFELENGRKRMLASAGELQKGNELALPSKYVNFLYLASHYEKLKGSPEDNEQKQLFVEQHKHYLDEIIEQISEFSKRVILADANLDKVLSAYNKHRDKPIREQAENIIHLFTLTNLGAPAAFKYFDTTIDRKRYTSTKEVLDATLIHQSITGLYETRIDLSQLGGDGGEAAAKGGGGSEAAAKGGIPWLMKKPLQLTTLVPLQEYEERLLKQTMLTGSYKEKLQSLFLKYDALWQHWENQVGHRRIKPHHIATGTVNPRPQKQYPINPKAKASIQTVINDLLKQGVLIQQNSIMNTPVYPVPKPDGKWRMVLDYREVNKTIPLIAAQNQHSAGILSSIFRGKYKTTLDLSNGFWAHSITPESYWLTAFTWLGQQYCWTRLPQGFLNSPALFNADVVDLLKEVPNVQVYVDDIYISHDDPREHLEQLEKVFSLLLNAGYVVSLKKSEIAQHEVEFLGFNITKEGRGLTETFKQKLLNITPPRDLKQLQSILGKLNFARNFIPNFSELVKPLYNIIATAPGKYITWTTDNSQQLQNIISMLNSAENLEERNPEVRLIMKVNTSPSAGYIRFYNEFAKRPIMYLNYVYTKAEVKFTNTEKLLTTIHKGLIKALDLGMGQEILVYSPIVSMTKIQKTPLPERKALPIRWITWMSYLEDPRIQFHYDKTLPELQQVPTVTDDIIAKIKHPSEFSMVFYTDGSAIKHPNVNKSHNAGMGIAQVQFKPEFTVINTWSIPLGDHTAQLAEVAAVEFACKKALKIDGPVLIVTDSFYVAESVNKELPYWQSNGFFNNKKKPLKHVSKWKSIADCIQLKPDIIIIHEKGHQPTASTFHTEGNNLADKLATQGSYVVNAGKRTADGSEFEKRTADGSEFESPKKKAKVE

SEQ ID NO: 575 - protein, 2082 aa, synthetic construct
  source 1..2082: note = Description of Artificial Sequence: Synthetic polypeptide
MPAAKRVKLDGGDKKYSIGLDIGTNSVGWAVITDEYKVPSKKFKVLGNTDRHSIKKNLIGALLFDSGETAEATRLKRTARRRYTRRKNRICYLQEIFSNEMAKVDDSFFHRLEESFLVEEDKKHERHPIFGNIVDEVAYHEKYPTIYHLRKKLVDSTDKADLRLIYLALAHMIKFRGHFLIEGDLNPDNSDVDKLFIQLVQTYNQLFEENPINASGVDAKAILSARLSKSRRLENLIAQLPGEKKNGLFGNLIALSLGLTPNFKSNFDLAEDAKLQLSKDTYDDDLDNLLAQIGDQYADLFLAAKNLSDAILLSDILRVNTEITKAPLSASMIKRYDEHHQDLTLLKALVRQQLPEKYKEIFFDQSKNGYAGYIDGGASQEEFYKFIKPILEKMDGTEELLVKLNREDLLRKQRTFDNGSIPHQIHLGELHAILRRQEDFYPFLKDNREKIEKILTFRIPYYVGPLARGNSRFAWMTRKSEETITPWNFEEVVDKGASAQSFIERMTNFDKNLPNEKVLPKHSLLYEYFTVYNELTKVKYVTEGMRKPAFLSGEQKKAIVDLLFKTNRKVTVKQLKEDYFKKIECFDSVEISGVEDRFNASLGTYHDLLKIIKDKDFLDNEENEDILEDIVLTLTLFEDREMIEERLKTYAHLFDDKVMKQLKRRRYTGWGRLSRKLINGIRDKQSGKTILDFLKSDGFANRNFMQLIHDDSLTFKEDIQKAQVSGQGDSLHEHIANLAGSPAIKKGILQTVKVVDELVKVMGRHKPENIVIEMARENQTTQKGQKNSRERMKRIEEGIKELGSQILKEHPVENTQLQNEKLYLYYLQNGRDMYVDQELDINRLSDYDVDHIVPQSFLKDDSIDNKVLTRSDKARGKSDNVPSEEVVKKMKNYWRQLLNAKLITQRKFDNLTKAERGGLSELDKAGFIKRQLVETRQITKHVAQILDSRMNTKYDENDKLIREVKVITLKSKLVSDFRKDFQFYKVREINNYHHAHDAYLNAVVGTALIKKYPKLESEFVYGDYKVYDVRKMIAKSEQEIGKATAKYFFYSNIMNFFKTEITLANGEIRKRPLIETNGETGEIVWDKGRDFATVRKVLSMPQVNIVKKTEVQTGGFSKESILPKRNSDKLIARKKDWDPKKYGGFDSPTVAYSVLVVAKVEKGKSKKLKSVKELLGITIMERSSFEKNPIDFLEAKGYKEVKKDLIIKLPKYSLFELENGRKRMLASAGELQKGNELALPSKYVNFLYLASHYEKLKGSPEDNEQKQLFVEQHKHYLDEIIEQISEFSKRVILADANLDKVLSAYNKHRDKPIREQAENIIHLFTLTNLGAPAAFKYFDTTIDRKRYTSTKEVLDATLIHQSITGLYETRIDLSQLGGDGGGSSPAPGGIPWLMKKPLQLTTLVPLQEYEERLLKQTMLTGSYKEKLQSLFLKYDALWQHWENQVGHRRIKPHHIATGTVNPRPQKQYPINPKAKASIQTVINDLLKQGVLIQQNSIMNTPVYPVPKPDGKWRMVLDYREVNKTIPLIAAQNQHSAGILSSIFRGKYKTTLDLSNGFWAHSITPESYWLTAFTWLGQQYCWTRLPQGFLNSPALFNADVVDLLKEVPNVQVYVDDIYISHDDPREHLEQLEKVFSLLLNAGYVVSLKKSEIAQHEVEFLGFNITKEGRGLTETFKQKLLNITPPRDLKQLQSILGKLNFARNFIPNFSELVKPLYNIIATAPGKYITWTTDNSQQLQNIISMLNSAENLEERNPEVRLIMKVNTSPSAGYIRFYNEFAKRPIMYLNYVYTKAEVKFTNTEKLLTTIHKGLIKALDLGMGQEILVYSPIVSMTKIQKTPLPERKALPIRWITWMSYLEDPRIQFHYDKTLPELQQVPTVTDDIIAKIKHPSEFSMVFYTDGSAIKHPNVNKSHNAGMGIAQVQFKPEFTVINTWSIPLGDHTAQLAEVAAVEFACKKALKIDGPVLIVTDSFYVAESVNKELPYWQSNGFFNNKKKPLKHVSKWKSIADCIQLKPDIIIIHEKGHQPTASTFHTEGNNLADKLATQGSYVVNAGKRTADGSEFEKRTADGSEFESPKKKAKVE

SEQ ID NO: 576 - protein, 2087 aa, synthetic construct
  source 1..2087: note = Description of Artificial Sequence: Synthetic polypeptide
MPAAKRVKLDGGDKKYSIGLDIGTNSVGWAVITDEYKVPSKKFKVLGNTDRHSIKKNLIGALLFDSGETAEATRLKRTARRRYTRRKNRICYLQEIFSNEMAKVDDSFFHRLEESFLVEEDKKHERHPIFGNIVDEVAYHEKYPTIYHLRKKLVDSTDKADLRLIYLALAHMIKFRGHFLIEGDLNPDNSDVDKLFIQLVQTYNQLFEENPINASGVDAKAILSARLSKSRRLENLIAQLPGEKKNGLFGNLIALSLGLTPNFKSNFDLAEDAKLQLSKDTYDDDLDNLLAQIGDQYADLFLAAKNLSDAILLSDILRVNTEITKAPLSASMIKRYDEHHQDLTLLKALVRQQLPEKYKEIFFDQSKNGYAGYIDGGASQEEFYKFIKPILEKMDGTEELLVKLNREDLLRKQRTFDNGSIPHQIHLGELHAILRRQEDFYPFLKDNREKIEKILTFRIPYYVGPLARGNSRFAWMTRKSEETITPWNFEEVVDKGASAQSFIERMTNFDKNLPNEKVLPKHSLLYEYFTVYNELTKVKYVTEGMRKPAFLSGEQKKAIVDLLFKTNRKVTVKQLKEDYFKKIECFDSVEISGVEDRFNASLGTYHDLLKIIKDKDFLDNEENEDILEDIVLTLTLFEDREMIEERLKTYAHLFDDKVMKQLKRRRYTGWGRLSRKLINGIRDKQSGKTILDFLKSDGFANRNFMQLIHDDSLTFKEDIQKAQVSGQGDSLHEHIANLAGSPAIKKGILQTVKVVDELVKVMGRHKPENIVIEMARENQTTQKGQKNSRERMKRIEEGIKELGSQILKEHPVENTQLQNEKLYLYYLQNGRDMYVDQELDINRLSDYDVDHIVPQSFLKDDSIDNKVLTRSDKARGKSDNVPSEEVVKKMKNYWRQLLNAKLITQRKFDNLTKAERGGLSELDKAGFIKRQLVETRQITKHVAQILDSRMNTKYDENDKLIREVKVITLKSKLVSDFRKDFQFYKVREINNYHHAHDAYLNAVVGTALIKKYPKLESEFVYGDYKVYDVRKMIAKSEQEIGKATAKYFFYSNIMNFFKTEITLANGEIRKRPLIETNGETGEIVWDKGRDFATVRKVLSMPQVNIVKKTEVQTGGFSKESILPKRNSDKLIARKKDWDPKKYGGFDSPTVAYSVLVVAKVEKGKSKKLKSVKELLGITIMERSSFEKNPIDFLEAKGYKEVKKDLIIKLPKYSLFELENGRKRMLASAGELQKGNELALPSKYVNFLYLASHYEKLKGSPEDNEQKQLFVEQHKHYLDEIIEQISEFSKRVILADANLDKVLSAYNKHRDKPIREQAENIIHLFTLTNLGAPAAFKYFDTTIDRKRYTSTKEVLDATLIHQSITGLYETRIDLSQLGGDGGPAPGGSEAAAKGGIPWLMKKPLQLTTLVPLQEYEERLLKQTMLTGSYKEKLQSLFLKYDALWQHWENQVGHRRIKPHHIATGTVNPRPQKQYPINPKAKASIQTVINDLLKQGVLIQQNSIMNTPVYPVPKPDGKWRMVLDYREVNKTIPLIAAQNQHSAGILSSIFRGKYKTTLDLSNGFWAHSITPESYWLTAFTWLGQQYCWTRLPQGFLNSPALFNADVVDLLKEVPNVQVYVDDIYISHDDPREHLEQLEKVFSLLLNAGYVVSLKKSEIAQHEVEFLGFNITKEGRGLTETFKQKLLNITPPRDLKQLQSILGKLNFARNFIPNFSELVKPLYNIIATAPGKYITWTTDNSQQLQNIISMLNSAENLEERNPEVRLIMKVNTSPSAGYIRFYNEFAKRPIMYLNYVYTKAEVKFTNTEKLLTTIHKGLIKALDLGMGQEILVYSPIVSMTKIQKTPLPERKALPIRWITWMSYLEDPRIQFHYDKTLPELQQVPTVTDDIIAKIKHPSEFSMVFYTDGSAIKHPNVNKSHNAGMGIAQVQFKPEFTVINTWSIPLGDHTAQLAEVAAVEFACKKALKIDGPVLIVTDSFYVAESVNKELPYWQSNGFFNNKKKPLKHVSKWKSIADCIQLKPDIIIIHEKGHQPTASTFHTEGNNLADKLATQGSYVVNAGKRTADGSEFEKRTADGSEFESPKKKAKVE

SEQ ID NO: 577 - protein, 2087 aa, synthetic construct
  source 1..2087: note = Description of Artificial Sequence: Synthetic polypeptide
MPAAKRVKLDGGDKKYSIGLDIGTNSVGWAVITDEYKVPSKKFKVLGNTDRHSIKKNLIGALLFDSGETAEATRLKRTARRRYTRRKNRICYLQEIFSNEMAKVDDSFFHRLEESFLVEEDKKHERHPIFGNIVDEVAYHEKYPTIYHLRKKLVDSTDKADLRLIYLALAHMIKFRGHFLIEGDLNPDNSDVDKLFIQLVQTYNQLFEENPINASGVDAKAILSARLSKSRRLENLIAQLPGEKKNGLFGNLIALSLGLTPNFKSNFDLAEDAKLQLSKDTYDDDLDNLLAQIGDQYADLFLAAKNLSDAILLSDILRVNTEITKAPLSASMIKRYDEHHQDLTLLKALVRQQLPEKYKEIFFDQSKNGYAGYIDGGASQEEFYKFIKPILEKMDGTEELLVKLNREDLLRKQRTFDNGSIPHQIHLGELHAILRRQEDFYPFLKDNREKIEKILTFRIPYYVGPLARGNSRFAWMTRKSEETITPWNFEEVVDKGASAQSFIERMTNFDKNLPNEKVLPKHSLLYEYFTVYNELTKVKYVTEGMRKPAFLSGEQKKAIVDLLFKTNRKVTVKQLKEDYFKKIECFDSVEISGVEDRFNASLGTYHDLLKIIKDKDFLDNEENEDILEDIVLTLTLFEDREMIEERLKTYAHLFDDKVMKQLKRRRYTGWGRLSRKLINGIRDKQSGKTILDFLKSDGFANRNFMQLIHDDSLTFKEDIQKAQVSGQGDSLHEHIANLAGSPAIKKGILQTVKVVDELVKVMGRHKPENIVIEMARENQTTQKGQKNSRERMKRIEEGIKELGSQILKEHPVENTQLQNEKLYLYYLQNGRDMYVDQELDINRLSDYDVDHIVPQSFLKDDSIDNKVLTRSDKARGKSDNVPSEEVVKKMKNYWRQLLNAKLITQRKFDNLTKAERGGLSELDKAGFIKRQLVETRQITKHVAQILDSRMNTKYDENDKLIREVKVITLKSKLVSDFRKDFQFYKVREINNYHHAHDAYLNAVVGTALIKKYPKLESEFVYGDYKVYDVRKMIAKSEQEIGKATAKYFFYSNIMNFFKTEITLANGEIRKRPLIETNGETGEIVWDKGRDFATVRKVLSMPQVNIVKKTEVQTGGFSKESILPKRNSDKLIARKKDWDPKKYGGFDSPTVAYSVLVVAKVEKGKSKKLKSVKELLGITIMERSSFEKNPIDFLEAKGYKEVKKDLIIKLPKYSLFELENGRKRMLASAGELQKGNELALPSKYVNFLYLASHYEKLKGSPEDNEQKQLFVEQHKHYLDEIIEQISEFSKRVILADANLDKVLSAYNKHRDKPIREQAENIIHLFTLTNLGAPAAFKYFDTTIDRKRYTSTKEVLDATLIHQSITGLYETRIDLSQLGGDGGGGGEAAAKGGSGGIPWLMKKPLQLTTLVPLQEYEERLLKQTMLTGSYKEKLQSLFLKYDALWQHWENQVGHRRIKPHHIATGTVNPRPQKQYPINPKAKASIQTVINDLLKQGVLIQQNSIMNTPVYPVPKPDGKWRMVLDYREVNKTIPLIAAQNQHSAGILSSIFRGKYKTTLDLSNGFWAHSITPESYWLTAFTWLGQQYCWTRLPQGFLNSPALFNADVVDLLKEVPNVQVYVDDIYISHDDPREHLEQLEKVFSLLLNAGYVVSLKKSEIAQHEVEFLGFNITKEGRGLTETFKQKLLNITPPRDLKQLQSILGKLNFARNFIPNFSELVKPLYNIIATAPGKYITWTTDNSQQLQNIISMLNSAENLEERNPEVRLIMKVNTSPSAGYIRFYNEFAKRPIMYLNYVYTKAEVKFTNTEKLLTTIHKGLIKALDLGMGQEILVYSPIVSMTKIQKTPLPERKALPIRWITWMSYLEDPRIQFHYDKTLPELQQVPTVTDDIIAKIKHPSEFSMVFYTDGSAIKHPNVNKSHNAGMGIAQVQFKPEFTVINTWSIPLGDHTAQLAEVAAVEFACKKALKIDGPVLIVTDSFYVAESVNKELPYWQSNGFFNNKKKPLKHVSKWKSIADCIQLKPDIIIIHEKGHQPTASTFHTEGNNLADKLATQGSYVVNAGKRTADGSEFEKRTADGSEFESPKKKAKVE

SEQ ID NO: 578 - protein, 2084 aa, synthetic construct
  source 1..2084: note = Description of Artificial Sequence: Synthetic polypeptide
MPAAKRVKLDGGDKKYSIGLDIGTNSVGWAVITDEYKVPSKKFKVLGNTDRHSIKKNLIGALLFDSGETAEATRLKRTARRRYTRRKNRICYLQEIFSNEMAKVDDSFFHRLEESFLVEEDKKHERHPIFGNIVDEVAYHEKYPTIYHLRKKLVDSTDKADLRLIYLALAHMIKFRGHFLIEGDLNPDNSDVDKLFIQLVQTYNQLFEENPINASGVDAKAILSARLSKSRRLENLIAQLPGEKKNGLFGNLIALSLGLTPNFKSNFDLAEDAKLQLSKDTYDDDLDNLLAQIGDQYADLFLAAKNLSDAILLSDILRVNTEITKAPLSASMIKRYDEHHQDLTLLKALVRQQLPEKYKEIFFDQSKNGYAGYIDGGASQEEFYKFIKPILEKMDGTEELLVKLNREDLLRKQRTFDNGSIPHQIHLGELHAILRRQEDFYPFLKDNREKIEKILTFRIPYYVGPLARGNSRFAWMTRKSEETITPWNFEEVVDKGASAQSFIERMTNFDKNLPNEKVLPKHSLLYEYFTVYNELTKVKYVTEGMRKPAFLSGEQKKAIVDLLFKTNRKVTVKQLKEDYFKKIECFDSVEISGVEDRFNASLGTYHDLLKIIKDKDFLDNEENEDILEDIVLTLTLFEDREMIEERLKTYAHLFDDKVMKQLKRRRYTGWGRLSRKLINGIRDKQSGKTILDFLKSDGFANRNFMQLIHDDSLTFKEDIQKAQVSGQGDSLHEHIANLAGSPAIKKGILQTVKVVDELVKVMGRHKPENIVIEMARENQTTQKGQKNSRERMKRIEEGIKELGSQILKEHPVENTQLQNEKLYLYYLQNGRDMYVDQELDINRLSDYDVDHIVPQSFLKDDSIDNKVLTRSDKARGKSDNVPSEEVVKKMKNYWRQLLNAKLITQRKFDNLTKAERGGLSELDKAGFIKRQLVETRQITKHVAQILDSRMNTKYDENDKLIREVKVITLKSKLVSDFRKDFQFYKVREINNYHHAHDAYLNAVVGTALIKKYPKLESEFVYGDYKVYDVRKMIAKSEQEIGKATAKYFFYSNIMNFFKTEITLANGEIRKRPLIETNGETGEIVWDKGRDFATVRKVLSMPQVNIVKKTEVQTGGFSKESILPKRNSDKLIARKKDWDPKKYGGFDSPTVAYSVLVVAKVEKGKSKKLKSVKELLGITIMERSSFEKNPIDFLEAKGYKEVKKDLIIKLPKYSLFELENGRKRMLASAGELQKGNELALPSKYVNFLYLASHYEKLKGSPEDNEQKQLFVEQHKHYLDEIIEQISEFSKRVILADANLDKVLSAYNKHRDKPIREQAENIIHLFTLTNLGAPAAFKYFDTTIDRKRYTSTKEVLDATLIHQSITGLYETRIDLSQLGGDGGGGGGGGGGGGIPWLMKKPLQLTTLVPLQEYEERLLKQTMLTGSYKEKLQSLFLKYDALWQHWENQVGHRRIKPHHIATGTVNPRPQKQYPINPKAKASIQTVINDLLKQGVLIQQNSIMNTPVYPVPKPDGKWRMVLDYREVNKTIPLIAAQNQHSAGILSSIFRGKYKTTLDLSNGFWAHSITPESYWLTAFTWLGQQYCWTRLPQGFLNSPALFNADVVDLLKEVPNVQVYVDDIYISHDDPREHLEQLEKVFSLLLNAGYVVSLKKSEIAQHEVEFLGFNITKEGRGLTETFKQKLLNITPPRDLKQLQSILGKLNFARNFIPNFSELVKPLYNIIATAPGKYITWTTDNSQQLQNIISMLNSAENLEERNPEVRLIMKVNTSPSAGYIRFYNEFAKRPIMYLNYVYTKAEVKFTNTEKLLTTIHKGLIKALDLGMGQEILVYSPIVSMTKIQKTPLPERKALPIRWITWMSYLEDPRIQFHYDKTLPELQQVPTVTDDIIAKIKHPSEFSMVFYTDGSAIKHPNVNKSHNAGMGIAQVQFKPEFTVINTWSIPLGDHTAQLAEVAAVEFACKKALKIDGPVLIVTDSFYVAESVNKELPYWQSNGFFNNKKKPLKHVSKWKSIADCIQLKPDIIIIHEKGHQPTASTFHTEGNNLADKLATQGSYVVNAGKRTADGSEFEKRTADGSEFESPKKKAKVE

SEQ ID NO: 579 - protein, 2087 aa, synthetic construct
  source 1..2087: note = Description of Artificial Sequence: Synthetic polypeptide
MPAAKRVKLDGGDKKYSIGLDIGTNSVGWAVITDEYKVPSKKFKVLGNTDRHSIKKNLIGALLFDSGETAEATRLKRTARRRYTRRKNRICYLQEIFSNEMAKVDDSFFHRLEESFLVEEDKKHERHPIFGNIVDEVAYHEKYPTIYHLRKKLVDSTDKADLRLIYLALAHMIKFRGHFLIEGDLNPDNSDVDKLFIQLVQTYNQLFEENPINASGVDAKAILSARLSKSRRLENLIAQLPGEKKNGLFGNLIALSLGLTPNFKSNFDLAEDAKLQLSKDTYDDDLDNLLAQIGDQYADLFLAAKNLSDAILLSDILRVNTEITKAPLSASMIKRYDEHHQDLTLLKALVRQQLPEKYKEIFFDQSKNGYAGYIDGGASQEEFYKFIKPILEKMDGTEELLVKLNREDLLRKQRTFDNGSIPHQIHLGELHAILRRQEDFYPFLKDNREKIEKILTFRIPYYVGPLARGNSRFAWMTRKSEETITPWNFEEVVDKGASAQSFIERMTNFDKNLPNEKVLPKHSLLYEYFTVYNELTKVKYVTEGMRKPAFLSGEQKKAIVDLLFKTNRKVTVKQLKEDYFKKIECFDSVEISGVEDRFNASLGTYHDLLKIIKDKDFLDNEENEDILEDIVLTLTLFEDREMIEERLKTYAHLFDDKVMKQLKRRRYTGWGRLSRKLINGIRDKQSGKTILDFLKSDGFANRNFMQLIHDDSLTFKEDIQKAQVSGQGDSLHEHIANLAGSPAIKKGILQTVKVVDELVKVMGRHKPENIVIEMARENQTTQKGQKNSRERMKRIEEGIKELGSQILKEHPVENTQLQNEKLYLYYLQNGRDMYVDQELDINRLSDYDVDHIVPQSFLKDDSIDNKVLTRSDKARGKSDNVPSEEVVKKMKNYWRQLLNAKLITQRKFDNLTKAERGGLSELDKAGFIKRQLVETRQITKHVAQILDSRMNTKYDENDKLIREVKVITLKSKLVSDFRKDFQFYKVREINNYHHAHDAYLNAVVGTALIKKYPKLESEFVYGDYKVYDVRKMIAKSEQEIGKATAKYFFYSNIMNFFKTEITLANGEIRKRPLIETNGETGEIVWDKGRDFATVRKVLSMPQVNIVKKTEVQTGGFSKESILPKRNSDKLIARKKDWDPKKYGGFDSPTVAYSVLVVAKVEKGKSKKLKSVKELLGITIMERSSFEKNPIDFLEAKGYKEVKKDLIIKLPKYSLFELENGRKRMLASAGELQKGNELALPSKYVNFLYLASHYEKLKGSPEDNEQKQLFVEQHKHYLDEIIEQISEFSKRVILADANLDKVLSAYNKHRDKPIREQAENIIHLFTLTNLGAPAAFKYFDTTIDRKRYTSTKEVLDATLIHQSITGLYETRIDLSQLGGDGGPAPGSSEAAAKGGIPWLMKKPLQLTTLVPLQEYEERLLKQTMLTGSYKEKLQSLFLKYDALWQHWENQVGHRRIKPHHIATGTVNPRPQKQYPINPKAKASIQTVINDLLKQGVLIQQNSIMNTPVYPVPKPDGKWRMVLDYREVNKTIPLIAAQNQHSAGILSSIFRGKYKTTLDLSNGFWAHSITPESYWLTAFTWLGQQYCWTRLPQGFLNSPALFNADVVDLLKEVPNVQVYVDDIYISHDDPREHLEQLEKVFSLLLNAGYVVSLKKSEIAQHEVEFLGFNITKEGRGLTETFKQKLLNITPPRDLKQLQSILGKLNFARNFIPNFSELVKPLYNIIATAPGKYITWTTDNSQQLQNIISMLNSAENLEERNPEVRLIMKVNTSPSAGYIRFYNEFAKRPIMYLNYVYTKAEVKFTNTEKLLTTIHKGLIKALDLGMGQEILVYSPIVSMTKIQKTPLPERKALPIRWITWMSYLEDPRIQFHYDKTLPELQQVPTVTDDIIAKIKHPSEFSMVFYTDGSAIKHPNVNKSHNAGMGIAQVQFKPEFTVINTWSIPLGDHTAQLAEVAAVEFACKKALKIDGPVLIVTDSFYVAESVNKELPYWQSNGFFNNKKKPLKHVSKWKSIADCIQLKPDIIIIHEKGHQPTASTFHTEGNNLADKLATQGSYVVNAGKRTADGSEFEKRTADGSEFESPKKKAKVE

SEQ ID NO: 580 - protein, 2087 aa, synthetic construct
  source 1..2087: note = Description of Artificial Sequence: Synthetic polypeptide
MPAAKRVKLDGGDKKYSIGLDIGTNSVGWAVITDEYKVPSKKFKVLGNTDRHSIKKNLIGALLFDSGETAEATRLKRTARRRYTRRKNRICYLQEIFSNEMAKVDDSFFHRLEESFLVEEDKKHERHPIFGNIVDEVAYHEKYPTIYHLRKKLVDSTDKADLRLIYLALAHMIKFRGHFLIEGDLNPDNSDVDKLFIQLVQTYNQLFEENPINASGVDAKAILSARLSKSRRLENLIAQLPGEKKNGLFGNLIALSLGLTPNFKSNFDLAEDAKLQLSKDTYDDDLDNLLAQIGDQYADLFLAAKNLSDAILLSDILRVNTEITKAPLSASMIKRYDEHHQDLTLLKALVRQQLPEKYKEIFFDQSKNGYAGYIDGGASQEEFYKFIKPILEKMDGTEELLVKLNREDLLRKQRTFDNGSIPHQIHLGELHAILRRQEDFYPFLKDNREKIEKILTFRIPYYVGPLARGNSRFAWMTRKSEETITPWNFEEVVDKGASAQSFIERMTNFDKNLPNEKVLPKHSLLYEYFTVYNELTKVKYVTEGMRKPAFLSGEQKKAIVDLLFKTNRKVTVKQLKEDYFKKIECFDSVEISGVEDRFNASLGTYHDLLKIIKDKDFLDNEENEDILEDIVLTLTLFEDREMIEERLKTYAHLFDDKVMKQLKRRRYTGWGRLSRKLINGIRDKQSGKTILDFLKSDGFANRNFMQLIHDDSLTFKEDIQKAQVSGQGDSLHEHIANLAGSPAIKKGILQTVKVVDELVKVMGRHKPENIVIEMARENQTTQKGQKNSRERMKRIEEGIKELGSQILKEHPVENTQLQNEKLYLYYLQNGRDMYVDQELDINRLSDYDVDHIVPQSFLKDDSIDNKVLTRSDKARGKSDNVPSEEVVKKMKNYWRQLLNAKLITQRKFDNLTKAERGGLSELDKAGFIKRQLVETRQITKHVAQILDSRMNTKYDENDKLIREVKVITLKSKLVSDFRKDFQFYKVREINNYHHAHDAYLNAVVGTALIKKYPKLESEFVYGDYKVYDVRKMIAKSEQEIGKATAKYFFYSNIMNFFKTEITLANGEIRKRPLIETNGETGEIVWDKGRDFATVRKVLSMPQVNIVKKTEVQTGGFSKESILPKRNSDKLIARKKDWDPKKYGGFDSPTVAYSVLVVAKVEKGKSKKLKSVKELLGITIMERSSFEKNPIDFLEAKGYKEVKKDLIIKLPKYSLFELENGRKRMLASAGELQKGNELALPSKYVNFLYLASHYEKLKGSPEDNEQKQLFVEQHKHYLDEIIEQISEFSKRVILADANLDKVLSAYNKHRDKPIREQAENIIHLFTLTNLGAPAAFKYFDTTIDRKRYTSTKEVLDATLIHQSITGLYETRIDLSQLGGDGGGGSEAAAKPAPGGIPWLMKKPLQLTTLVPLQEYEERLLKQTMLTGSYKEKLQSLFLKYDALWQHWENQVGHRRIKPHHIATGTVNPRPQKQYPINPKAKASIQTVINDLLKQGVLIQQNSIMNTPVYPVPKPDGKWRMVLDYREVNKTIPLIAAQNQHSAGILSSIFRGKYKTTLDLSNGFWAHSITPESYWLTAFTWLGQQYCWTRLPQGFLNSPALFNADVVDLLKEVPNVQVYVDDIYISHDDPREHLEQLEKVFSLLLNAGYVVSLKKSEIAQHEVEFLGFNITKEGRGLTETFKQKLLNITPPRDLKQLQSILGKLNFARNFIPNFSELVKPLYNIIATAPGKYITWTTDNSQQLQNIISMLNSAENLEERNPEVRLIMKVNTSPSAGYIRFYNEFAKRPIMYLNYVYTKAEVKFTNTEKLLTTIHKGLIKALDLGMGQEILVYSPIVSMTKIQKTPLPERKALPIRWITWMSYLEDPRIQFHYDKTLPELQQVPTVTDDIIAKIKHPSEFSMVFYTDGSAIKHPNVNKSHNAGMGIAQVQFKPEFTVINTWSIPLGDHTAQLAEVAAVEFACKKALKIDGPVLIVTDSFYVAESVNKELPYWQSNGFFNNKKKPLKHVSKWKSIADCIQLKPDIIIIHEKGHQPTASTFHTEGNNLADKLATQGSYVVNAGKRTADGSEFEKRTADGSEFESPKKKAKVE

SEQ ID NO: 581 - protein, 2085 aa, synthetic construct
  source 1..2085: note = Description of Artificial Sequence: Synthetic polypeptide
MPAAKRVKLDGGDKKYSIGLDIGTNSVGWAVITDEYKVPSKKFKVLGNTDRHSIKKNLIGALLFDSGETAEATRLKRTARRRYTRRKNRICYLQEIFSNEMAKVDDSFFHRLEESFLVEEDKKHERHPIFGNIVDEVAYHEKYPTIYHLRKKLVDSTDKADLRLIYLALAHMIKFRGHFLIEGDLNPDNSDVDKLFIQLVQTYNQLFEENPINASGVDAKAILSARLSKSRRLENLIAQLPGEKKNGLFGNLIALSLGLTPNFKSNFDLAEDAKLQLSKDTYDDDLDNLLAQIGDQYADLFLAAKNLSDAILLSDILRVNTEITKAPLSASMIKRYDEHHQDLTLLKALVRQQLPEKYKEIFFDQSKNGYAGYIDGGASQEEFYKFIKPILEKMDGTEELLVKLNREDLLRKQRTFDNGSIPHQIHLGELHAILRRQEDFYPFLKDNREKIEKILTFRIPYYVGPLARGNSRFAWMTRKSEETITPWNFEEVVDKGASAQSFIERMTNFDKNLPNEKVLPKHSLLYEYFTVYNELTKVKYVTEGMRKPAFLSGEQKKAIVDLLFKTNRKVTVKQLKEDYFKKIECFDSVEISGVEDRFNASLGTYHDLLKIIKDKDFLDNEENEDILEDIVLTLTLFEDREMIEERLKTYAHLFDDKVMKQLKRRRYTGWGRLSRKLINGIRDKQSGKTILDFLKSDGFANRNFMQLIHDDSLTFKEDIQKAQVSGQGDSLHEHIANLAGSPAIKKGILQTVKVVDELVKVMGRHKPENIVIEMARENQTTQKGQKNSRERMKRIEEGIKELGSQILKEHPVENTQLQNEKLYLYYLQNGRDMYVDQELDINRLSDYDVDHIVPQSFLKDDSIDNKVLTRSDKARGKSDNVPSEEVVKKMKNYWRQLLNAKLITQRKFDNLTKAERGGLSELDKAGFIKRQLVETRQITKHVAQILDSRMNTKYDENDKLIREVKVITLKSKLVSDFRKDFQFYKVREINNYHHAHDAYLNAVVGTALIKKYPKLESEFVYGDYKVYDVRKMIAKSEQEIGKATAKYFFYSNIMNFFKTEITLANGEIRKRPLIETNGETGEIVWDKGRDFATVRKVLSMPQVNIVKKTEVQTGGFSKESILPKRNSDKLIARKKDWDPKKYGGFDSPTVAYSVLVVAKVEKGKSKKLKSVKELLGITIMERSSFEKNPIDFLEAKGYKEVKKDLIIKLPKYSLFELENGRKRMLASAGELQKGNELALPSKYVNFLYLASHYEKLKGSPEDNEQKQLFVEQHKHYLDEIIEQISEFSKRVILADANLDKVLSAYNKHRDKPIREQAENIIHLFTLTNLGAPAAFKYFDTTIDRKRYTSTKEVLDATLIHQSITGLYETRIDLSQLGGDGGPAPGSSGGGGGIPWLMKKPLQLTTLVPLQEYEERLLKQTMLTGSYKEKLQSLFLKYDALWQHWENQVGHRRIKPHHIATGTVNPRPQKQYPINPKAKASIQTVINDLLKQGVLIQQNSIMNTPVYPVPKPDGKWRMVLDYREVNKTIPLIAAQNQHSAGILSSIFRGKYKTTLDLSNGFWAHSITPESYWLTAFTWLGQQYCWTRLPQGFLNSPALFNADVVDLLKEVPNVQVYVDDIYISHDDPREHLEQLEKVFSLLLNAGYVVSLKKSEIAQHEVEFLGFNITKEGRGLTETFKQKLLNITPPRDLKQLQSILGKLNFARNFIPNFSELVKPLYNIIATAPGKYITWTTDNSQQLQNIISMLNSAENLEERNPEVRLIMKVNTSPSAGYIRFYNEFAKRPIMYLNYVYTKAEVKFTNTEKLLTTIHKGLIKALDLGMGQEILVYSPIVSMTKIQKTPLPERKALPIRWITWMSYLEDPRIQFHYDKTLPELQQVPTVTDDIIAKIKHPSEFSMVFYTDGSAIKHPNVNKSHNAGMGIAQVQFKPEFTVINTWSIPLGDHTAQLAEVAAVEFACKKALKIDGPVLIVTDSFYVAESVNKELPYWQSNGFFNNKKKPLKHVSKWKSIADCIQLKPDIIIIHEKGHQPTASTFHTEGNNLADKLATQGSYVVNAGKRTADGSEFEKRTADGSEFESPKKKAKVE

SEQ ID NO: 582 - protein, 2087 aa, synthetic construct
  source 1..2087: note = Description of Artificial Sequence: Synthetic polypeptide
MPAAKRVKLDGGDKKYSIGLDIGTNSVGWAVITDEYKVPSKKFKVLGNTDRHSIKKNLIGALLFDSGETAEATRLKRTARRRYTRRKNRICYLQEIFSNEMAKVDDSFFHRLEESFLVEEDKKHERHPIFGNIVDEVAYHEKYPTIYHLRKKLVDSTDKADLRLIYLALAHMIKFRGHFLIEGDLNPDNSDVDKLFIQLVQTYNQLFEENPINASGVDAKAILSARLSKSRRLENLIAQLPGEKKNGLFGNLIALSLGLTPNFKSNFDLAEDAKLQLSKDTYDDDLDNLLAQIGDQYADLFLAAKNLSDAILLSDILRVNTEITKAPLSASMIKRYDEHHQDLTLLKALVRQQLPEKYKEIFFDQSKNGYAGYIDGGASQEEFYKFIKPILEKMDGTEELLVKLNREDLLRKQRTFDNGSIPHQIHLGELHAILRRQEDFYPFLKDNREKIEKILTFRIPYYVGPLARGNSRFAWMTRKSEETITPWNFEEVVDKGASAQSFIERMTNFDKNLPNEKVLPKHSLLYEYFTVYNELTKVKYVTEGMRKPAFLSGEQKKAIVDLLFKTNRKVTVKQLKEDYFKKIECFDSVEISGVEDRFNASLGTYHDLLKIIKDKDFLDNEENEDILEDIVLTLTLFEDREMIEERLKTYAHLFDDKVMKQLKRRRYTGWGRLSRKLINGIRDKQSGKTILDFLKSDGFANRNFMQLIHDDSLTFKEDIQKAQVSGQGDSLHEHIANLAGSPAIKKGILQTVKVVDELVKVMGRHKPENIVIEMARENQTTQKGQKNSRERMKRIEEGIKELGSQILKEHPVENTQLQNEKLYLYYLQNGRDMYVDQELDINRLSDYDVDHIVPQSFLKDDSIDNKVLTRSDKARGKSDNVPSEEVVKKMKNYWRQLLNAKLITQRKFDNLTKAERGGLSELDKAGFIKRQLVETRQITKHVAQILDSRMNTKYDENDKLIREVKVITLKSKLVSDFRKDFQFYKVREINNYHHAHDAYLNAVVGTALIKKYPKLESEFVYGDYKVYDVRKMIAKSEQEIGKATAKYFFYSNIMNFFKTEITLANGEIRKRPLIETNGETGEIVWDKGRDFATVRKVLSMPQVNIVKKTEVQTGGFSKESILPKRNSDKLIARKKDWDPKKYGGFDSPTVAYSVLVVAKVEKGKSKKLKSVKELLGITIMERSSFEKNPIDFLEAKGYKEVKKDLIIKLPKYSLFELENGRKRMLASAGELQKGNELALPSKYVNFLYLASHYEKLKGSPEDNEQKQLFVEQHKHYLDEIIEQISEFSKRVILADANLDKVLSAYNKHRDKPIREQAENIIHLFTLTNLGAPAAFKYFDTTIDRKRYTSTKEVLDATLIHQSITGLYETRIDLSQLGGDGGGGGGSSEAAAKGGIPWLMKKPLQLTTLVPLQEYEERLLKQTMLTGSYKEKLQSLFLKYDALWQHWENQVGHRRIKPHHIATGTVNPRPQKQYPINPKAKASIQTVINDLLKQGVLIQQNSIMNTPVYPVPKPDGKWRMVLDYREVNKTIPLIAAQNQHSAGILSSIFRGKYKTTLDLSNGFWAHSITPESYWLTAFTWLGQQYCWTRLPQGFLNSPALFNADVVDLLKEVPNVQVYVDDIYISHDDPREHLEQLEKVFSLLLNAGYVVSLKKSEIAQHEVEFLGFNITKEGRGLTETFKQKLLNITPPRDLKQLQSILGKLNFARNFIPNFSELVKPLYNIIATAPGKYITWTTDNSQQLQNIISMLNSAENLEERNPEVRLIMKVNTSPSAGYIRFYNEFAKRPIMYLNYVYTKAEVKFTNTEKLLTTIHKGLIKALDLGMGQEILVYSPIVSMTKIQKTPLPERKALPIRWITWMSYLEDPRIQFHYDKTLPELQQVPTVTDDIIAKIKHPSEFSMVFYTDGSAIKHPNVNKSHNAGMGIAQVQFKPEFTVINTWSIPLGDHTAQLAEVAAVEFACKKALKIDGPVLIVTDSFYVAESVNKELPYWQSNGFFNNKKKPLKHVSKWKSIADCIQLKPDIIIIHEKGHQPTASTFHTEGNNLADKLATQGSYVVNAGKRTADGSEFEKRTADGSEFESPKKKAKVE

SEQ ID NO: 583 - protein, 2087 aa, synthetic construct
  source 1..2087: note = Description of Artificial Sequence: Synthetic polypeptide
MPAAKRVKLDGGDKKYSIGLDIGTNSVGWAVITDEYKVPSKKFKVLGNTDRHSIKKNLIGALLFDSGETAEATRLKRTARRRYTRRKNRICYLQEIFSNEMAKVDDSFFHRLEESFLVEEDKKHERHPIFGNIVDEVAYHEKYPTIYHLRKKLVDSTDKADLRLIYLALAHMIKFRGHFLIEGDLNPDNSDVDKLFIQLVQTYNQLFEENPINASGVDAKAILSARLSKSRRLENLIAQLPGEKKNGLFGNLIALSLGLTPNFKSNFDLAEDAKLQLSKDTYDDDLDNLLAQIGDQYADLFLAAKNLSDAILLSDILRVNTEITKAPLSASMIKRYDEHHQDLTLLKALVRQQLPEKYKEIFFDQSKNGYAGYIDGGASQEEFYKFIKPILEKMDGTEELLVKLNREDLLRKQRTFDNGSIPHQIHLGELHAILRRQEDFYPFLKDNREKIEKILTFRIPYYVGPLARGNSRFAWMTRKSEETITPWNFEEVVDKGASAQSFIERMTNFDKNLPNEKVLPKHSLLYEYFTVYNELTKVKYVTEGMRKPAFLSGEQKKAIVDLLFKTNRKVTVKQLKEDYFKKIECFDSVEISGVEDRFNASLGTYHDLLKIIKDKDFLDNEENEDILEDIVLTLTLFEDREMIEERLKTYAHLFDDKVMKQLKRRRYTGWGRLSRKLINGIRDKQSGKTILDFLKSDGFANRNFMQLIHDDSLTFKEDIQKAQVSGQGDSLHEHIANLAGSPAIKKGILQTVKVVDELVKVMGRHKPENIVIEMARENQTTQKGQKNSRERMKRIEEGIKELGSQILKEHPVENTQLQNEKLYLYYLQNGRDMYVDQELDINRLSDYDVDHIVPQSFLKDDSIDNKVLTRSDKARGKSDNVPSEEVVKKMKNYWRQLLNAKLITQRKFDNLTKAERGGLSELDKAGFIKRQLVETRQITKHVAQILDSRMNTKYDENDKLIREVKVITLKSKLVSDFRKDFQFYKVREINNYHHAHDAYLNAVVGTALIKKYPKLESEFVYGDYKVYDVRKMIAKSEQEIGKATAKYFFYSNIMNFFKTEITLANGEIRKRPLIETNGETGEIVWDKGRDFATVRKVLSMPQVNIVKKTEVQTGGFSKESILPKRNSDKLIARKKDWDPKKYGGFDSPTVAYSVLVVAKVEKGKSKKLKSVKELLGITIMERSSFEKNPIDFLEAKGYKEVKKDLIIKLPKYSLFELENGRKRMLASAGELQKGNELALPSKYVNFLYLASHYEKLKGSPEDNEQKQLFVEQHKHYLDEIIEQISEFSKRVILADANLDKVLSAYNKHRDKPIREQAENIIHLFTLTNLGAPAAFKYFDTTIDRKRYTSTKEVLDATLIHQSITGLYETRIDLSQLGGDGGGGSGGGEAAAKGGIPWLMKKPLQLTTLVPLQEYEERLLKQTMLTGSYKEKLQSLFLKYDALWQHWENQVGHRRIKPHHIATGTVNPRPQKQYPINPKAKASIQTVINDLLKQGVLIQQNSIMNTPVYPVPKPDGKWRMVLDYREVNKTIPLIAAQNQHSAGILSSIFRGKYKTTLDLSNGFWAHSITPESYWLTAFTWLGQQYCWTRLPQGFLNSPALFNADVVDLLKEVPNVQVYVDDIYISHDDPREHLEQLEKVFSLLLNAGYVVSLKKSEIAQHEVEFLGFNITKEGRGLTETFKQKLLNITPPRDLKQLQSILGKLNFARNFIPNFSELVKPLYNIIATAPGKYITWTTDNSQQLQNIISMLNSAENLEERNPEVRLIMKVNTSPSAGYIRFYNEFAKRPIMYLNYVYTKAEVKFTNTEKLLTTIHKGLIKALDLGMGQEILVYSPIVSMTKIQKTPLPERKALPIRWITWMSYLEDPRIQFHYDKTLPELQQVPTVTDDIIAKIKHPSEFSMVFYTDGSAIKHPNVNKSHNAGMGIAQVQFKPEFTVINTWSIPLGDHTAQLAEVAAVEFACKKALKIDGPVLIVTDSFYVAESVNKELPYWQSNGFFNNKKKPLKHVSKWKSIADCIQLKPDIIIIHEKGHQPTASTFHTEGNNLADKLATQGSYVVNAGKRTADGSEFEKRTADGSEFESPKKKAKVE

SEQ ID NO: 584 - protein, 2085 aa, synthetic construct
  source 1..2085: note = Description of Artificial Sequence: Synthetic polypeptide
MPAAKRVKLDGGDKKYSIGLDIGTNSVGWAVITDEYKVPSKKFKVLGNTDRHSIKKNLIGALLFDSGETAEATRLKRTARRRYTRRKNRICYLQEIFSNEMAKVDDSFFHRLEESFLVEEDKKHERHPIFGNIVDEVAYHEKYPTIYHLRKKLVDSTDKADLRLIYLALAHMIKFRGHFLIEGDLNPDNSDVDKLFIQLVQTYNQLFEENPINASGVDAKAILSARLSKSRRLENLIAQLPGEKKNGLFGNLIALSLGLTPNFKSNFDLAEDAKLQLSKDTYDDDLDNLLAQIGDQYADLFLAAKNLSDAILLSDILRVNTEITKAPLSASMIKRYDEHHQDLTLLKALVRQQLPEKYKEIFFDQSKNGYAGYIDGGASQEEFYKFIKPILEKMDGTEELLVKLNREDLLRKQRTFDNGSIPHQIHLGELHAILRRQEDFYPFLKDNREKIEKILTFRIPYYVGPLARGNSRFAWMTRKSEETITPWNFEEVVDKGASAQSFIERMTNFDKNLPNEKVLPKHSLLYEYFTVYNELTKVKYVTEGMRKPAFLSGEQKKAIVDLLFKTNRKVTVKQLKEDYFKKIECFDSVEISGVEDRFNASLGTYHDLLKIIKDKDFLDNEENEDILEDIVLTLTLFEDREMIEERLKTYAHLFDDKVMKQLKRRRYTGWGRLSRKLINGIRDKQSGKTILDFLKSDGFANRNFMQLIHDDSLTFKEDIQKAQVSGQGDSLHEHIANLAGSPAIKKGILQTVKVVDELVKVMGRHKPENIVIEMARENQTTQKGQKNSRERMKRIEEGIKELGSQILKEHPVENTQLQNEKLYLYYLQNGRDMYVDQELDINRLSDYDVDHIVPQSFLKDDSIDNKVLTRSDKARGKSDNVPSEEVVKKMKNYWRQLLNAKLITQRKFDNLTKAERGGLSELDKAGFIKRQLVETRQITKHVAQILDSRMNTKYDENDKLIREVKVITLKSKLVSDFRKDFQFYKVREINNYHHAHDAYLNAVVGTALIKKYPKLESEFVYGDYKVYDVRKMIAKSEQEIGKATAKYFFYSNIMNFFKTEITLANGEIRKRPLIETNGETGEIVWDKGRDFATVRKVLSMPQVNIVKKTEVQTGGFSKESILPKRNSDKLIARKKDWDPKKYGGFDSPTVAYSVLVVAKVEKGKSKKLKSVKELLGITIMERSSFEKNPIDFLEAKGYKEVKKDLIIKLPKYSLFELENGRKRMLASAGELQKGNELALPSKYVNFLYLASHYEKLKGSPEDNEQKQLFVEQHKHYLDEIIEQISEFSKRVILADANLDKVLSAYNKHRDKPIREQAENIIHLFTLTNLGAPAAFKYFDTTIDRKRYTSTKEVLDATLIHQSITGLYETRIDLSQLGGDGGGSSGGSPAPGGIPWLMKKPLQLTTLVPLQEYEERLLKQTMLTGSYKEKLQSLFLKYDALWQHWENQVGHRRIKPHHIATGTVNPRPQKQYPINPKAKASIQTVINDLLKQGVLIQQNSIMNTPVYPVPKPDGKWRMVLDYREVNKTIPLIAAQNQHSAGILSSIFRGKYKTTLDLSNGFWAHSITPESYWLTAFTWLGQQYCWTRLPQGFLNSPALFNADVVDLLKEVPNVQVYVDDIYISHDDPREHLEQLEKVFSLLLNAGYVVSLKKSEIAQHEVEFLGFNITKEGRGLTETFKQKLLNITPPRDLKQLQSILGKLNFARNFIPNFSELVKPLYNIIATAPGKYITWTTDNSQQLQNIISMLNSAENLEERNPEVRLIMKVNTSPSAGYIRFYNEFAKRPIMYLNYVYTKAEVKFTNTEKLLTTIHKGLIKALDLGMGQEILVYSPIVSMTKIQKTPLPERKALPIRWITWMSYLEDPRIQFHYDKTLPELQQVPTVTDDIIAKIKHPSEFSMVFYTDGSAIKHPNVNKSHNAGMGIAQVQFKPEFTVINTWSIPLGDHTAQLAEVAAVEFACKKALKIDGPVLIVTDSFYVAESVNKELPYWQSNGFFNNKKKPLKHVSKWKSIADCIQLKPDIIIIHEKGHQPTASTFHTEGNNLADKLATQGSYVVNAGKRTADGSEFEKRTADGSEFESPKKKAKVE

SEQ ID NO: 585 - protein, 2109 aa, synthetic construct
  source 1..2109: note = Description of Artificial Sequence: Synthetic polypeptide
MPAAKRVKLDGGDKKYSIGLDIGTNSVGWAVITDEYKVPSKKFKVLGNTDRHSIKKNLIGALLFDSGETAEATRLKRTARRRYTRRKNRICYLQEIFSNEMAKVDDSFFHRLEESFLVEEDKKHERHPIFGNIVDEVAYHEKYPTIYHLRKKLVDSTDKADLRLIYLALAHMIKFRGHFLIEGDLNPDNSDVDKLFIQLVQTYNQLFEENPINASGVDAKAILSARLSKSRRLENLIAQLPGEKKNGLFGNLIALSLGLTPNFKSNFDLAEDAKLQLSKDTYDDDLDNLLAQIGDQYADLFLAAKNLSDAILLSDILRVNTEITKAPLSASMIKRYDEHHQDLTLLKALVRQQLPEKYKEIFFDQSKNGYAGYIDGGASQEEFYKFIKPILEKMDGTEELLVKLNREDLLRKQRTFDNGSIPHQIHLGELHAILRRQEDFYPFLKDNREKIEKILTFRIPYYVGPLARGNSRFAWMTRKSEETITPWNFEEVVDKGASAQSFIERMTNFDKNLPNEKVLPKHSLLYEYFTVYNELTKVKYVTEGMRKPAFLSGEQKKAIVDLLFKTNRKVTVKQLKEDYFKKIECFDSVEISGVEDRFNASLGTYHDLLKIIKDKDFLDNEENEDILEDIVLTLTLFEDREMIEERLKTYAHLFDDKVMKQLKRRRYTGWGRLSRKLINGIRDKQSGKTILDFLKSDGFANRNFMQLIHDDSLTFKEDIQKAQVSGQGDSLHEHIANLAGSPAIKKGILQTVKVVDELVKVMGRHKPENIVIEMARENQTTQKGQKNSRERMKRIEEGIKELGSQILKEHPVENTQLQNEKLYLYYLQNGRDMYVDQELDINRLSDYDVDHIVPQSFLKDDSIDNKVLTRSDKARGKSDNVPSEEVVKKMKNYWRQLLNAKLITQRKFDNLTKAERGGLSELDKAGFIKRQLVETRQITKHVAQILDSRMNTKYDENDKLIREVKVITLKSKLVSDFRKDFQFYKVREINNYHHAHDAYLNAVVGTALIKKYPKLESEFVYGDYKVYDVRKMIAKSEQEIGKATAKYFFYSNIMNFFKTEITLANGEIRKRPLIETNGETGEIVWDKGRDFATVRKVLSMPQVNIVKKTEVQTGGFSKESILPKRNSDKLIARKKDWDPKKYGGFDSPTVAYSVLVVAKVEKGKSKKLKSVKELLGITIMERSSFEKNPIDFLEAKGYKEVKKDLIIKLPKYSLFELENGRKRMLASAGELQKGNELALPSKYVNFLYLASHYEKLKGSPEDNEQKQLFVEQHKHYLDEIIEQISEFSKRVILADANLDKVLSAYNKHRDKPIREQAENIIHLFTLTNLGAPAAFKYFDTTIDRKRYTSTKEVLDATLIHQSITGLYETRIDLSQLGGDGGSGGSSGGSSGSETPGTSESATPESSGGSSGGSSGGIPWLMKKPLQLTTLVPLQEYEERLLKQTMLTGSYKEKLQSLFLKYDALWQHWENQVGHRRIKPHHIATGTVNPRPQKQYPINPKAKASIQTVINDLLKQGVLIQQNSIMNTPVYPVPKPDGKWRMVLDYREVNKTIPLIAAQNQHSAGILSSIFRGKYKTTLDLSNGFWAHSITPESYWLTAFTWLGQQYCWTRLPQGFLNSPALFNADVVDLLKEVPNVQVYVDDIYISHDDPREHLEQLEKVFSLLLNAGYVVSLKKSEIAQHEVEFLGFNITKEGRGLTETFKQKLLNITPPRDLKQLQSILGKLNFARNFIPNFSELVKPLYNIIATAPGKYITWTTDNSQQLQNIISMLNSAENLEERNPEVRLIMKVNTSPSAGYIRFYNEFAKRPIMYLNYVYTKAEVKFTNTEKLLTTIHKGLIKALDLGMGQEILVYSPIVSMTKIQKTPLPERKALPIRWITWMSYLEDPRIQFHYDKTLPELQQVPTVTDDIIAKIKHPSEFSMVFYTDGSAIKHPNVNKSHNAGMGIAQVQFKPEFTVINTWSIPLGDHTAQLAEVAAVEFACKKALKIDGPVLIVTDSFYVAESVNKELPYWQSNGFFNNKKKPLKHVSKWKSIADCIQLKPDIIIIHEKGHQPTASTFHTEGNNLADKLATQGSYVVNAGKRTADGSEFEKRTADGSEFESPKKKAKVE

SEQ ID NO: 586 - protein, 2088 aa, synthetic construct
  source 1..2088: note = Description of Artificial Sequence: Synthetic polypeptide
MPAAKRVKLDGGDKKYSIGLDIGTNSVGWAVITDEYKVPSKKFKVLGNTDRHSIKKNLIGALLFDSGETAEATRLKRTARRRYTRRKNRICYLQEIFSNEMAKVDDSFFHRLEESFLVEEDKKHERHPIFGNIVDEVAYHEKYPTIYHLRKKLVDSTDKADLRLIYLALAHMIKFRGHFLIEGDLNPDNSDVDKLFIQLVQTYNQLFEENPINASGVDAKAILSARLSKSRRLENLIAQLPGEKKNGLFGNLIALSLGLTPNFKSNFDLAEDAKLQLSKDTYDDDLDNLLAQIGDQYADLFLAAKNLSDAILLSDILRVNTEITKAPLSASMIKRYDEHHQDLTLLKALVRQQLPEKYKEIFFDQSKNGYAGYIDGGASQEEFYKFIKPILEKMDGTEELLVKLNREDLLRKQRTFDNGSIPHQIHLGELHAILRRQEDFYPFLKDNREKIEKILTFRIPYYVGPLARGNSRFAWMTRKSEETITPWNFEEVVDKGASAQSFIERMTNFDKNLPNEKVLPKHSLLYEYFTVYNELTKVKYVTEGMRKPAFLSGEQKKAIVDLLFKTNRKVTVKQLKEDYFKKIECFDSVEISGVEDRFNASLGTYHDLLKIIKDKDFLDNEENEDILEDIVLTLTLFEDREMIEERLKTYAHLFDDKVMKQLKRRRYTGWGRLSRKLINGIRDKQSGKTILDFLKSDGFANRNFMQLIHDDSLTFKEDIQKAQVSGQGDSLHEHIANLAGSPAIKKGILQTVKVVDELVKVMGRHKPENIVIEMARENQTTQKGQKNSRERMKRIEEGIKELGSQILKEHPVENTQLQNEKLYLYYLQNGRDMYVDQELDINRLSDYDVDHIVPQSFLKDDSIDNKVLTRSDKARGKSDNVPSEEVVKKMKNYWRQLLNAKLITQRKFDNLTKAERGGLSELDKAGFIKRQLVETRQITKHVAQILDSRMNTKYDENDKLIREVKVITLKSKLVSDFRKDFQFYKVREINNYHHAHDAYLNAVVGTALIKKYPKLESEFVYGDYKVYDVRKMIAKSEQEIGKATAKYFFYSNIMNFFKTEITLANGEIRKRPLIETNGETGEIVWDKGRDFATVRKVLSMPQVNIVKKTEVQTGGFSKESILPKRNSDKLIARKKDWDPKKYGGFDSPTVAYSVLVVAKVEKGKSKKLKSVKELLGITIMERSSFEKNPIDFLEAKGYKEVKKDLIIKLPKYSLFELENGRKRMLASAGELQKGNELALPSKYVNFLYLASHYEKLKGSPEDNEQKQLFVEQHKHYLDEIIEQISEFSKRVILADANLDKVLSAYNKHRDKPIREQAENIIHLFTLTNLGAPAAFKYFDTTIDRKRYTSTKEVLDATLIHQSITGLYETRIDLSQLGGDGGGSSGSSGSSGSSGGIPWLMKKPLQLTTLVPLQEYEERLLKQTMLTGSYKEKLQSLFLKYDALWQHWENQVGHRRIKPHHIATGTVNPRPQKQYPINPKAKASIQTVINDLLKQGVLIQQNSIMNTPVYPVPKPDGKWRMVLDYREVNKTIPLIAAQNQHSAGILSSIFRGKYKTTLDLSNGFWAHSITPESYWLTAFTWLGQQYCWTRLPQGFLNSPALFNADVVDLLKEVPNVQVYVDDIYISHDDPREHLEQLEKVFSLLLNAGYVVSLKKSEIAQHEVEFLGFNITKEGRGLTETFKQKLLNITPPRDLKQLQSILGKLNFARNFIPNFSELVKPLYNIIATAPGKYITWTTDNSQQLQNIISMLNSAENLEERNPEVRLIMKVNTSPSAGYIRFYNEFAKRPIMYLNYVYTKAEVKFTNTEKLLTTIHKGLIKALDLGMGQEILVYSPIVSMTKIQKTPLPERKALPIRWITWMSYLEDPRIQFHYDKTLPELQQVPTVTDDIIAKIKHPSEFSMVFYTDGSAIKHPNVNKSHNAGMGIAQVQFKPEFTVINTWSIPLGDHTAQLAEVAAVEFACKKALKIDGPVLIVTDSFYVAESVNKELPYWQSNGFFNNKKKPLKHVSKWKSIADCIQLKPDIIIIHEKGHQPTASTFHTEGNNLADKLATQGSYVVNAGKRTADGSEFEKRTADGSEFESPKKKAKVE

SEQ ID NO: 587 - protein, 2085 aa, synthetic construct
  source 1..2085: note = Description of Artificial Sequence: Synthetic polypeptide
MPAAKRVKLDGGDKKYSIGLDIGTNSVGWAVITDEYKVPSKKFKVLGNTDRHSIKKNLIGALLFDSGETAEATRLKRTARRRYTRRKNRICYLQEIFSNEMAKVDDSFFHRLEESFLVEEDKKHERHPIFGNIVDEVAYHEKYPTIYHLRKKLVDSTDKADLRLIYLALAHMIKFRGHFLIEGDLNPDNSDVDKLFIQLVQTYNQLFEENPINASGVDAKAILSARLSKSRRLENLIAQLPGEKKNGLFGNLIALSLGLTPNFKSNFDLAEDAKLQLSKDTYDDDLDNLLAQIGDQYADLFLAAKNLSDAILLSDILRVNTEITKAPLSASMIKRYDEHHQDLTLLKALVRQQLPEKYKEIFFDQSKNGYAGYIDGGASQEEFYKFIKPILEKMDGTEELLVKLNREDLLRKQRTFDNGSIPHQIHLGELHAILRRQEDFYPFLKDNREKIEKILTFRIPYYVGPLARGNSRFAWMTRKSEETITPWNFEEVVDKGASAQSFIERMTNFDKNLPNEKVLPKHSLLYEYFTVYNELTKVKYVTEGMRKPAFLSGEQKKAIVDLLFKTNRKVTVKQLKEDYFKKIECFDSVEISGVEDRFNASLGTYHDLLKIIKDKDFLDNEENEDILEDIVLTLTLFEDREMIEERLKTYAHLFDDKVMKQLKRRRYTGWGRLSRKLINGIRDKQSGKTILDFLKSDGFANRNFMQLIHDDSLTFKEDIQKAQVSGQGDSLHEHIANLAGSPAIKKGILQTVKVVDELVKVMGRHKPENIVIEMARENQTTQKGQKNSRERMKRIEEGIKELGSQILKEHPVENTQLQNEKLYLYYLQNGRDMYVDQELDINRLSDYDVDHIVPQSFLKDDSIDNKVLTRSDKARGKSDNVPSEEVVKKMKNYWRQLLNAKLITQRKFDNLTKAERGGLSELDKAGFIKRQLVETRQITKHVAQILDSRMNTKYDENDKLIREVKVITLKSKLVSDFRKDFQFYKVREINNYHHAHDAYLNAVVGTALIKKYPKLESEFVYGDYKVYDVRKMIAKSEQEIGKATAKYFFYSNIMNFFKTEITLANGEIRKRPLIETNGETGEIVWDKGRDFATVRKVLSMPQVNIVKKTEVQTGGFSKESILPKRNSDKLIARKKDWDPKKYGGFDSPTVAYSVLVVAKVEKGKSKKLKSVKELLGITIMERSSFEKNPIDFLEAKGYKEVKKDLIIKLPKYSLFELENGRKRMLASAGELQKGNELALPSKYVNFLYLASHYEKLKGSPEDNEQKQLFVEQHKHYLDEIIEQISEFSKRVILADANLDKVLSAYNKHRDKPIREQAENIIHLFTLTNLGAPAAFKYFDTTIDRKRYTSTKEVLDATLIHQSITGLYETRIDLSQLGGDGGGSSGGSGGGGGIPWLMKKPLQLTTLVPLQEYEERLLKQTMLTGSYKEKLQSLFLKYDALWQHWENQVGHRRIKPHHIATGTVNPRPQKQYPINPKAKASIQTVINDLLKQGVLIQQNSIMNTPVYPVPKPDGKWRMVLDYREVNKTIPLIAAQNQHSAGILSSIFRGKYKTTLDLSNGFWAHSITPESYWLTAFTWLGQQYCWTRLPQGFLNSPALFNADVVDLLKEVPNVQVYVDDIYISHDDPREHLEQLEKVFSLLLNAGYVVSLKKSEIAQHEVEFLGFNITKEGRGLTETFKQKLLNITPPRDLKQLQSILGKLNFARNFIPNFSELVKPLYNIIATAPGKYITWTTDNSQQLQNIISMLNSAENLEERNPEVRLIMKVNTSPSAGYIRFYNEFAKRPIMYLNYVYTKAEVKFTNTEKLLTTIHKGLIKALDLGMGQEILVYSPIVSMTKIQKTPLPERKALPIRWITWMSYLEDPRIQFHYDKTLPELQQVPTVTDDIIAKIKHPSEFSMVFYTDGSAIKHPNVNKSHNAGMGIAQVQFKPEFTVINTWSIPLGDHTAQLAEVAAVEFACKKALKIDGPVLIVTDSFYVAESVNKELPYWQSNGFFNNKKKPLKHVSKWKSIADCIQLKPDIIIIHEKGHQPTASTFHTEGNNLADKLATQGSYVVNAGKRTADGSEFEKRTADGSEFESPKKKAKVE

SEQ ID NO: 588 - protein, 2084 aa, synthetic construct
  source 1..2084: note = Description of Artificial Sequence: Synthetic polypeptide
MPAAKRVKLDGGDKKYSIGLDIGTNSVGWAVITDEYKVPSKKFKVLGNTDRHSIKKNLIGALLFDSGETAEATRLKRTARRRYTRRKNRICYLQEIFSNEMAKVDDSFFHRLEESFLVEEDKKHERHPIFGNIVDEVAYHEKYPTIYHLRKKLVDSTDKADLRLIYLALAHMIKFRGHFLIEGDLNPDNSDVDKLFIQLVQTYNQLFEENPINASGVDAKAILSARLSKSRRLENLIAQLPGEKKNGLFGNLIALSLGLTPNFKSNFDLAEDAKLQLSKDTYDDDLDNLLAQIGDQYADLFLAAKNLSDAILLSDILRVNTEITKAPLSASMIKRYDEHHQDLTLLKALVRQQLPEKYKEIFFDQSKNGYAGYIDGGASQEEFYKFIKPILEKMDGTEELLVKLNREDLLRKQRTFDNGSIPHQIHLGELHAILRRQEDFYPFLKDNREKIEKILTFRIPYYVGPLARGNSRFAWMTRKSEETITPWNFEEVVDKGASAQSFIERMTNFDKNLPNEKVLPKHSLLYEYFTVYNELTKVKYVTEGMRKPAFLSGEQKKAIVDLLFKTNRKVTVKQLKEDYFKKIECFDSVEISGVEDRFNASLGTYHDLLKIIKDKDFLDNEENEDILEDIVLTLTLFEDREMIEERLKTYAHLFDDKVMKQLKRRRYTGWGRLSRKLINGIRDKQSGKTILDFLKSDGFANRNFMQLIHDDSLTFKEDIQKAQVSGQGDSLHEHIANLAGSPAIKKGILQTVKVVDELVKVMGRHKPENIVIEMARENQTTQKGQKNSRERMKRIEEGIKELGSQILKEHPVENTQLQNEKLYLYYLQNGRDMYVDQELDINRLSDYDVDHIVPQSFLKDDSIDNKVLTRSDKARGKSDNVPSEEVVKKMKNYWRQLLNAKLITQRKFDNLTKAERGGLSELDKAGFIKRQLVETRQITKHVAQILDSRMNTKYDENDKLIREVKVITLKSKLVSDFRKDFQFYKVREINNYHHAHDAYLNAVVGTALIKKYPKLESEFVYGDYKVYDVRKMIAKSEQEIGKATAKYFFYSNIMNFFKTEITLANGEIRKRPLIETNGETGEIVWDKGRDFATVRKVLSMPQVNIVKKTEVQTGGFSKESILPKRNSDKLIARKKDWDPKKYGGFDSPTVAYSVLVVAKVEKGKSKKLKSVKELLGITIMERSSFEKNPIDFLEAKGYKEVKKDLIIKLPKYSLFELENGRKRMLASAGELQKGNELALPSKYVNFLYLASHYEKLKGSPEDNEQKQLFVEQHKHYLDEIIEQISEFSKRVILADANLDKVLSAYNKHRDKPIREQAENIIHLFTLTNLGAPAAFKYFDTTIDRKRYTSTKEVLDATLIHQSITGLYETRIDLSQLGGDGGGGGEAAAKGGIPWLMKKPLQLTTLVPLQEYEERLLKQTMLTGSYKEKLQSLFLKYDALWQHWENQVGHRRIKPHHIATGTVNPRPQKQYPINPKAKASIQTVINDLLKQGVLIQQNSIMNTPVYPVPKPDGKWRMVLDYREVNKTIPLIAAQNQHSAGILSSIFRGKYKTTLDLSNGFWAHSITPESYWLTAFTWLGQQYCWTRLPQGFLNSPALFNADVVDLLKEVPNVQVYVDDIYISHDDPREHLEQLEKVFSLLLNAGYVVSLKKSEIAQHEVEFLGFNITKEGRGLTETFKQKLLNITPPRDLKQLQSILGKLNFARNFIPNFSELVKPLYNIIATAPGKYITWTTDNSQQLQNIISMLNSAENLEERNPEVRLIMKVNTSPSAGYIRFYNEFAKRPIMYLNYVYTKAEVKFTNTEKLLTTIHKGLIKALDLGMGQEILVYSPIVSMTKIQKTPLPERKALPIRWITWMSYLEDPRIQFHYDKTLPELQQVPTVTDDIIAKIKHPSEFSMVFYTDGSAIKHPNVNKSHNAGMGIAQVQFKPEFTVINTWSIPLGDHTAQLAEVAAVEFACKKALKIDGPVLIVTDSFYVAESVNKELPYWQSNGFFNNKKKPLKHVSKWKSIADCIQLKPDIIIIHEKGHQPTASTFHTEGNNLADKLATQGSYVVNAGKRTADGSEFEKRTADGSEFESPKKKAKVE

SEQ ID NO: 589 - protein, 2085 aa, synthetic construct
  source 1..2085: note = Description of Artificial Sequence: Synthetic polypeptide
MPAAKRVKLDGGDKKYSIGLDIGTNSVGWAVITDEYKVPSKKFKVLGNTDRHSIKKNLIGALLFDSGETAEATRLKRTARRRYTRRKNRICYLQEIFSNEMAKVDDSFFHRLEESFLVEEDKKHERHPIFGNIVDEVAYHEKYPTIYHLRKKLVDSTDKADLRLIYLALAHMIKFRGHFLIEGDLNPDNSDVDKLFIQLVQTYNQLFEENPINASGVDAKAILSARLSKSRRLENLIAQLPGEKKNGLFGNLIALSLGLTPNFKSNFDLAEDAKLQLSKDTYDDDLDNLLAQIGDQYADLFLAAKNLSDAILLSDILRVNTEITKAPLSASMIKRYDEHHQDLTLLKALVRQQLPEKYKEIFFDQSKNGYAGYIDGGASQEEFYKFIKPILEKMDGTEELLVKLNREDLLRKQRTFDNGSIPHQIHLGELHAILRRQEDFYPFLKDNREKIEKILTFRIPYYVGPLARGNSRFAWMTRKSEETITPWNFEEVVDKGASAQSFIERMTNFDKNLPNEKVLPKHSLLYEYFTVYNELTKVKYVTEGMRKPAFLSGEQKKAIVDLLFKTNRKVTVKQLKEDYFKKIECFDSVEISGVEDRFNASLGTYHDLLKIIKDKDFLDNEENEDILEDIVLTLTLFEDREMIEERLKTYAHLFDDKVMKQLKRRRYTGWGRLSRKLINGIRDKQSGKTILDFLKSDGFANRNFMQLIHDDSLTFKEDIQKAQVSGQGDSLHEHIANLAGSPAIKKGILQTVKVVDELVKVMGRHKPENIVIEMARENQTTQKGQKNSRERMKRIEEGIKELGSQILKEHPVENTQLQNEKLYLYYLQNGRDMYVDQELDINRLSDYDVDHIVPQSFLKDDSIDNKVLTRSDKARGKSDNVPSEEVVKKMKNYWRQLLNAKLITQRKFDNLTKAERGGLSELDKAGFIKRQLVETRQITKHVAQILDSRMNTKYDENDKLIREVKVITLKSKLVSDFRKDFQFYKVREINNYHHAHDAYLNAVVGTALIKKYPKLESEFVYGDYKVYDVRKMIAKSEQEIGKATAKYFFYSNIMNFFKTEITLANGEIRKRPLIETNGETGEIVWDKGRDFATVRKVLSMPQVNIVKKTEVQTGGFSKESILPKRNSDKLIARKKDWDPKKYGGFDSPTVAYSVLVVAKVEKGKSKKLKSVKELLGITIMERSSFEKNPIDFLEAKGYKEVKKDLIIKLPKYSLFELENGRKRMLASAGELQKGNELALPSKYVNFLYLASHYEKLKGSPEDNEQKQLFVEQHKHYLDEIIEQISEFSKRVILADANLDKVLSAYNKHRDKPIREQAENIIHLFTLTNLGAPAAFKYFDTTIDRKRYTSTKEVLDATLIHQSITGLYETRIDLSQLGGDGGGGSGSSPAPGGIPWLMKKPLQLTTLVPLQEYEERLLKQTMLTGSYKEKLQSLFLKYDALWQHWENQVGHRRIKPHHIATGTVNPRPQKQYPINPKAKASIQTVINDLLKQGVLIQQNSIMNTPVYPVPKPDGKWRMVLDYREVNKTIPLIAAQNQHSAGILSSIFRGKYKTTLDLSNGFWAHSITPESYWLTAFTWLGQQYCWTRLPQGFLNSPALFNADVVDLLKEVPNVQVYVDDIYISHDDPREHLEQLEKVFSLLLNAGYVVSLKKSEIAQHEVEFLGFNITKEGRGLTETFKQKLLNITPPRDLKQLQSILGKLNFARNFIPNFSELVKPLYNIIATAPGKYITWTTDNSQQLQNIISMLNSAENLEERNPEVRLIMKVNTSPSAGYIRFYNEFAKRPIMYLNYVYTKAEVKFTNTEKLLTTIHKGLIKALDLGMGQEILVYSPIVSMTKIQKTPLPERKALPIRWITWMSYLEDPRIQFHYDKTLPELQQVPTVTDDIIAKIKHPSEFSMVFYTDGSAIKHPNVNKSHNAGMGIAQVQFKPEFTVINTWSIPLGDHTAQLAEVAAVEFACKKALKIDGPVLIVTDSFYVAESVNKELPYWQSNGFFNNKKKPLKHVSKWKSIADCIQLKPDIIIIHEKGHQPTASTFHTEGNNLADKLATQGSYVVNAGKRTADGSEFEKRTADGSEFESPKKKAKVE

SEQ ID NO: 590 - protein, 2195 aa, synthetic construct
  source 1..2195: note = Description of Artificial Sequence: Synthetic polypeptide
MPAAKRVKLDGGDKKYSIGLDIGTNSVGWAVITDEYKVPSKKFKVLGNTDRHSIKKNLIGALLFDSGETAEATRLKRTARRRYTRRKNRICYLQEIFSNEMAKVDDSFFHRLEESFLVEEDKKHERHPIFGNIVDEVAYHEKYPTIYHLRKKLVDSTDKADLRLIYLALAHMIKFRGHFLIEGDLNPDNSDVDKLFIQLVQTYNQLFEENPINASGVDAKAILSARLSKSRRLENLIAQLPGEKKNGLFGNLIALSLGLTPNFKSNFDLAEDAKLQLSKDTYDDDLDNLLAQIGDQYADLFLAAKNLSDAILLSDILRVNTEITKAPLSASMIKRYDEHHQDLTLLKALVRQQLPEKYKEIFFDQSKNGYAGYIDGGASQEEFYKFIKPILEKMDGTEELLVKLNREDLLRKQRTFDNGSIPHQIHLGELHAILRRQEDFYPFLKDNREKIEKILTFRIPYYVGPLARGNSRFAWMTRKSEETITPWNFEEVVDKGASAQSFIERMTNFDKNLPNEKVLPKHSLLYEYFTVYNELTKVKYVTEGMRKPAFLSGEQKKAIVDLLFKTNRKVTVKQLKEDYFKKIECFDSVEISGVEDRFNASLGTYHDLLKIIKDKDFLDNEENEDILEDIVLTLTLFEDREMIEERLKTYAHLFDDKVMKQLKRRRYTGWGRLSRKLINGIRDKQSGKTILDFLKSDGFANRNFMQLIHDDSLTFKEDIQKAQVSGQGDSLHEHIANLAGSPAIKKGILQTVKVVDELVKVMGRHKPENIVIEMARENQTTQKGQKNSRERMKRIEEGIKELGSQILKEHPVENTQLQNEKLYLYYLQNGRDMYVDQELDINRLSDYDVDHIVPQSFLKDDSIDNKVLTRSDKARGKSDNVPSEEVVKKMKNYWRQLLNAKLITQRKFDNLTKAERGGLSELDKAGFIKRQLVETRQITKHVAQILDSRMNTKYDENDKLIREVKVITLKSKLVSDFRKDFQFYKVREINNYHHAHDAYLNAVVGTALIKKYPKLESEFVYGDYKVYDVRKMIAKSEQEIGKATAKYFFYSNIMNFFKTEITLANGEIRKRPLIETNGETGEIVWDKGRDFATVRKVLSMPQVNIVKKTEVQTGGFSKESILPKRNSDKLIARKKDWDPKKYGGFDSPTVAYSVLVVAKVEKGKSKKLKSVKELLGITIMERSSFEKNPIDFLEAKGYKEVKKDLIIKLPKYSLFELENGRKRMLASAGELQKGNELALPSKYVNFLYLASHYEKLKGSPEDNEQKQLFVEQHKHYLDEIIEQISEFSKRVILADANLDKVLSAYNKHRDKPIREQAENIIHLFTLTNLGAPAAFKYFDTTIDRKRYTSTKEVLDATLIHQSITGLYETRIDLSQLGGDGGEAAAKEAAAKEAAAKEAAAKEAAAKEAAAKGGMDPLQLLQPLEAEIKGTKLKAHWNSGATITCVPQAFLEEEVPIKNIWIKTIHGEKEQPVYYLTFKIQGRKVEAEVISSPYDYILVSPSDIPWLMKKPLQLTTLVPLQEYEERLLKQTMLTGSYKEKLQSLFLKYDALWQHWENQVGHRRIKPHHIATGTVNPRPQKQYPINPKAKASIQTVINDLLKQGVLIQQNSIMNTPVYPVPKPDGKWRMVLDYREVNKTIPLIAAQNQHSAGILSSIFRGKYKTTLDLSNGFWAHSITPESYWLTAFTWLGQQYCWTRLPQGFLNSPALFNADVVDLLKEVPNVQVYVDDIYISHDDPREHLEQLEKVFSLLLNAGYVVSLKKSEIAQHEVEFLGFNITKEGRGLTETFKQKLLNITPPRDLKQLQSILGLLNFARNFIPNFSELVKPLYNIIATAPGKYITWTTDNSQQLQNIISMLNSAENLEERNPEVRLIMKVNTSPSAGYIRFYNEFAKRPIMYLNYVYTKAEVKFTNTEKLLTTIHKGLIKALDLGMGQEILVYSPIVSMTKIQKTPLPERKALPIRWITWMSYLEDPRIQFHYDKTLPELQQVPTVTDDIIAKIKHPSEFSMVFYTDGSAIKHPNVNKSHNAGMGIAQVQFKPEFTVINTWSIPLGDHTAQLAEVAAVEFACKKALKIDGPVLIVTDSFYVAESVNKELPYWQSNGFFNNKKKPLKHVSKWKSIADCIQLKPDIIIIHEKGHQPTASTFHTEGNNLADKLATQGSYVVNAGKRTADGSEFEKRTADGSEFESPKKKAKVE

SEQ ID NO: 591 - protein, 2211 aa, synthetic construct
  source 1..2211: note = Description of Artificial Sequence: Synthetic polypeptide
MPAAKRVKLDGGDKKYSIGLDIGTNSVGWAVITDEYKVPSKKFKVLGNTDRHSIKKNLIGALLFDSGETAEATRLKRTARRRYTRRKNRICYLQEIFSNEMAKVDDSFFHRLEESFLVEEDKKHERHPIFGNIVDEVAYHEKYPTIYHLRKKLVDSTDKADLRLIYLALAHMIKFRGHFLIEGDLNPDNSDVDKLFIQLVQTYNQLFEENPINASGVDAKAILSARLSKSRRLENLIAQLPGEKKNGLFGNLIALSLGLTPNFKSNFDLAEDAKLQLSKDTYDDDLDNLLAQIGDQYADLFLAAKNLSDAILLSDILRVNTEITKAPLSASMIKRYDEHHQDLTLLKALVRQQLPEKYKEIFFDQSKNGYAGYIDGGASQEEFYKFIKPILEKMDGTEELLVKLNREDLLRKQRTFDNGSIPHQIHLGELHAILRRQEDFYPFLKDNREKIEKILTFRIPYYVGPLARGNSRFAWMTRKSEETITPWNFEEVVDKGASAQSFIERMTNFDKNLPNEKVLPKHSLLYEYFTVYNELTKVKYVTEGMRKPAFLSGEQKKAIVDLLFKTNRKVTVKQLKEDYFKKIECFDSVEISGVEDRFNASLGTYHDLLKIIKDKDFLDNEENEDILEDIVLTLTLFEDREMIEERLKTYAHLFDDKVMKQLKRRRYTGWGRLSRKLINGIRDKQSGKTILDFLKSDGFANRNFMQLIHDDSLTFKEDIQKAQVSGQGDSLHEHIANLAGSPAIKKGILQTVKVVDELVKVMGRHKPENIVIEMARENQTTQKGQKNSRERMKRIEEGIKELGSQILKEHPVENTQLQNEKLYLYYLQNGRDMYVDQELDINRLSDYDVDHIVPQSFLKDDSIDNKVLTRSDKARGKSDNVPSEEVVKKMKNYWRQLLNAKLITQRKFDNLTKAERGGLSELDKAGFIKRQLVETRQITKHVAQILDSRMNTKYDENDKLIREVKVITLKSKLVSDFRKDFQFYKVREINNYHHAHDAYLNAVVGTALIKKYPKLESEFVYGDYKVYDVRKMIAKSEQEIGKATAKYFFYSNIMNFFKTEITLANGEIRKRPLIETNGETGEIVWDKGRDFATVRKVLSMPQVNIVKKTEVQTGGFSKESILPKRNSDKLIARKKDWDPKKYGGFDSPTVAYSVLVVAKVEKGKSKKLKSVKELLGITIMERSSFEKNPIDFLEAKGYKEVKKDLIIKLPKYSLFELENGRKRMLASAGELQKGNELALPSKYVNFLYLASHYEKLKGSPEDNEQKQLFVEQHKHYLDEIIEQISEFSKRVILADANLDKVLSAYNKHRDKPIREQAENIIHLFTLTNLGAPAAFKYFDTTIDRKRYTSTKEVLDATLIHQSITGLYETRIDLSQLGGDGGAEAAAKEAAAKEAAAKEAAAKALEAEAAAKEAAAKEAAAKEAAAKAGGMDPLQLLQPLEAEIKGTKLKAHWNSGATITCVPQAFLEEEVPIKNIWIKTIHGEKEQPVYYLTFKIQGRKVEAEVISSPYDYILVSPSDIPWLMKKPLQLTTLVPLQEYEERLLKQTMLTGSYKEKLQSLFLKYDALWQHWENQVGHRRIKPHHIATGTVNPRPQKQYPINPKAKASIQTVINDLLKQGVLIQQNSIMNTPVYPVPKPDGKWRMVLDYREVNKTIPLIAAQNQHSAGILSSIFRGKYKTTLDLSNGFWAHSITPESYWLTAFTWLGQQYCWTRLPQGFLNSPALFNADVVDLLKEVPNVQVYVDDIYISHDDPREHLEQLEKVFSLLLNAGYVVSLKKSEIAQHEVEFLGFNITKEGRGLTETFKQKLLNITPPRDLKQLQSILGLLNFARNFIPNFSELVKPLYNIIATAPGKYITWTTDNSQQLQNIISMLNSAENLEERNPEVRLIMKVNTSPSAGYIRFYNEFAKRPIMYLNYVYTKAEVKFTNTEKLLTTIHKGLIKALDLGMGQEILVYSPIVSMTKIQKTPLPERKALPIRWITWMSYLEDPRIQFHYDKTLPELQQVPTVTDDIIAKIKHPSEFSMVFYTDGSAIKHPNVNKSHNAGMGIAQVQFKPEFTVINTWSIPLGDHTAQLAEVAAVEFACKKALKIDGPVLIVTDSFYVAESVNKELPYWQSNGFFNNKKKPLKHVSKWKSIADCIQLKPDIIIIHEKGHQPTASTFHTEGNNLADKLATQGSYVVNAGKRTADGSEFEKRTADGSEFESPKKKAKVE

SEQ ID NO: 592 - protein, 2195 aa, synthetic construct
  source 1..2195: note = Description of Artificial Sequence: Synthetic polypeptide
MPAAKRVKLDGGDKKYSIGLDIGTNSVGWAVITDEYKVPSKKFKVLGNTDRHSIKKNLIGALLFDSGETAEATRLKRTARRRYTRRKNRICYLQEIFSNEMAKVDDSFFHRLEESFLVEEDKKHERHPIFGNIVDEVAYHEKYPTIYHLRKKLVDSTDKADLRLIYLALAHMIKFRGHFLIEGDLNPDNSDVDKLFIQLVQTYNQLFEENPINASGVDAKAILSARLSKSRRLENLIAQLPGEKKNGLFGNLIALSLGLTPNFKSNFDLAEDAKLQLSKDTYDDDLDNLLAQIGDQYADLFLAAKNLSDAILLSDILRVNTEITKAPLSASMIKRYDEHHQDLTLLKALVRQQLPEKYKEIFFDQSKNGYAGYIDGGASQEEFYKFIKPILEKMDGTEELLVKLNREDLLRKQRTFDNGSIPHQIHLGELHAILRRQEDFYPFLKDNREKIEKILTFRIPYYVGPLARGNSRFAWMTRKSEETITPWNFEEVVDKGASAQSFIERMTNFDKNLPNEKVLPKHSLLYEYFTVYNELTKVKYVTEGMRKPAFLSGEQKKAIVDLLFKTNRKVTVKQLKEDYFKKIECFDSVEISGVEDRFNASLGTYHDLLKIIKDKDFLDNEENEDILEDIVLTLTLFEDREMIEERLKTYAHLFDDKVMKQLKRRRYTGWGRLSRKLINGIRDKQSGKTILDFLKSDGFANRNFMQLIHDDSLTFKEDIQKAQVSGQGDSLHEHIANLAGSPAIKKGILQTVKVVDELVKVMGRHKPENIVIEMARENQTTQKGQKNSRERMKRIEEGIKELGSQILKEHPVENTQLQNEKLYLYYLQNGRDMYVDQELDINRLSDYDVDHIVPQSFLKDDSIDNKVLTRSDKARGKSDNVPSEEVVKKMKNYWRQLLNAKLITQRKFDNLTKAERGGLSELDKAGFIKRQLVETRQITKHVAQILDSRMNTKYDENDKLIREVKVITLKSKLVSDFRKDFQFYKVREINNYHHAHDAYLNAVVGTALIKKYPKLESEFVYGDYKVYDVRKMIAKSEQEIGKATAKYFFYSNIMNFFKTEITLANGEIRKRPLIETNGETGEIVWDKGRDFATVRKVLSMPQVNIVKKTEVQTGGFSKESILPKRNSDKLIARKKDWDPKKYGGFDSPTVAYSVLVVAKVEKGKSKKLKSVKELLGITIMERSSFEKNPIDFLEAKGYKEVKKDLIIKLPKYSLFELENGRKRMLASAGELQKGNELALPSKYVNFLYLASHYEKLKGSPEDNEQKQLFVEQHKHYLDEIIEQISEFSKRVILADANLDKVLSAYNKHRDKPIREQAENIIHLFTLTNLGAPAAFKYFDTTIDRKRYTSTKEVLDATLIHQSITGLYETRIDLSQLGGDGGGGGGSGGGGSGGGGSGGGGSGGGGSGGGGSGGMDPLQLLQPLEAEIKGTKLKAHWNSGATITCVPQAFLEEEVPIKNIWIKTIHGEKEQPVYYLTFKIQGRKVEAEVISSPYDYILVSPSDIPWLMKKPLQLTTLVPLQEYEERLLKQTMLTGSYKEKLQSLFLKYDALWQHWENQVGHRRIKPHHIATGTVNPRPQKQYPINPKAKASIQTVINDLLKQGVLIQQNSIMNTPVYPVPKPDGKWRMVLDYREVNKTIPLIAAQNQHSAGILSSIFRGKYKTTLDLSNGFWAHSITPESYWLTAFTWLGQQYCWTRLPQGFLNSPALFNADVVDLLKEVPNVQVYVDDIYISHDDPREHLEQLEKVFSLLLNAGYVVSLKKSEIAQHEVEFLGFNITKEGRGLTETFKQKLLNITPPRDLKQLQSILGLLNFARNFIPNFSELVKPLYNIIATAPGKYITWTTDNSQQLQNIISMLNSAENLEERNPEVRLIMKVNTSPSAGYIRFYNEFAKRPIMYLNYVYTKAEVKFTNTEKLLTTIHKGLIKALDLGMGQEILVYSPIVSMTKIQKTPLPERKALPIRWITWMSYLEDPRIQFHYDKTLPELQQVPTVTDDIIAKIKHPSEFSMVFYTDGSAIKHPNVNKSHNAGMGIAQVQFKPEFTVINTWSIPLGDHTAQLAEVAAVEFACKKALKIDGPVLIVTDSFYVAESVNKELPYWQSNGFFNNKKKPLKHVSKWKSIADCIQLKPDIIIIHEKGHQPTASTFHTEGNNLADKLATQGSYVVNAGKRTADGSEFEKRTADGSEFESPKKKAKVE

SEQ ID NO: 593 - protein, 2190 aa, synthetic construct
  source 1..2190: note = Description of Artificial Sequence: Synthetic polypeptide
MPAAKRVKLDGGDKKYSIGLDIGTNSVGWAVITDEYKVPSKKFKVLGNTDRHSIKKNLIGALLFDSGETAEATRLKRTARRRYTRRKNRICYLQEIFSNEMAKVDDSFFHRLEESFLVEEDKKHERHPIFGNIVDEVAYHEKYPTIYHLRKKLVDSTDKADLRLIYLALAHMIKFRGHFLIEGDLNPDNSDVDKLFIQLVQTYNQLFEENPINASGVDAKAILSARLSKSRRLENLIAQLPGEKKNGLFGNLIALSLGLTPNFKSNFDLAEDAKLQLSKDTYDDDLDNLLAQIGDQYADLFLAAKNLSDAILLSDILRVNTEITKAPLSASMIKRYDEHHQDLTLLKALVRQQLPEKYKEIFFDQSKNGYAGYIDGGASQEEFYKFIKPILEKMDGTEELLVKLNREDLLRKQRTFDNGSIPHQIHLGELHAILRRQEDFYPFLKDNREKIEKILTFRIPYYVGPLARGNSRFAWMTRKSEETITPWNFEEVVDKGASAQSFIERMTNFDKNLPNEKVLPKHSLLYEYFTVYNELTKVKYVTEGMRKPAFLSGEQKKAIVDLLFKTNRKVTVKQLKEDYFKKIECFDSVEISGVEDRFNASLGTYHDLLKIIKDKDFLDNEENEDILEDIVLTLTLFEDREMIEERLKTYAHLFDDKVMKQLKRRRYTGWGRLSRKLINGIRDKQSGKTILDFLKSDGFANRNFMQLIHDDSLTFKEDIQKAQVSGQGDSLHEHIANLAGSPAIKKGILQTVKVVDELVKVMGRHKPENIVIEMARENQTTQKGQKNSRERMKRIEEGIKELGSQILKEHPVENTQLQNEKLYLYYLQNGRDMYVDQELDINRLSDYDVDHIVPQSFLKDDSIDNKVLTRSDKARGKSDNVPSEEVVKKMKNYWRQLLNAKLITQRKFDNLTKAERGGLSELDKAGFIKRQLVETRQITKHVAQILDSRMNTKYDENDKLIREVKVITLKSKLVSDFRKDFQFYKVREINNYHHAHDAYLNAVVGTALIKKYPKLESEFVYGDYKVYDVRKMIAKSEQEIGKATAKYFFYSNIMNFFKTEITLANGEIRKRPLIETNGETGEIVWDKGRDFATVRKVLSMPQVNIVKKTEVQTGGFSKESILPKRNSDKLIARKKDWDPKKYGGFDSPTVAYSVLVVAKVEKGKSKKLKSVKELLGITIMERSSFEKNPIDFLEAKGYKEVKKDLIIKLPKYSLFELENGRKRMLASAGELQKGNELALPSKYVNFLYLASHYEKLKGSPEDNEQKQLFVEQHKHYLDEIIEQISEFSKRVILADANLDKVLSAYNKHRDKPIREQAENIIHLFTLTNLGAPAAFKYFDTTIDRKRYTSTKEVLDATLIHQSITGLYETRIDLSQLGGDGGEAAAKEAAAKEAAAKEAAAKEAAAKGGMDPLQLLQPLEAEIKGTKLKAHWNSGATITCVPQAFLEEEVPIKNIWIKTIHGEKEQPVYYLTFKIQGRKVEAEVISSPYDYILVSPSDIPWLMKKPLQLTTLVPLQEYEERLLKQTMLTGSYKEKLQSLFLKYDALWQHWENQVGHRRIKPHHIATGTVNPRPQKQYPINPKAKASIQTVINDLLKQGVLIQQNSIMNTPVYPVPKPDGKWRMVLDYREVNKTIPLIAAQNQHSAGILSSIFRGKYKTTLDLSNGFWAHSITPESYWLTAFTWLGQQYCWTRLPQGFLNSPALFNADVVDLLKEVPNVQVYVDDIYISHDDPREHLEQLEKVFSLLLNAGYVVSLKKSEIAQHEVEFLGFNITKEGRGLTETFKQKLLNITPPRDLKQLQSILGLLNFARNFIPNFSELVKPLYNIIATAPGKYITWTTDNSQQLQNIISMLNSAENLEERNPEVRLIMKVNTSPSAGYIRFYNEFAKRPIMYLNYVYTKAEVKFTNTEKLLTTIHKGLIKALDLGMGQEILVYSPIVSMTKIQKTPLPERKALPIRWITWMSYLEDPRIQFHYDKTLPELQQVPTVTDDIIAKIKHPSEFSMVFYTDGSAIKHPNVNKSHNAGMGIAQVQFKPEFTVINTWSIPLGDHTAQLAEVAAVEFACKKALKIDGPVLIVTDSFYVAESVNKELPYWQSNGFFNNKKKPLKHVSKWKSIADCIQLKPDIIIIHEKGHQPTASTFHTEGNNLADKLATQGSYVVNAGKRTADGSEFEKRTADGSEFESPKKKAKVE

SEQ ID NO: 594 - protein, 2174 aa, synthetic construct
  source 1..2174: note = Description of Artificial Sequence: Synthetic polypeptide
MPAAKRVKLDGGDKKYSIGLDIGTNSVGWAVITDEYKVPSKKFKVLGNTDRHSIKKNLIGALLFDSGETAEATRLKRTARRRYTRRKNRICYLQEIFSNEMAKVDDSFFHRLEESFLVEEDKKHERHPIFGNIVDEVAYHEKYPTIYHLRKKLVDSTDKADLRLIYLALAHMIKFRGHFLIEGDLNPDNSDVDKLFIQLVQTYNQLFEENPINASGVDAKAILSARLSKSRRLENLIAQLPGEKKNGLFGNLIALSLGLTPNFKSNFDLAEDAKLQLSKDTYDDDLDNLLAQIGDQYADLFLAAKNLSDAILLSDILRVNTEITKAPLSASMIKRYDEHHQDLTLLKALVRQQLPEKYKEIFFDQSKNGYAGYIDGGASQEEFYKFIKPILEKMDGTEELLVKLNREDLLRKQRTFDNGSIPHQIHLGELHAILRRQEDFYPFLKDNREKIEKILTFRIPYYVGPLARGNSRFAWMTRKSEETITPWNFEEVVDKGASAQSFIERMTNFDKNLPNEKVLPKHSLLYEYFTVYNELTKVKYVTEGMRKPAFLSGEQKKAIVDLLFKTNRKVTVKQLKEDYFKKIECFDSVEISGVEDRFNASLGTYHDLLKIIKDKDFLDNEENEDILEDIVLTLTLFEDREMIEERLKTYAHLFDDKVMKQLKRRRYTGWGRLSRKLINGIRDKQSGKTILDFLKSDGFANRNFMQLIHDDSLTFKEDIQKAQVSGQGDSLHEHIANLAGSPAIKKGILQTVKVVDELVKVMGRHKPENIVIEMARENQTTQKGQKNSRERMKRIEEGIKELGSQILKEHPVENTQLQNEKLYLYYLQNGRDMYVDQELDINRLSDYDVDHIVPQSFLKDDSIDNKVLTRSDKARGKSDNVPSEEVVKKMKNYWRQLLNAKLITQRKFDNLTKAERGGLSELDKAGFIKRQLVETRQITKHVAQILDSRMNTKYDENDKLIREVKVITLKSKLVSDFRKDFQFYKVREINNYHHAHDAYLNAVVGTALIKKYPKLESEFVYGDYKVYDVRKMIAKSEQEIGKATAKYFFYSNIMNFFKTEITLANGEIRKRPLIETNGETGEIVWDKGRDFATVRKVLSMPQVNIVKKTEVQTGGFSKESILPKRNSDKLIARKKDWDPKKYGGFDSPTVAYSVLVVAKVEKGKSKKLKSVKELLGITIMERSSFEKNPIDFLEAKGYKEVKKDLIIKLPKYSLFELENGRKRMLASAGELQKGNELALPSKYVNFLYLASHYEKLKGSPEDNEQKQLFVEQHKHYLDEIIEQISEFSKRVILADANLDKVLSAYNKHRDKPIREQAENIIHLFTLTNLGAPAAFKYFDTTIDRKRYTSTKEVLDATLIHQSITGLYETRIDLSQLGGDGGGGGPAPGGSGGMDPLQLLQPLEAEIKGTKLKAHWNSGATITCVPQAFLEEEVPIKNIWIKTIHGEKEQPVYYLTFKIQGRKVEAEVISSPYDYILVSPSDIPWLMKKPLQLTTLVPLQEYEERLLKQTMLTGSYKEKLQSLFLKYDALWQHWENQVGHRRIKPHHIATGTVNPRPQKQYPINPKAKASIQTVINDLLKQGVLIQQNSIMNTPVYPVPKPDGKWRMVLDYREVNKTIPLIAAQNQHSAGILSSIFRGKYKTTLDLSNGFWAHSITPESYWLTAFTWLGQQYCWTRLPQGFLNSPALFNADVVDLLKEVPNVQVYVDDIYISHDDPREHLEQLEKVFSLLLNAGYVVSLKKSEIAQHEVEFLGFNITKEGRGLTETFKQKLLNITPPRDLKQLQSILGLLNFARNFIPNFSELVKPLYNIIATAPGKYITWTTDNSQQLQNIISMLNSAENLEERNPEVRLIMKVNTSPSAGYIRFYNEFAKRPIMYLNYVYTKAEVKFTNTEKLLTTIHKGLIKALDLGMGQEILVYSPIVSMTKIQKTPLPERKALPIRWITWMSYLEDPRIQFHYDKTLPELQQVPTVTDDIIAKIKHPSEFSMVFYTDGSAIKHPNVNKSHNAGMGIAQVQFKPEFTVINTWSIPLGDHTAQLAEVAAVEFACKKALKIDGPVLIVTDSFYVAESVNKELPYWQSNGFFNNKKKPLKHVSKWKSIADCIQLKPDIIIIHEKGHQPTASTFHTEGNNLADKLATQGSYVVNAGKRTADGSEFEKRTADGSEFESPKKKAKVE

SEQ ID NO: 595 - protein, 2176 aa, synthetic construct
  source 1..2176: note = Description of Artificial Sequence: Synthetic polypeptide
MPAAKRVKLDGGDKKYSIGLDIGTNSVGWAVITDEYKVPSKKFKVLGNTDRHSIKKNLIGALLFDSGETAEATRLKRTARRRYTRRKNRICYLQEIFSNEMAKVDDSFFHRLEESFLVEEDKKHERHPIFGNIVDEVAYHEKYPTIYHLRKKLVDSTDKADLRLIYLALAHMIKFRGHFLIEGDLNPDNSDVDKLFIQLVQTYNQLFEENPINASGVDAKAILSARLSKSRRLENLIAQLPGEKKNGLFGNLIALSLGLTPNFKSNFDLAEDAKLQLSKDTYDDDLDNLLAQIGDQYADLFLAAKNLSDAILLSDILRVNTEITKAPLSASMIKRYDEHHQDLTLLKALVRQQLPEKYKEIFFDQSKNGYAGYIDGGASQEEFYKFIKPILEKMDGTEELLVKLNREDLLRKQRTFDNGSIPHQIHLGELHAILRRQEDFYPFLKDNREKIEKILTFRIPYYVGPLARGNSRFAWMTRKSEETITPWNFEEVVDKGASAQSFIERMTNFDKNLPNEKVLPKHSLLYEYFTVYNELTKVKYVTEGMRKPAFLSGEQKKAIVDLLFKTNRKVTVKQLKEDYFKKIECFDSVEISGVEDRFNASLGTYHDLLKIIKDKDFLDNEENEDILEDIVLTLTLFEDREMIEERLKTYAHLFDDKVMKQLKRRRYTGWGRLSRKLINGIRDKQSGKTILDFLKSDGFANRNFMQLIHDDSLTFKEDIQKAQVSGQGDSLHEHIANLAGSPAIKKGILQTVKVVDELVKVMGRHKPENIVIEMARENQTTQKGQKNSRERMKRIEEGIKELGSQILKEHPVENTQLQNEKLYLYYLQNGRDMYVDQELDINRLSDYDVDHIVPQSFLKDDSIDNKVLTRSDKARGKSDNVPSEEVVKKMKNYWRQLLNAKLITQRKFDNLTKAERGGLSELDKAGFIKRQLVETRQITKHVAQILDSRMNTKYDENDKLIREVKVITLKSKLVSDFRKDFQFYKVREINNYHHAHDAYLNAVVGTALIKKYPKLESEFVYGDYKVYDVRKMIAKSEQEIGKATAKYFFYSNIMNFFKTEITLANGEIRKRPLIETNGETGEIVWDKGRDFATVRKVLSMPQVNIVKKTEVQTGGFSKESILPKRNSDKLIARKKDWDPKKYGGFDSPTVAYSVLVVAKVEKGKSKKLKSVKELLGITIMERSSFEKNPIDFLEAKGYKEVKKDLIIKLPKYSLFELENGRKRMLASAGELQKGNELALPSKYVNFLYLASHYEKLKGSPEDNEQKQLFVEQHKHYLDEIIEQISEFSKRVILADANLDKVLSAYNKHRDKPIREQAENIIHLFTLTNLGAPAAFKYFDTTIDRKRYTSTKEVLDATLIHQSITGLYETRIDLSQLGGDGGGGSEAAAKPAPGGMDPLQLLQPLEAEIKGTKLKAHWNSGATITCVPQAFLEEEVPIKNIWIKTIHGEKEQPVYYLTFKIQGRKVEAEVISSPYDYILVSPSDIPWLMKKPLQLTTLVPLQEYEERLLKQTMLTGSYKEKLQSLFLKYDALWQHWENQVGHRRIKPHHIATGTVNPRPQKQYPINPKAKASIQTVINDLLKQGVLIQQNSIMNTPVYPVPKPDGKWRMVLDYREVNKTIPLIAAQNQHSAGILSSIFRGKYKTTLDLSNGFWAHSITPESYWLTAFTWLGQQYCWTRLPQGFLNSPALFNADVVDLLKEVPNVQVYVDDIYISHDDPREHLEQLEKVFSLLLNAGYVVSLKKSEIAQHEVEFLGFNITKEGRGLTETFKQKLLNITPPRDLKQLQSILGLLNFARNFIPNFSELVKPLYNIIATAPGKYITWTTDNSQQLQNIISMLNSAENLEERNPEVRLIMKVNTSPSAGYIRFYNEFAKRPIMYLNYVYTKAEVKFTNTEKLLTTIHKGLIKALDLGMGQEILVYSPIVSMTKIQKTPLPERKALPIRWITWMSYLEDPRIQFHYDKTLPELQQVPTVTDDIIAKIKHPSEFSMVFYTDGSAIKHPNVNKSHNAGMGIAQVQFKPEFTVINTWSIPLGDHTAQLAEVAAVEFACKKALKIDGPVLIVTDSFYVAESVNKELPYWQSNGFFNNKKKPLKHVSKWKSIADCIQLKPDIIIIHEKGHQPTASTFHTEGNNLADKLATQGSYVVNAGKRTADGSEFEKRTADGSEFESPKKKAKVE

SEQ ID NO: 596 - protein, 2180 aa, synthetic construct
  source 1..2180: note = Description of Artificial Sequence: Synthetic polypeptide
MPAAKRVKLDGGDKKYSIGLDIGTNSVGWAVITDEYKVPSKKFKVLGNTDRHSIKKNLIGALLFDSGETAEATRLKRTARRRYTRRKNRICYLQEIFSNEMAKVDDSFFHRLEESFLVEEDKKHERHPIFGNIVDEVAYHEKYPTIYHLRKKLVDSTDKADLRLIYLALAHMIKFRGHFLIEGDLNPDNSDVDKLFIQLVQTYNQLFEENPINASGVDAKAILSARLSKSRRLENLIAQLPGEKKNGLFGNLIALSLGLTPNFKSNFDLAEDAKLQLSKDTYDDDLDNLLAQIGDQYADLFLAAKNLSDAILLSDILRVNTEITKAPLSASMIKRYDEHHQDLTLLKALVRQQLPEKYKEIFFDQSKNGYAGYIDGGASQEEFYKFIKPILEKMDGTEELLVKLNREDLLRKQRTFDNGSIPHQIHLGELHAILRRQEDFYPFLKDNREKIEKILTFRIPYYVGPLARGNSRFAWMTRKSEETITPWNFEEVVDKGASAQSFIERMTNFDKNLPNEKVLPKHSLLYEYFTVYNELTKVKYVTEGMRKPAFLSGEQKKAIVDLLFKTNRKVTVKQLKEDYFKKIECFDSVEISGVEDRFNASLGTYHDLLKIIKDKDFLDNEENEDILEDIVLTLTLFEDREMIEERLKTYAHLFDDKVMKQLKRRRYTGWGRLSRKLINGIRDKQSGKTILDFLKSDGFANRNFMQLIHDDSLTFKEDIQKAQVSGQGDSLHEHIANLAGSPAIKKGILQTVKVVDELVKVMGRHKPENIVIEMARENQTTQKGQKNSRERMKRIEEGIKELGSQILKEHPVENTQLQNEKLYLYYLQNGRDMYVDQELDINRLSDYDVDHIVPQSFLKDDSIDNKVLTRSDKARGKSDNVPSEEVVKKMKNYWRQLLNAKLITQRKFDNLTKAERGGLSELDKAGFIKRQLVETRQITKHVAQILDSRMNTKYDENDKLIREVKVITLKSKLVSDFRKDFQFYKVREINNYHHAHDAYLNAVVGTALIKKYPKLESEFVYGDYKVYDVRKMIAKSEQEIGKATAKYFFYSNIMNFFKTEITLANGEIRKRPLIETNGETGEIVWDKGRDFATVRKVLSMPQVNIVKKTEVQTGGFSKESILPKRNSDKLIARKKDWDPKKYGGFDSPTVAYSVLVVAKVEKGKSKKLKSVKELLGITIMERSSFEKNPIDFLEAKGYKEVKKDLIIKLPKYSLFELENGRKRMLASAGELQKGNELALPSKYVNFLYLASHYEKLKGSPEDNEQKQLFVEQHKHYLDEIIEQISEFSKRVILADANLDKVLSAYNKHRDKPIREQAENIIHLFTLTNLGAPAAFKYFDTTIDRKRYTSTKEVLDATLIHQSITGLYETRIDLSQLGGDGGEAAAKGGGGSEAAAKGGMDPLQLLQPLEAEIKGTKLKAHWNSGATITCVPQAFLEEEVPIKNIWIKTIHGEKEQPVYYLTFKIQGRKVEAEVISSPYDYILVSPSDIPWLMKKPLQLTTLVPLQEYEERLLKQTMLTGSYKEKLQSLFLKYDALWQHWENQVGHRRIKPHHIATGTVNPRPQKQYPINPKAKASIQTVINDLLKQGVLIQQNSIMNTPVYPVPKPDGKWRMVLDYREVNKTIPLIAAQNQHSAGILSSIFRGKYKTTLDLSNGFWAHSITPESYWLTAFTWLGQQYCWTRLPQGFLNSPALFNADVVDLLKEVPNVQVYVDDIYISHDDPREHLEQLEKVFSLLLNAGYVVSLKKSEIAQHEVEFLGFNITKEGRGLTETFKQKLLNITPPRDLKQLQSILGLLNFARNFIPNFSELVKPLYNIIATAPGKYITWTTDNSQQLQNIISMLNSAENLEERNPEVRLIMKVNTSPSAGYIRFYNEFAKRPIMYLNYVYTKAEVKFTNTEKLLTTIHKGLIKALDLGMGQEILVYSPIVSMTKIQKTPLPERKALPIRWITWMSYLEDPRIQFHYDKTLPELQQVPTVTDDIIAKIKHPSEFSMVFYTDGSAIKHPNVNKSHNAGMGIAQVQFKPEFTVINTWSIPLGDHTAQLAEVAAVEFACKKALKIDGPVLIVTDSFYVAESVNKELPYWQSNGFFNNKKKPLKHVSKWKSIADCIQLKPDIIIIHEKGHQPTASTFHTEGNNLADKLATQGSYVVNAGKRTADGSEFEKRTADGSEFESPKKKAKVE

SEQ ID NO: 597 - protein, 2175 aa, synthetic construct
  source 1..2175: note = Description of Artificial Sequence: Synthetic polypeptide
MPAAKRVKLDGGDKKYSIGLDIGTNSVGWAVITDEYKVPSKKFKVLGNTDRHSIKKNLIGALLFDSGETAEATRLKRTARRRYTRRKNRICYLQEIFSNEMAKVDDSFFHRLEESFLVEEDKKHERHPIFGNIVDEVAYHEKYPTIYHLRKKLVDSTDKADLRLIYLALAHMIKFRGHFLIEGDLNPDNSDVDKLFIQLVQTYNQLFEENPINASGVDAKAILSARLSKSRRLENLIAQLPGEKKNGLFGNLIALSLGLTPNFKSNFDLAEDAKLQLSKDTYDDDLDNLLAQIGDQYADLFLAAKNLSDAILLSDILRVNTEITKAPLSASMIKRYDEHHQDLTLLKALVRQQLPEKYKEIFFDQSKNGYAGYIDGGASQEEFYKFIKPILEKMDGTEELLVKLNREDLLRKQRTFDNGSIPHQIHLGELHAILRRQEDFYPFLKDNREKIEKILTFRIPYYVGPLARGNSRFAWMTRKSEETITPWNFEEVVDKGASAQSFIERMTNFDKNLPNEKVLPKHSLLYEYFTVYNELTKVKYVTEGMRKPAFLSGEQKKAIVDLLFKTNRKVTVKQLKEDYFKKIECFDSVEISGVEDRFNASLGTYHDLLKIIKDKDFLDNEENEDILEDIVLTLTLFEDREMIEERLKTYAHLFDDKVMKQLKRRRYTGWGRLSRKLINGIRDKQSGKTILDFLKSDGFANRNFMQLIHDDSLTFKEDIQKAQVSGQGDSLHEHIANLAGSPAIKKGILQTVKVVDELVKVMGRHKPENIVIEMARENQTTQKGQKNSRERMKRIEEGIKELGSQILKEHPVENTQLQNEKLYLYYLQNGRDMYVDQELDINRLSDYDVDHIVPQSFLKDDSIDNKVLTRSDKARGKSDNVPSEEVVKKMKNYWRQLLNAKLITQRKFDNLTKAERGGLSELDKAGFIKRQLVETRQITKHVAQILDSRMNTKYDENDKLIREVKVITLKSKLVSDFRKDFQFYKVREINNYHHAHDAYLNAVVGTALIKKYPKLESEFVYGDYKVYDVRKMIAKSEQEIGKATAKYFFYSNIMNFFKTEITLANGEIRKRPLIETNGETGEIVWDKGRDFATVRKVLSMPQVNIVKKTEVQTGGFSKESILPKRNSDKLIARKKDWDPKKYGGFDSPTVAYSVLVVAKVEKGKSKKLKSVKELLGITIMERSSFEKNPIDFLEAKGYKEVKKDLIIKLPKYSLFELENGRKRMLASAGELQKGNELALPSKYVNFLYLASHYEKLKGSPEDNEQKQLFVEQHKHYLDEIIEQISEFSKRVILADANLDKVLSAYNKHRDKPIREQAENIIHLFTLTNLGAPAAFKYFDTTIDRKRYTSTKEVLDATLIHQSITGLYETRIDLSQLGGDGGGGGGSGGGGSGGMDPLQLLQPLEAEIKGTKLKAHWNSGATITCVPQAFLEEEVPIKNIWIKTIHGEKEQPVYYLTFKIQGRKVEAEVISSPYDYILVSPSDIPWLMKKPLQLTTLVPLQEYEERLLKQTMLTGSYKEKLQSLFLKYDALWQHWENQVGHRRIKPHHIATGTVNPRPQKQYPINPKAKASIQTVINDLLKQGVLIQQNSIMNTPVYPVPKPDGKWRMVLDYREVNKTIPLIAAQNQHSAGILSSIFRGKYKTTLDLSNGFWAHSITPESYWLTAFTWLGQQYCWTRLPQGFLNSPALFNADVVDLLKEVPNVQVYVDDIYISHDDPREHLEQLEKVFSLLLNAGYVVSLKKSEIAQHEVEFLGFNITKEGRGLTETFKQKLLNITPPRDLKQLQSILGLLNFARNFIPNFSELVKPLYNIIATAPGKYITWTTDNSQQLQNIISMLNSAENLEERNPEVRLIMKVNTSPSAGYIRFYNEFAKRPIMYLNYVYTKAEVKFTNTEKLLTTIHKGLIKALDLGMGQEILVYSPIVSMTKIQKTPLPERKALPIRWITWMSYLEDPRIQFHYDKTLPELQQVPTVTDDIIAKIKHPSEFSMVFYTDGSAIKHPNVNKSHNAGMGIAQVQFKPEFTVINTWSIPLGDHTAQLAEVAAVEFACKKALKIDGPVLIVTDSFYVAESVNKELPYWQSNGFFNNKKKPLKHVSKWKSIADCIQLKPDIIIIHEKGHQPTASTFHTEGNNLADKLATQGSYVVNAGKRTADGSEFEKRTADGSEFESPKKKAKVE

SEQ ID NO: 598 - protein, 2175 aa, synthetic construct
  source 1..2175: note = Description of Artificial Sequence: Synthetic polypeptide
MPAAKRVKLDGGDKKYSIGLDIGTNSVGWAVITDEYKVPSKKFKVLGNTDRHSIKKNLIGALLFDSGETAEATRLKRTARRRYTRRKNRICYLQEIFSNEMAKVDDSFFHRLEESFLVEEDKKHERHPIFGNIVDEVAYHEKYPTIYHLRKKLVDSTDKADLRLIYLALAHMIKFRGHFLIEGDLNPDNSDVDKLFIQLVQTYNQLFEENPINASGVDAKAILSARLSKSRRLENLIAQLPGEKKNGLFGNLIALSLGLTPNFKSNFDLAEDAKLQLSKDTYDDDLDNLLAQIGDQYADLFLAAKNLSDAILLSDILRVNTEITKAPLSASMIKRYDEHHQDLTLLKALVRQQLPEKYKEIFFDQSKNGYAGYIDGGASQEEFYKFIKPILEKMDGTEELLVKLNREDLLRKQRTFDNGSIPHQIHLGELHAILRRQEDFYPFLKDNREKIEKILTFRIPYYVGPLARGNSRFAWMTRKSEETITPWNFEEVVDKGASAQSFIERMTNFDKNLPNEKVLPKHSLLYEYFTVYNELTKVKYVTEGMRKPAFLSGEQKKAIVDLLFKTNRKVTVKQLKEDYFKKIECFDSVEISGVEDRFNASLGTYHDLLKIIKDKDFLDNEENEDILEDIVLTLTLFEDREMIEERLKTYAHLFDDKVMKQLKRRRYTGWGRLSRKLINGIRDKQSGKTILDFLKSDGFANRNFMQLIHDDSLTFKEDIQKAQVSGQGDSLHEHIANLAGSPAIKKGILQTVKVVDELVKVMGRHKPENIVIEMARENQTTQKGQKNSRERMKRIEEGIKELGSQILKEHPVENTQLQNEKLYLYYLQNGRDMYVDQELDINRLSDYDVDHIVPQSFLKDDSIDNKVLTRSDKARGKSDNVPSEEVVKKMKNYWRQLLNAKLITQRKFDNLTKAERGGLSELDKAGFIKRQLVETRQITKHVAQILDSRMNTKYDENDKLIREVKVITLKSKLVSDFRKDFQFYKVREINNYHHAHDAYLNAVVGTALIKKYPKLESEFVYGDYKVYDVRKMIAKSEQEIGKATAKYFFYSNIMNFFKTEITLANGEIRKRPLIETNGETGEIVWDKGRDFATVRKVLSMPQVNIVKKTEVQTGGFSKESILPKRNSDKLIARKKDWDPKKYGGFDSPTVAYSVLVVAKVEKGKSKKLKSVKELLGITIMERSSFEKNPIDFLEAKGYKEVKKDLIIKLPKYSLFELENGRKRMLASAGELQKGNELALPSKYVNFLYLASHYEKLKGSPEDNEQKQLFVEQHKHYLDEIIEQISEFSKRVILADANLDKVLSAYNKHRDKPIREQAENIIHLFTLTNLGAPAAFKYFDTTIDRKRYTSTKEVLDATLIHQSITGLYETRIDLSQLGGDGGEAAAKEAAAKGGMDPLQLLQPLEAEIKGTKLKAHWNSGATITCVPQAFLEEEVPIKNIWIKTIHGEKEQPVYYLTFKIQGRKVEAEVISSPYDYILVSPSDIPWLMKKPLQLTTLVPLQEYEERLLKQTMLTGSYKEKLQSLFLKYDALWQHWENQVGHRRIKPHHIATGTVNPRPQKQYPINPKAKASIQTVINDLLKQGVLIQQNSIMNTPVYPVPKPDGKWRMVLDYREVNKTIPLIAAQNQHSAGILSSIFRGKYKTTLDLSNGFWAHSITPESYWLTAFTWLGQQYCWTRLPQGFLNSPALFNADVVDLLKEVPNVQVYVDDIYISHDDPREHLEQLEKVFSLLLNAGYVVSLKKSEIAQHEVEFLGFNITKEGRGLTETFKQKLLNITPPRDLKQLQSILGLLNFARNFIPNFSELVKPLYNIIATAPGKYITWTTDNSQQLQNIISMLNSAENLEERNPEVRLIMKVNTSPSAGYIRFYNEFAKRPIMYLNYVYTKAEVKFTNTEKLLTTIHKGLIKALDLGMGQEILVYSPIVSMTKIQKTPLPERKALPIRWITWMSYLEDPRIQFHYDKTLPELQQVPTVTDDIIAKIKHPSEFSMVFYTDGSAIKHPNVNKSHNAGMGIAQVQFKPEFTVINTWSIPLGDHTAQLAEVAAVEFACKKALKIDGPVLIVTDSFYVAESVNKELPYWQSNGFFNNKKKPLKHVSKWKSIADCIQLKPDIIIIHEKGHQPTASTFHTEGNNLADKLATQGSYVVNAGKRTADGSEFEKRTADGSEFESPKKKAKVE

SEQ ID NO: 599 - protein, 2176 aa, synthetic construct
  source 1..2176: note = Description of Artificial Sequence: Synthetic polypeptide
MPAAKRVKLDGGDKKYSIGLDIGTNSVGWAVITDEYKVPSKKFKVLGNTDRHSIKKNLIGALLFDSGETAEATRLKRTARRRYTRRKNRICYLQEIFSNEMAKVDDSFFHRLEESFLVEEDKKHERHPIFGNIVDEVAYHEKYPTIYHLRKKLVDSTDKADLRLIYLALAHMIKFRGHFLIEGDLNPDNSDVDKLFIQLVQTYNQLFEENPINASGVDAKAILSARLSKSRRLENLIAQLPGEKKNGLFGNLIALSLGLTPNFKSNFDLAEDAKLQLSKDTYDDDLDNLLAQIGDQYADLFLAAKNLSDAILLSDILRVNTEITKAPLSASMIKRYDEHHQDLTLLKALVRQQLPEKYKEIFFDQSKNGYAGYIDGGASQEEFYKFIKPILEKMDGTEELLVKLNREDLLRKQRTFDNGSIPHQIHLGELHAILRRQEDFYPFLKDNREKIEKILTFRIPYYVGPLARGNSRFAWMTRKSEETITPWNFEEVVDKGASAQSFIERMTNFDKNLPNEKVLPKHSLLYEYFTVYNELTKVKYVTEGMRKPAFLSGEQKKAIVDLLFKTNRKVTVKQLKEDYFKKIECFDSVEISGVEDRFNASLGTYHDLLKIIKDKDFLDNEENEDILEDIVLTLTLFEDREMIEERLKTYAHLFDDKVMKQLKRRRYTGWGRLSRKLINGIRDKQSGKTILDFLKSDGFANRNFMQLIHDDSLTFKEDIQKAQVSGQGDSLHEHIANLAGSPAIKKGILQTVKVVDELVKVMGRHKPENIVIEMARENQTTQKGQKNSRERMKRIEEGIKELGSQILKEHPVENTQLQNEKLYLYYLQNGRDMYVDQELDINRLSDYDVDHIVPQSFLKDDSIDNKVLTRSDKARGKSDNVPSEEVVKKMKNYWRQLLNAKLITQRKFDNLTKAERGGLSELDKAGFIKRQLVETRQITKHVAQILDSRMNTKYDENDKLIREVKVITLKSKLVSDFRKDFQFYKVREINNYHHAHDAYLNAVVGTALIKKYPKLESEFVYGDYKVYDVRKMIAKSEQEIGKATAKYFFYSNIMNFFKTEITLANGEIRKRPLIETNGETGEIVWDKGRDFATVRKVLSMPQVNIVKKTEVQTGGFSKESILPKRNSDKLIARKKDWDPKKYGGFDSPTVAYSVLVVAKVEKGKSKKLKSVKELLGITIMERSSFEKNPIDFLEAKGYKEVKKDLIIKLPKYSLFELENGRKRMLASAGELQKGNELALPSKYVNFLYLASHYEKLKGSPEDNEQKQLFVEQHKHYLDEIIEQISEFSKRVILADANLDKVLSAYNKHRDKPIREQAENIIHLFTLTNLGAPAAFKYFDTTIDRKRYTSTKEVLDATLIHQSITGLYETRIDLSQLGGDGGGSSEAAAKGGGGGMDPLQLLQPLEAEIKGTKLKAHWNSGATITCVPQAFLEEEVPIKNIWIKTIHGEKEQPVYYLTFKIQGRKVEAEVISSPYDYILVSPSDIPWLMKKPLQLTTLVPLQEYEERLLKQTMLTGSYKEKLQSLFLKYDALWQHWENQVGHRRIKPHHIATGTVNPRPQKQYPINPKAKASIQTVINDLLKQGVLIQQNSIMNTPVYPVPKPDGKWRMVLDYREVNKTIPLIAAQNQHSAGILSSIFRGKYKTTLDLSNGFWAHSITPESYWLTAFTWLGQQYCWTRLPQGFLNSPALFNADVVDLLKEVPNVQVYVDDIYISHDDPREHLEQLEKVFSLLLNAGYVVSLKKSEIAQHEVEFLGFNITKEGRGLTETFKQKLLNITPPRDLKQLQSILGLLNFARNFIPNFSELVKPLYNIIATAPGKYITWTTDNSQQLQNIISMLNSAENLEERNPEVRLIMKVNTSPSAGYIRFYNEFAKRPIMYLNYVYTKAEVKFTNTEKLLTTIHKGLIKALDLGMGQEILVYSPIVSMTKIQKTPLPERKALPIRWITWMSYLEDPRIQFHYDKTLPELQQVPTVTDDIIAKIKHPSEFSMVFYTDGSAIKHPNVNKSHNAGMGIAQVQFKPEFTVINTWSIPLGDHTAQLAEVAAVEFACKKALKIDGPVLIVTDSFYVAESVNKELPYWQSNGFFNNKKKPLKHVSKWKSIADCIQLKPDIIIIHEKGHQPTASTFHTEGNNLADKLATQGSYVVNAGKRTADGSEFEKRTADGSEFESPKKKAKVE

SEQ ID NO: 600 - protein, 2174 aa, synthetic construct
  source 1..2174: note = Description of Artificial Sequence: Synthetic polypeptide
MPAAKRVKLDGGDKKYSIGLDIGTNSVGWAVITDEYKVPSKKFKVLGNTDRHSIKKNLIGALLFDSGETAEATRLKRTARRRYTRRKNRICYLQEIFSNEMAKVDDSFFHRLEESFLVEEDKKHERHPIFGNIVDEVAYHEKYPTIYHLRKKLVDSTDKADLRLIYLALAHMIKFRGHFLIEGDLNPDNSDVDKLFIQLVQTYNQLFEENPINASGVDAKAILSARLSKSRRLENLIAQLPGEKKNGLFGNLIALSLGLTPNFKSNFDLAEDAKLQLSKDTYDDDLDNLLAQIGDQYADLFLAAKNLSDAILLSDILRVNTEITKAPLSASMIKRYDEHHQDLTLLKALVRQQLPEKYKEIFFDQSKNGYAGYIDGGASQEEFYKFIKPILEKMDGTEELLVKLNREDLLRKQRTFDNGSIPHQIHLGELHAILRRQEDFYPFLKDNREKIEKILTFRIPYYVGPLARGNSRFAWMTRKSEETITPWNFEEVVDKGASAQSFIERMTNFDKNLPNEKVLPKHSLLYEYFTVYNELTKVKYVTEGMRKPAFLSGEQKKAIVDLLFKTNRKVTVKQLKEDYFKKIECFDSVEISGVEDRFNASLGTYHDLLKIIKDKDFLDNEENEDILEDIVLTLTLFEDREMIEERLKTYAHLFDDKVMKQLKRRRYTGWGRLSRKLINGIRDKQSGKTILDFLKSDGFANRNFMQLIHDDSLTFKEDIQKAQVSGQGDSLHEHIANLAGSPAIKKGILQTVKVVDELVKVMGRHKPENIVIEMARENQTTQKGQKNSRERMKRIEEGIKELGSQILKEHPVENTQLQNEKLYLYYLQNGRDMYVDQELDINRLSDYDVDHIVPQSFLKDDSIDNKVLTRSDKARGKSDNVPSEEVVKKMKNYWRQLLNAKLITQRKFDNLTKAERGGLSELDKAGFIKRQLVETRQITKHVAQILDSRMNTKYDENDKLIREVKVITLKSKLVSDFRKDFQFYKVREINNYHHAHDAYLNAVVGTALIKKYPKLESEFVYGDYKVYDVRKMIAKSEQEIGKATAKYFFYSNIMNFFKTEITLANGEIRKRPLIETNGETGEIVWDKGRDFATVRKVLSMPQVNIVKKTEVQTGGFSKESILPKRNSDKLIARKKDWDPKKYGGFDSPTVAYSVLVVAKVEKGKSKKLKSVKELLGITIMERSSFEKNPIDFLEAKGYKEVKKDLIIKLPKYSLFELENGRKRMLASAGELQKGNELALPSKYVNFLYLASHYEKLKGSPEDNEQKQLFVEQHKHYLDEIIEQISEFSKRVILADANLDKVLSAYNKHRDKPIREQAENIIHLFTLTNLGAPAAFKYFDTTIDRKRYTSTKEVLDATLIHQSITGLYETRIDLSQLGGDGGPAPAPAPAPGGMDPLQLLQPLEAEIKGTKLKAHWNSGATITCVPQAFLEEEVPIKNIWIKTIHGEKEQPVYYLTFKIQGRKVEAEVISSPYDYILVSPSDIPWLMKKPLQLTTLVPLQEYEERLLKQTMLTGSYKEKLQSLFLKYDALWQHWENQVGHRRIKPHHIATGTVNPRPQKQYPINPKAKASIQTVINDLLKQGVLIQQNSIMNTPVYPVPKPDGKWRMVLDYREVNKTIPLIAAQNQHSAGILSSIFRGKYKTTLDLSNGFWAHSITPESYWLTAFTWLGQQYCWTRLPQGFLNSPALFNADVVDLLKEVPNVQVYVDDIYISHDDPREHLEQLEKVFSLLLNAGYVVSLKKSEIAQHEVEFLGFNITKEGRGLTETFKQKLLNITPPRDLKQLQSILGLLNFARNFIPNFSELVKPLYNIIATAPGKYITWTTDNSQQLQNIISMLNSAENLEERNPEVRLIMKVNTSPSAGYIRFYNEFAKRPIMYLNYVYTKAEVKFTNTEKLLTTIHKGLIKALDLGMGQEILVYSPIVSMTKIQKTPLPERKALPIRWITWMSYLEDPRIQFHYDKTLPELQQVPTVTDDIIAKIKHPSEFSMVFYTDGSAIKHPNVNKSHNAGMGIAQVQFKPEFTVINTWSIPLGDHTAQLAEVAAVEFACKKALKIDGPVLIVTDSFYVAESVNKELPYWQSNGFFNNKKKPLKHVSKWKSIADCIQLKPDIIIIHEKGHQPTASTFHTEGNNLADKLATQGSYVVNAGKRTADGSEFEKRTADGSEFESPKKKAKVE

SEQ ID NO: 601 - protein, 2180 aa, synthetic construct
  source 1..2180: note = Description of Artificial Sequence: Synthetic polypeptide
MPAAKRVKLDGGDKKYSIGLDIGTNSVGWAVITDEYKVPSKKFKVLGNTDRHSIKKNLIGALLFDSGETAEATRLKRTARRRYTRRKNRICYLQEIFSNEMAKVDDSFFHRLEESFLVEEDKKHERHPIFGNIVDEVAYHEKYPTIYHLRKKLVDSTDKADLRLIYLALAHMIKFRGHFLIEGDLNPDNSDVDKLFIQLVQTYNQLFEENPINASGVDAKAILSARLSKSRRLENLIAQLPGEKKNGLFGNLIALSLGLTPNFKSNFDLAEDAKLQLSKDTYDDDLDNLLAQIGDQYADLFLAAKNLSDAILLSDILRVNTEITKAPLSASMIKRYDEHHQDLTLLKALVRQQLPEKYKEIFFDQSKNGYAGYIDGGASQEEFYKFIKPILEKMDGTEELLVKLNREDLLRKQRTFDNGSIPHQIHLGELHAILRRQEDFYPFLKDNREKIEKILTFRIPYYVGPLARGNSRFAWMTRKSEETITPWNFEEVVDKGASAQSFIERMTNFDKNLPNEKVLPKHSLLYEYFTVYNELTKVKYVTEGMRKPAFLSGEQKKAIVDLLFKTNRKVTVKQLKEDYFKKIECFDSVEISGVEDRFNASLGTYHDLLKIIKDKDFLDNEENEDILEDIVLTLTLFEDREMIEERLKTYAHLFDDKVMKQLKRRRYTGWGRLSRKLINGIRDKQSGKTILDFLKSDGFANRNFMQLIHDDSLTFKEDIQKAQVSGQGDSLHEHIANLAGSPAIKKGILQTVKVVDELVKVMGRHKPENIVIEMARENQTTQKGQKNSRERMKRIEEGIKELGSQILKEHPVENTQLQNEKLYLYYLQNGRDMYVDQELDINRLSDYDVDHIVPQSFLKDDSIDNKVLTRSDKARGKSDNVPSEEVVKKMKNYWRQLLNAKLITQRKFDNLTKAERGGLSELDKAGFIKRQLVETRQITKHVAQILDSRMNTKYDENDKLIREVKVITLKSKLVSDFRKDFQFYKVREINNYHHAHDAYLNAVVGTALIKKYPKLESEFVYGDYKVYDVRKMIAKSEQEIGKATAKYFFYSNIMNFFKTEITLANGEIRKRPLIETNGETGEIVWDKGRDFATVRKVLSMPQVNIVKKTEVQTGGFSKESILPKRNSDKLIARKKDWDPKKYGGFDSPTVAYSVLVVAKVEKGKSKKLKSVKELLGITIMERSSFEKNPIDFLEAKGYKEVKKDLIIKLPKYSLFELENGRKRMLASAGELQKGNELALPSKYVNFLYLASHYEKLKGSPEDNEQKQLFVEQHKHYLDEIIEQISEFSKRVILADANLDKVLSAYNKHRDKPIREQAENIIHLFTLTNLGAPAAFKYFDTTIDRKRYTSTKEVLDATLIHQSITGLYETRIDLSQLGGDGGGGGGSGGGGSGGGGSGGMDPLQLLQPLEAEIKGTKLKAHWNSGATITCVPQAFLEEEVPIKNIWIKTIHGEKEQPVYYLTFKIQGRKVEAEVISSPYDYILVSPSDIPWLMKKPLQLTTLVPLQEYEERLLKQTMLTGSYKEKLQSLFLKYDALWQHWENQVGHRRIKPHHIATGTVNPRPQKQYPINPKAKASIQTVINDLLKQGVLIQQNSIMNTPVYPVPKPDGKWRMVLDYREVNKTIPLIAAQNQHSAGILSSIFRGKYKTTLDLSNGFWAHSITPESYWLTAFTWLGQQYCWTRLPQGFLNSPALFNADVVDLLKEVPNVQVYVDDIYISHDDPREHLEQLEKVFSLLLNAGYVVSLKKSEIAQHEVEFLGFNITKEGRGLTETFKQKLLNITPPRDLKQLQSILGLLNFARNFIPNFSELVKPLYNIIATAPGKYITWTTDNSQQLQNIISMLNSAENLEERNPEVRLIMKVNTSPSAGYIRFYNEFAKRPIMYLNYVYTKAEVKFTNTEKLLTTIHKGLIKALDLGMGQEILVYSPIVSMTKIQKTPLPERKALPIRWITWMSYLEDPRIQFHYDKTLPELQQVPTVTDDIIAKIKHPSEFSMVFYTDGSAIKHPNVNKSHNAGMGIAQVQFKPEFTVINTWSIPLGDHTAQLAEVAAVEFACKKALKIDGPVLIVTDSFYVAESVNKELPYWQSNGFFNNKKKPLKHVSKWKSIADCIQLKPDIIIIHEKGHQPTASTFHTEGNNLADKLATQGSYVVNAGKRTADGSEFEKRTADGSEFESPKKKAKVE

SEQ ID NO: 602 - protein, 2176 aa, synthetic construct
  source 1..2176: note = Description of Artificial Sequence: Synthetic polypeptide
MPAAKRVKLDGGDKKYSIGLDIGTNSVGWAVITDEYKVPSKKFKVLGNTDRHSIKKNLIGALLFDSGETAEATRLKRTARRRYTRRKNRICYLQEIFSNEMAKVDDSFFHRLEESFLVEEDKKHERHPIFGNIVDEVAYHEKYPTIYHLRKKLVDSTDKADLRLIYLALAHMIKFRGHFLIEGDLNPDNSDVDKLFIQLVQTYNQLFEENPINASGVDAKAILSARLSKSRRLENLIAQLPGEKKNGLFGNLIALSLGLTPNFKSNFDLAEDAKLQLSKDTYDDDLDNLLAQIGDQYADLFLAAKNLSDAILLSDILRVNTEITKAPLSASMIKRYDEHHQDLTLLKALVRQQLPEKYKEIFFDQSKNGYAGYIDGGASQEEFYKFIKPILEKMDGTEELLVKLNREDLLRKQRTFDNGSIPHQIHLGELHAILRRQEDFYPFLKDNREKIEKILTFRIPYYVGPLARGNSRFAWMTRKSEETITPWNFEEVVDKGASAQSFIERMTNFDKNLPNEKVLPKHSLLYEYFTVYNELTKVKYVTEGMRKPAFLSGEQKKAIVDLLFKTNRKVTVKQLKEDYFKKIECFDSVEISGVEDRFNASLGTYHDLLKIIKDKDFLDNEENEDILEDIVLTLTLFEDREMIEERLKTYAHLFDDKVMKQLKRRRYTGWGRLSRKLINGIRDKQSGKTILDFLKSDGFANRNFMQLIHDDSLTFKEDIQKAQVSGQGDSLHEHIANLAGSPAIKKGILQTVKVVDELVKVMGRHKPENIVIEMARENQTTQKGQKNSRERMKRIEEGIKELGSQILKEHPVENTQLQNEKLYLYYLQNGRDMYVDQELDINRLSDYDVDHIVPQSFLKDDSIDNKVLTRSDKARGKSDNVPSEEVVKKMKNYWRQLLNAKLITQRKFDNLTKAERGGLSELDKAGFIKRQLVETRQITKHVAQILDSRMNTKYDENDKLIREVKVITLKSKLVSDFRKDFQFYKVREINNYHHAHDAYLNAVVGTALIKKYPKLESEFVYGDYKVYDVRKMIAKSEQEIGKATAKYFFYSNIMNFFKTEITLANGEIRKRPLIETNGETGEIVWDKGRDFATVRKVLSMPQVNIVKKTEVQTGGFSKESILPKRNSDKLIARKKDWDPKKYGGFDSPTVAYSVLVVAKVEKGKSKKLKSVKELLGITIMERSSFEKNPIDFLEAKGYKEVKKDLIIKLPKYSLFELENGRKRMLASAGELQKGNELALPSKYVNFLYLASHYEKLKGSPEDNEQKQLFVEQHKHYLDEIIEQISEFSKRVILADANLDKVLSAYNKHRDKPIREQAENIIHLFTLTNLGAPAAFKYFDTTIDRKRYTSTKEVLDATLIHQSITGLYETRIDLSQLGGDGGPAPEAAAKGSSGGMDPLQLLQPLEAEIKGTKLKAHWNSGATITCVPQAFLEEEVPIKNIWIKTIHGEKEQPVYYLTFKIQGRKVEAEVISSPYDYILVSPSDIPWLMKKPLQLTTLVPLQEYEERLLKQTMLTGSYKEKLQSLFLKYDALWQHWENQVGHRRIKPHHIATGTVNPRPQKQYPINPKAKASIQTVINDLLKQGVLIQQNSIMNTPVYPVPKPDGKWRMVLDYREVNKTIPLIAAQNQHSAGILSSIFRGKYKTTLDLSNGFWAHSITPESYWLTAFTWLGQQYCWTRLPQGFLNSPALFNADVVDLLKEVPNVQVYVDDIYISHDDPREHLEQLEKVFSLLLNAGYVVSLKKSEIAQHEVEFLGFNITKEGRGLTETFKQKLLNITPPRDLKQLQSILGLLNFARNFIPNFSELVKPLYNIIATAPGKYITWTTDNSQQLQNIISMLNSAENLEERNPEVRLIMKVNTSPSAGYIRFYNEFAKRPIMYLNYVYTKAEVKFTNTEKLLTTIHKGLIKALDLGMGQEILVYSPIVSMTKIQKTPLPERKALPIRWITWMSYLEDPRIQFHYDKTLPELQQVPTVTDDIIAKIKHPSEFSMVFYTDGSAIKHPNVNKSHNAGMGIAQVQFKPEFTVINTWSIPLGDHTAQLAEVAAVEFACKKALKIDGPVLIVTDSFYVAESVNKELPYWQSNGFFNNKKKPLKHVSKWKSIADCIQLKPDIIIIHEKGHQPTASTFHTEGNNLADKLATQGSYVVNAGKRTADGSEFEKRTADGSEFESPKKKAKVE

SEQ ID NO: 603 - protein, 2173 aa, synthetic construct
  source 1..2173: note = Description of Artificial Sequence: Synthetic polypeptide
MPAAKRVKLDGGDKKYSIGLDIGTNSVGWAVITDEYKVPSKKFKVLGNTDRHSIKKNLIGALLFDSGETAEATRLKRTARRRYTRRKNRICYLQEIFSNEMAKVDDSFFHRLEESFLVEEDKKHERHPIFGNIVDEVAYHEKYPTIYHLRKKLVDSTDKADLRLIYLALAHMIKFRGHFLIEGDLNPDNSDVDKLFIQLVQTYNQLFEENPINASGVDAKAILSARLSKSRRLENLIAQLPGEKKNGLFGNLIALSLGLTPNFKSNFDLAEDAKLQLSKDTYDDDLDNLLAQIGDQYADLFLAAKNLSDAILLSDILRVNTEITKAPLSASMIKRYDEHHQDLTLLKALVRQQLPEKYKEIFFDQSKNGYAGYIDGGASQEEFYKFIKPILEKMDGTEELLVKLNREDLLRKQRTFDNGSIPHQIHLGELHAILRRQEDFYPFLKDNREKIEKILTFRIPYYVGPLARGNSRFAWMTRKSEETITPWNFEEVVDKGASAQSFIERMTNFDKNLPNEKVLPKHSLLYEYFTVYNELTKVKYVTEGMRKPAFLSGEQKKAIVDLLFKTNRKVTVKQLKEDYFKKIECFDSVEISGVEDRFNASLGTYHDLLKIIKDKDFLDNEENEDILEDIVLTLTLFEDREMIEERLKTYAHLFDDKVMKQLKRRRYTGWGRLSRKLINGIRDKQSGKTILDFLKSDGFANRNFMQLIHDDSLTFKEDIQKAQVSGQGDSLHEHIANLAGSPAIKKGILQTVKVVDELVKVMGRHKPENIVIEMARENQTTQKGQKNSRERMKRIEEGIKELGSQILKEHPVENTQLQNEKLYLYYLQNGRDMYVDQELDINRLSDYDVDHIVPQSFLKDDSIDNKVLTRSDKARGKSDNVPSEEVVKKMKNYWRQLLNAKLITQRKFDNLTKAERGGLSELDKAGFIKRQLVETRQITKHVAQILDSRMNTKYDENDKLIREVKVITLKSKLVSDFRKDFQFYKVREINNYHHAHDAYLNAVVGTALIKKYPKLESEFVYGDYKVYDVRKMIAKSEQEIGKATAKYFFYSNIMNFFKTEITLANGEIRKRPLIETNGETGEIVWDKGRDFATVRKVLSMPQVNIVKKTEVQTGGFSKESILPKRNSDKLIARKKDWDPKKYGGFDSPTVAYSVLVVAKVEKGKSKKLKSVKELLGITIMERSSFEKNPIDFLEAKGYKEVKKDLIIKLPKYSLFELENGRKRMLASAGELQKGNELALPSKYVNFLYLASHYEKLKGSPEDNEQKQLFVEQHKHYLDEIIEQISEFSKRVILADANLDKVLSAYNKHRDKPIREQAENIIHLFTLTNLGAPAAFKYFDTTIDRKRYTSTKEVLDATLIHQSITGLYETRIDLSQLGGDGGGSSEAAAKGGMDPLQLLQPLEAEIKGTKLKAHWNSGATITCVPQAFLEEEVPIKNIWIKTIHGEKEQPVYYLTFKIQGRKVEAEVISSPYDYILVSPSDIPWLMKKPLQLTTLVPLQEYEERLLKQTMLTGSYKEKLQSLFLKYDALWQHWENQVGHRRIKPHHIATGTVNPRPQKQYPINPKAKASIQTVINDLLKQGVLIQQNSIMNTPVYPVPKPDGKWRMVLDYREVNKTIPLIAAQNQHSAGILSSIFRGKYKTTLDLSNGFWAHSITPESYWLTAFTWLGQQYCWTRLPQGFLNSPALFNADVVDLLKEVPNVQVYVDDIYISHDDPREHLEQLEKVFSLLLNAGYVVSLKKSEIAQHEVEFLGFNITKEGRGLTETFKQKLLNITPPRDLKQLQSILGLLNFARNFIPNFSELVKPLYNIIATAPGKYITWTTDNSQQLQNIISMLNSAENLEERNPEVRLIMKVNTSPSAGYIRFYNEFAKRPIMYLNYVYTKAEVKFTNTEKLLTTIHKGLIKALDLGMGQEILVYSPIVSMTKIQKTPLPERKALPIRWITWMSYLEDPRIQFHYDKTLPELQQVPTVTDDIIAKIKHPSEFSMVFYTDGSAIKHPNVNKSHNAGMGIAQVQFKPEFTVINTWSIPLGDHTAQLAEVAAVEFACKKALKIDGPVLIVTDSFYVAESVNKELPYWQSNGFFNNKKKPLKHVSKWKSIADCIQLKPDIIIIHEKGHQPTASTFHTEGNNLADKLATQGSYVVNAGKRTADGSEFEKRTADGSEFESPKKKAKVE

SEQ ID NO: 604 - protein, 2183 aa, synthetic construct
  source 1..2183: note = Description of Artificial Sequence: Synthetic polypeptide
MPAAKRVKLDGGDKKYSIGLDIGTNSVGWAVITDEYKVPSKKFKVLGNTDRHSIKKNLIGALLFDSGETAEATRLKRTARRRYTRRKNRICYLQEIFSNEMAKVDDSFFHRLEESFLVEEDKKHERHPIFGNIVDEVAYHEKYPTIYHLRKKLVDSTDKADLRLIYLALAHMIKFRGHFLIEGDLNPDNSDVDKLFIQLVQTYNQLFEENPINASGVDAKAILSARLSKSRRLENLIAQLPGEKKNGLFGNLIALSLGLTPNFKSNFDLAEDAKLQLSKDTYDDDLDNLLAQIGDQYADLFLAAKNLSDAILLSDILRVNTEITKAPLSASMIKRYDEHHQDLTLLKALVRQQLPEKYKEIFFDQSKNGYAGYIDGGASQEEFYKFIKPILEKMDGTEELLVKLNREDLLRKQRTFDNGSIPHQIHLGELHAILRRQEDFYPFLKDNREKIEKILTFRIPYYVGPLARGNSRFAWMTRKSEETITPWNFEEVVDKGASAQSFIERMTNFDKNLPNEKVLPKHSLLYEYFTVYNELTKVKYVTEGMRKPAFLSGEQKKAIVDLLFKTNRKVTVKQLKEDYFKKIECFDSVEISGVEDRFNASLGTYHDLLKIIKDKDFLDNEENEDILEDIVLTLTLFEDREMIEERLKTYAHLFDDKVMKQLKRRRYTGWGRLSRKLINGIRDKQSGKTILDFLKSDGFANRNFMQLIHDDSLTFKEDIQKAQVSGQGDSLHEHIANLAGSPAIKKGILQTVKVVDELVKVMGRHKPENIVIEMARENQTTQKGQKNSRERMKRIEEGIKELGSQILKEHPVENTQLQNEKLYLYYLQNGRDMYVDQELDINRLSDYDVDHIVPQSFLKDDSIDNKVLTRSDKARGKSDNVPSEEVVKKMKNYWRQLLNAKLITQRKFDNLTKAERGGLSELDKAGFIKRQLVETRQITKHVAQILDSRMNTKYDENDKLIREVKVITLKSKLVSDFRKDFQFYKVREINNYHHAHDAYLNAVVGTALIKKYPKLESEFVYGDYKVYDVRKMIAKSEQEIGKATAKYFFYSNIMNFFKTEITLANGEIRKRPLIETNGETGEIVWDKGRDFATVRKVLSMPQVNIVKKTEVQTGGFSKESILPKRNSDKLIARKKDWDPKKYGGFDSPTVAYSVLVVAKVEKGKSKKLKSVKELLGITIMERSSFEKNPIDFLEAKGYKEVKKDLIIKLPKYSLFELENGRKRMLASAGELQKGNELALPSKYVNFLYLASHYEKLKGSPEDNEQKQLFVEQHKHYLDEIIEQISEFSKRVILADANLDKVLSAYNKHRDKPIREQAENIIHLFTLTNLGAPAAFKYFDTTIDRKRYTSTKEVLDATLIHQSITGLYETRIDLSQLGGDGGGGSGGSGGSGGSGGSGGSGGMDPLQLLQPLEAEIKGTKLKAHWNSGATITCVPQAFLEEEVPIKNIWIKTIHGEKEQPVYYLTFKIQGRKVEAEVISSPYDYILVSPSDIPWLMKKPLQLTTLVPLQEYEERLLKQTMLTGSYKEKLQSLFLKYDALWQHWENQVGHRRIKPHHIATGTVNPRPQKQYPINPKAKASIQTVINDLLKQGVLIQQNSIMNTPVYPVPKPDGKWRMVLDYREVNKTIPLIAAQNQHSAGILSSIFRGKYKTTLDLSNGFWAHSITPESYWLTAFTWLGQQYCWTRLPQGFLNSPALFNADVVDLLKEVPNVQVYVDDIYISHDDPREHLEQLEKVFSLLLNAGYVVSLKKSEIAQHEVEFLGFNITKEGRGLTETFKQKLLNITPPRDLKQLQSILGLLNFARNFIPNFSELVKPLYNIIATAPGKYITWTTDNSQQLQNIISMLNSAENLEERNPEVRLIMKVNTSPSAGYIRFYNEFAKRPIMYLNYVYTKAEVKFTNTEKLLTTIHKGLIKALDLGMGQEILVYSPIVSMTKIQKTPLPERKALPIRWITWMSYLEDPRIQFHYDKTLPELQQVPTVTDDIIAKIKHPSEFSMVFYTDGSAIKHPNVNKSHNAGMGIAQVQFKPEFTVINTWSIPLGDHTAQLAEVAAVEFACKKALKIDGPVLIVTDSFYVAESVNKELPYWQSNGFFNNKKKPLKHVSKWKSIADCIQLKPDIIIIHEKGHQPTASTFHTEGNNLADKLATQGSYVVNAGKRTADGSEFEKRTADGSEFESPKKKAKVE

SEQ ID NO: 605 - protein, 2171 aa, synthetic construct
  source 1..2171: note = Description of Artificial Sequence: Synthetic polypeptide
MPAAKRVKLDGGDKKYSIGLDIGTNSVGWAVITDEYKVPSKKFKVLGNTDRHSIKKNLIGALLFDSGETAEATRLKRTARRRYTRRKNRICYLQEIFSNEMAKVDDSFFHRLEESFLVEEDKKHERHPIFGNIVDEVAYHEKYPTIYHLRKKLVDSTDKADLRLIYLALAHMIKFRGHFLIEGDLNPDNSDVDKLFIQLVQTYNQLFEENPINASGVDAKAILSARLSKSRRLENLIAQLPGEKKNGLFGNLIALSLGLTPNFKSNFDLAEDAKLQLSKDTYDDDLDNLLAQIGDQYADLFLAAKNLSDAILLSDILRVNTEITKAPLSASMIKRYDEHHQDLTLLKALVRQQLPEKYKEIFFDQSKNGYAGYIDGGASQEEFYKFIKPILEKMDGTEELLVKLNREDLLRKQRTFDNGSIPHQIHLGELHAILRRQEDFYPFLKDNREKIEKILTFRIPYYVGPLARGNSRFAWMTRKSEETITPWNFEEVVDKGASAQSFIERMTNFDKNLPNEKVLPKHSLLYEYFTVYNELTKVKYVTEGMRKPAFLSGEQKKAIVDLLFKTNRKVTVKQLKEDYFKKIECFDSVEISGVEDRFNASLGTYHDLLKIIKDKDFLDNEENEDILEDIVLTLTLFEDREMIEERLKTYAHLFDDKVMKQLKRRRYTGWGRLSRKLINGIRDKQSGKTILDFLKSDGFANRNFMQLIHDDSLTFKEDIQKAQVSGQGDSLHEHIANLAGSPAIKKGILQTVKVVDELVKVMGRHKPENIVIEMARENQTTQKGQKNSRERMKRIEEGIKELGSQILKEHPVENTQLQNEKLYLYYLQNGRDMYVDQELDINRLSDYDVDHIVPQSFLKDDSIDNKVLTRSDKARGKSDNVPSEEVVKKMKNYWRQLLNAKLITQRKFDNLTKAERGGLSELDKAGFIKRQLVETRQITKHVAQILDSRMNTKYDENDKLIREVKVITLKSKLVSDFRKDFQFYKVREINNYHHAHDAYLNAVVGTALIKKYPKLESEFVYGDYKVYDVRKMIAKSEQEIGKATAKYFFYSNIMNFFKTEITLANGEIRKRPLIETNGETGEIVWDKGRDFATVRKVLSMPQVNIVKKTEVQTGGFSKESILPKRNSDKLIARKKDWDPKKYGGFDSPTVAYSVLVVAKVEKGKSKKLKSVKELLGITIMERSSFEKNPIDFLEAKGYKEVKKDLIIKLPKYSLFELENGRKRMLASAGELQKGNELALPSKYVNFLYLASHYEKLKGSPEDNEQKQLFVEQHKHYLDEIIEQISEFSKRVILADANLDKVLSAYNKHRDKPIREQAENIIHLFTLTNLGAPAAFKYFDTTIDRKRYTSTKEVLDATLIHQSITGLYETRIDLSQLGGDGGGGGGSSGGMDPLQLLQPLEAEIKGTKLKAHWNSGATITCVPQAFLEEEVPIKNIWIKTIHGEKEQPVYYLTFKIQGRKVEAEVISSPYDYILVSPSDIPWLMKKPLQLTTLVPLQEYEERLLKQTMLTGSYKEKLQSLFLKYDALWQHWENQVGHRRIKPHHIATGTVNPRPQKQYPINPKAKASIQTVINDLLKQGVLIQQNSIMNTPVYPVPKPDGKWRMVLDYREVNKTIPLIAAQNQHSAGILSSIFRGKYKTTLDLSNGFWAHSITPESYWLTAFTWLGQQYCWTRLPQGFLNSPALFNADVVDLLKEVPNVQVYVDDIYISHDDPREHLEQLEKVFSLLLNAGYVVSLKKSEIAQHEVEFLGFNITKEGRGLTETFKQKLLNITPPRDLKQLQSILGLLNFARNFIPNFSELVKPLYNIIATAPGKYITWTTDNSQQLQNIISMLNSAENLEERNPEVRLIMKVNTSPSAGYIRFYNEFAKRPIMYLNYVYTKAEVKFTNTEKLLTTIHKGLIKALDLGMGQEILVYSPIVSMTKIQKTPLPERKALPIRWITWMSYLEDPRIQFHYDKTLPELQQVPTVTDDIIAKIKHPSEFSMVFYTDGSAIKHPNVNKSHNAGMGIAQVQFKPEFTVINTWSIPLGDHTAQLAEVAAVEFACKKALKIDGPVLIVTDSFYVAESVNKELPYWQSNGFFNNKKKPLKHVSKWKSIADCIQLKPDIIIIHEKGHQPTASTFHTEGNNLADKLATQGSYVVNAGKRTADGSEFEKRTADGSEFESPKKKAKVE

SEQ ID NO: 606 - protein, 2174 aa, synthetic construct
  source 1..2174: note = Description of Artificial Sequence: Synthetic polypeptide
MPAAKRVKLDGGDKKYSIGLDIGTNSVGWAVITDEYKVPSKKFKVLGNTDRHSIKKNLIGALLFDSGETAEATRLKRTARRRYTRRKNRICYLQEIFSNEMAKVDDSFFHRLEESFLVEEDKKHERHPIFGNIVDEVAYHEKYPTIYHLRKKLVDSTDKADLRLIYLALAHMIKFRGHFLIEGDLNPDNSDVDKLFIQLVQTYNQLFEENPINASGVDAKAILSARLSKSRRLENLIAQLPGEKKNGLFGNLIALSLGLTPNFKSNFDLAEDAKLQLSKDTYDDDLDNLLAQIGDQYADLFLAAKNLSDAILLSDILRVNTEITKAPLSASMIKRYDEHHQDLTLLKALVRQQLPEKYKEIFFDQSKNGYAGYIDGGASQEEFYKFIKPILEKMDGTEELLVKLNREDLLRKQRTFDNGSIPHQIHLGELHAILRRQEDFYPFLKDNREKIEKILTFRIPYYVGPLARGNSRFAWMTRKSEETITPWNFEEVVDKGASAQSFIERMTNFDKNLPNEKVLPKHSLLYEYFTVYNELTKVKYVTEGMRKPAFLSGEQKKAIVDLLFKTNRKVTVKQLKEDYFKKIECFDSVEISGVEDRFNASLGTYHDLLKIIKDKDFLDNEENEDILEDIVLTLTLFEDREMIEERLKTYAHLFDDKVMKQLKRRRYTGWGRLSRKLINGIRDKQSGKTILDFLKSDGFANRNFMQLIHDDSLTFKEDIQKAQVSGQGDSLHEHIANLAGSPAIKKGILQTVKVVDELVKVMGRHKPENIVIEMARENQTTQKGQKNSRERMKRIEEGIKELGSQILKEHPVENTQLQNEKLYLYYLQNGRDMYVDQELDINRLSDYDVDHIVPQSFLKDDSIDNKVLTRSDKARGKSDNVPSEEVVKKMKNYWRQLLNAKLITQRKFDNLTKAERGGLSELDKAGFIKRQLVETRQITKHVAQILDSRMNTKYDENDKLIREVKVITLKSKLVSDFRKDFQFYKVREINNYHHAHDAYLNAVVGTALIKKYPKLESEFVYGDYKVYDVRKMIAKSEQEIGKATAKYFFYSNIMNFFKTEITLANGEIRKRPLIETNGETGEIVWDKGRDFATVRKVLSMPQVNIVKKTEVQTGGFSKESILPKRNSDKLIARKKDWDPKKYGGFDSPTVAYSVLVVAKVEKGKSKKLKSVKELLGITIMERSSFEKNPIDFLEAKGYKEVKKDLIIKLPKYSLFELENGRKRMLASAGELQKGNELALPSKYVNFLYLASHYEKLKGSPEDNEQKQLFVEQHKHYLDEIIEQISEFSKRVILADANLDKVLSAYNKHRDKPIREQAENIIHLFTLTNLGAPAAFKYFDTTIDRKRYTSTKEVLDATLIHQSITGLYETRIDLSQLGGDGGGGSGGSGGSGGMDPLQLLQPLEAEIKGTKLKAHWNSGATITCVPQAFLEEEVPIKNIWIKTIHGEKEQPVYYLTFKIQGRKVEAEVISSPYDYILVSPSDIPWLMKKPLQLTTLVPLQEYEERLLKQTMLTGSYKEKLQSLFLKYDALWQHWENQVGHRRIKPHHIATGTVNPRPQKQYPINPKAKASIQTVINDLLKQGVLIQQNSIMNTPVYPVPKPDGKWRMVLDYREVNKTIPLIAAQNQHSAGILSSIFRGKYKTTLDLSNGFWAHSITPESYWLTAFTWLGQQYCWTRLPQGFLNSPALFNADVVDLLKEVPNVQVYVDDIYISHDDPREHLEQLEKVFSLLLNAGYVVSLKKSEIAQHEVEFLGFNITKEGRGLTETFKQKLLNITPPRDLKQLQSILGLLNFARNFIPNFSELVKPLYNIIATAPGKYITWTTDNSQQLQNIISMLNSAENLEERNPEVRLIMKVNTSPSAGYIRFYNEFAKRPIMYLNYVYTKAEVKFTNTEKLLTTIHKGLIKALDLGMGQEILVYSPIVSMTKIQKTPLPERKALPIRWITWMSYLEDPRIQFHYDKTLPELQQVPTVTDDIIAKIKHPSEFSMVFYTDGSAIKHPNVNKSHNAGMGIAQVQFKPEFTVINTWSIPLGDHTAQLAEVAAVEFACKKALKIDGPVLIVTDSFYVAESVNKELPYWQSNGFFNNKKKPLKHVSKWKSIADCIQLKPDIIIIHEKGHQPTASTFHTEGNNLADKLATQGSYVVNAGKRTADGSEFEKRTADGSEFESPKKKAKVE

SEQ ID NO: 607 - protein, 2173 aa, synthetic construct
  source 1..2173: note = Description of Artificial Sequence: Synthetic polypeptide
MPAAKRVKLDGGDKKYSIGLDIGTNSVGWAVITDEYKVPSKKFKVLGNTDRHSIKKNLIGALLFDSGETAEATRLKRTARRRYTRRKNRICYLQEIFSNEMAKVDDSFFHRLEESFLVEEDKKHERHPIFGNIVDEVAYHEKYPTIYHLRKKLVDSTDKADLRLIYLALAHMIKFRGHFLIEGDLNPDNSDVDKLFIQLVQTYNQLFEENPINASGVDAKAILSARLSKSRRLENLIAQLPGEKKNGLFGNLIALSLGLTPNFKSNFDLAEDAKLQLSKDTYDDDLDNLLAQIGDQYADLFLAAKNLSDAILLSDILRVNTEITKAPLSASMIKRYDEHHQDLTLLKALVRQQLPEKYKEIFFDQSKNGYAGYIDGGASQEEFYKFIKPILEKMDGTEELLVKLNREDLLRKQRTFDNGSIPHQIHLGELHAILRRQEDFYPFLKDNREKIEKILTFRIPYYVGPLARGNSRFAWMTRKSEETITPWNFEEVVDKGASAQSFIERMTNFDKNLPNEKVLPKHSLLYEYFTVYNELTKVKYVTEGMRKPAFLSGEQKKAIVDLLFKTNRKVTVKQLKEDYFKKIECFDSVEISGVEDRFNASLGTYHDLLKIIKDKDFLDNEENEDILEDIVLTLTLFEDREMIEERLKTYAHLFDDKVMKQLKRRRYTGWGRLSRKLINGIRDKQSGKTILDFLKSDGFANRNFMQLIHDDSLTFKEDIQKAQVSGQGDSLHEHIANLAGSPAIKKGILQTVKVVDELVKVMGRHKPENIVIEMARENQTTQKGQKNSRERMKRIEEGIKELGSQILKEHPVENTQLQNEKLYLYYLQNGRDMYVDQELDINRLSDYDVDHIVPQSFLKDDSIDNKVLTRSDKARGKSDNVPSEEVVKKMKNYWRQLLNAKLITQRKFDNLTKAERGGLSELDKAGFIKRQLVETRQITKHVAQILDSRMNTKYDENDKLIREVKVITLKSKLVSDFRKDFQFYKVREINNYHHAHDAYLNAVVGTALIKKYPKLESEFVYGDYKVYDVRKMIAKSEQEIGKATAKYFFYSNIMNFFKTEITLANGEIRKRPLIETNGETGEIVWDKGRDFATVRKVLSMPQVNIVKKTEVQTGGFSKESILPKRNSDKLIARKKDWDPKKYGGFDSPTVAYSVLVVAKVEKGKSKKLKSVKELLGITIMERSSFEKNPIDFLEAKGYKEVKKDLIIKLPKYSLFELENGRKRMLASAGELQKGNELALPSKYVNFLYLASHYEKLKGSPEDNEQKQLFVEQHKHYLDEIIEQISEFSKRVILADANLDKVLSAYNKHRDKPIREQAENIIHLFTLTNLGAPAAFKYFDTTIDRKRYTSTKEVLDATLIHQSITGLYETRIDLSQLGGDGGGGSEAAAKGGMDPLQLLQPLEAEIKGTKLKAHWNSGATITCVPQAFLEEEVPIKNIWIKTIHGEKEQPVYYLTFKIQGRKVEAEVISSPYDYILVSPSDIPWLMKKPLQLTTLVPLQEYEERLLKQTMLTGSYKEKLQSLFLKYDALWQHWENQVGHRRIKPHHIATGTVNPRPQKQYPINPKAKASIQTVINDLLKQGVLIQQNSIMNTPVYPVPKPDGKWRMVLDYREVNKTIPLIAAQNQHSAGILSSIFRGKYKTTLDLSNGFWAHSITPESYWLTAFTWLGQQYCWTRLPQGFLNSPALFNADVVDLLKEVPNVQVYVDDIYISHDDPREHLEQLEKVFSLLLNAGYVVSLKKSEIAQHEVEFLGFNITKEGRGLTETFKQKLLNITPPRDLKQLQSILGLLNFARNFIPNFSELVKPLYNIIATAPGKYITWTTDNSQQLQNIISMLNSAENLEERNPEVRLIMKVNTSPSAGYIRFYNEFAKRPIMYLNYVYTKAEVKFTNTEKLLTTIHKGLIKALDLGMGQEILVYSPIVSMTKIQKTPLPERKALPIRWITWMSYLEDPRIQFHYDKTLPELQQVPTVTDDIIAKIKHPSEFSMVFYTDGSAIKHPNVNKSHNAGMGIAQVQFKPEFTVINTWSIPLGDHTAQLAEVAAVEFACKKALKIDGPVLIVTDSFYVAESVNKELPYWQSNGFFNNKKKPLKHVSKWKSIADCIQLKPDIIIIHEKGHQPTASTFHTEGNNLADKLATQGSYVVNAGKRTADGSEFEKRTADGSEFESPKKKAKVE

SEQ ID NO: 608 - protein, 2170 aa, synthetic construct
  source 1..2170: note = Description of Artificial Sequence: Synthetic polypeptide
MPAAKRVKLDGGDKKYSIGLDIGTNSVGWAVITDEYKVPSKKFKVLGNTDRHSIKKNLIGALLFDSGETAEATRLKRTARRRYTRRKNRICYLQEIFSNEMAKVDDSFFHRLEESFLVEEDKKHERHPIFGNIVDEVAYHEKYPTIYHLRKKLVDSTDKADLRLIYLALAHMIKFRGHFLIEGDLNPDNSDVDKLFIQLVQTYNQLFEENPINASGVDAKAILSARLSKSRRLENLIAQLPGEKKNGLFGNLIALSLGLTPNFKSNFDLAEDAKLQLSKDTYDDDLDNLLAQIGDQYADLFLAAKNLSDAILLSDILRVNTEITKAPLSASMIKRYDEHHQDLTLLKALVRQQLPEKYKEIFFDQSKNGYAGYIDGGASQEEFYKFIKPILEKMDGTEELLVKLNREDLLRKQRTFDNGSIPHQIHLGELHAILRRQEDFYPFLKDNREKIEKILTFRIPYYVGPLARGNSRFAWMTRKSEETITPWNFEEVVDKGASAQSFIERMTNFDKNLPNEKVLPKHSLLYEYFTVYNELTKVKYVTEGMRKPAFLSGEQKKAIVDLLFKTNRKVTVKQLKEDYFKKIECFDSVEISGVEDRFNASLGTYHDLLKIIKDKDFLDNEENEDILEDIVLTLTLFEDREMIEERLKTYAHLFDDKVMKQLKRRRYTGWGRLSRKLINGIRDKQSGKTILDFLKSDGFANRNFMQLIHDDSLTFKEDIQKAQVSGQGDSLHEHIANLAGSPAIKKGILQTVKVVDELVKVMGRHKPENIVIEMARENQTTQKGQKNSRERMKRIEEGIKELGSQILKEHPVENTQLQNEKLYLYYLQNGRDMYVDQELDINRLSDYDVDHIVPQSFLKDDSIDNKVLTRSDKARGKSDNVPSEEVVKKMKNYWRQLLNAKLITQRKFDNLTKAERGGLSELDKAGFIKRQLVETRQITKHVAQILDSRMNTKYDENDKLIREVKVITLKSKLVSDFRKDFQFYKVREINNYHHAHDAYLNAVVGTALIKKYPKLESEFVYGDYKVYDVRKMIAKSEQEIGKATAKYFFYSNIMNFFKTEITLANGEIRKRPLIETNGETGEIVWDKGRDFATVRKVLSMPQVNIVKKTEVQTGGFSKESILPKRNSDKLIARKKDWDPKKYGGFDSPTVAYSVLVVAKVEKGKSKKLKSVKELLGITIMERSSFEKNPIDFLEAKGYKEVKKDLIIKLPKYSLFELENGRKRMLASAGELQKGNELALPSKYVNFLYLASHYEKLKGSPEDNEQKQLFVEQHKHYLDEIIEQISEFSKRVILADANLDKVLSAYNKHRDKPIREQAENIIHLFTLTNLGAPAAFKYFDTTIDRKRYTSTKEVLDATLIHQSITGLYETRIDLSQLGGDGGEAAAKGGMDPLQLLQPLEAEIKGTKLKAHWNSGATITCVPQAFLEEEVPIKNIWIKTIHGEKEQPVYYLTFKIQGRKVEAEVISSPYDYILVSPSDIPWLMKKPLQLTTLVPLQEYEERLLKQTMLTGSYKEKLQSLFLKYDALWQHWENQVGHRRIKPHHIATGTVNPRPQKQYPINPKAKASIQTVINDLLKQGVLIQQNSIMNTPVYPVPKPDGKWRMVLDYREVNKTIPLIAAQNQHSAGILSSIFRGKYKTTLDLSNGFWAHSITPESYWLTAFTWLGQQYCWTRLPQGFLNSPALFNADVVDLLKEVPNVQVYVDDIYISHDDPREHLEQLEKVFSLLLNAGYVVSLKKSEIAQHEVEFLGFNITKEGRGLTETFKQKLLNITPPRDLKQLQSILGLLNFARNFIPNFSELVKPLYNIIATAPGKYITWTTDNSQQLQNIISMLNSAENLEERNPEVRLIMKVNTSPSAGYIRFYNEFAKRPIMYLNYVYTKAEVKFTNTEKLLTTIHKGLIKALDLGMGQEILVYSPIVSMTKIQKTPLPERKALPIRWITWMSYLEDPRIQFHYDKTLPELQQVPTVTDDIIAKIKHPSEFSMVFYTDGSAIKHPNVNKSHNAGMGIAQVQFKPEFTVINTWSIPLGDHTAQLAEVAAVEFACKKALKIDGPVLIVTDSFYVAESVNKELPYWQSNGFFNNKKKPLKHVSKWKSIADCIQLKPDIIIIHEKGHQPTASTFHTEGNNLADKLATQGSYVVNAGKRTADGSEFEKRTADGSEFESPKKKAKVE

SEQ ID NO: 609 - protein, 2174 aa, synthetic construct
  source 1..2174: note = Description of Artificial Sequence: Synthetic polypeptide
MPAAKRVKLDGGDKKYSIGLDIGTNSVGWAVITDEYKVPSKKFKVLGNTDRHSIKKNLIGALLFDSGETAEATRLKRTARRRYTRRKNRICYLQEIFSNEMAKVDDSFFHRLEESFLVEEDKKHERHPIFGNIVDEVAYHEKYPTIYHLRKKLVDSTDKADLRLIYLALAHMIKFRGHFLIEGDLNPDNSDVDKLFIQLVQTYNQLFEENPINASGVDAKAILSARLSKSRRLENLIAQLPGEKKNGLFGNLIALSLGLTPNFKSNFDLAEDAKLQLSKDTYDDDLDNLLAQIGDQYADLFLAAKNLSDAILLSDILRVNTEITKAPLSASMIKRYDEHHQDLTLLKALVRQQLPEKYKEIFFDQSKNGYAGYIDGGASQEEFYKFIKPILEKMDGTEELLVKLNREDLLRKQRTFDNGSIPHQIHLGELHAILRRQEDFYPFLKDNREKIEKILTFRIPYYVGPLARGNSRFAWMTRKSEETITPWNFEEVVDKGASAQSFIERMTNFDKNLPNEKVLPKHSLLYEYFTVYNELTKVKYVTEGMRKPAFLSGEQKKAIVDLLFKTNRKVTVKQLKEDYFKKIECFDSVEISGVEDRFNASLGTYHDLLKIIKDKDFLDNEENEDILEDIVLTLTLFEDREMIEERLKTYAHLFDDKVMKQLKRRRYTGWGRLSRKLINGIRDKQSGKTILDFLKSDGFANRNFMQLIHDDSLTFKEDIQKAQVSGQGDSLHEHIANLAGSPAIKKGILQTVKVVDELVKVMGRHKPENIVIEMARENQTTQKGQKNSRERMKRIEEGIKELGSQILKEHPVENTQLQNEKLYLYYLQNGRDMYVDQELDINRLSDYDVDHIVPQSFLKDDSIDNKVLTRSDKARGKSDNVPSEEVVKKMKNYWRQLLNAKLITQRKFDNLTKAERGGLSELDKAGFIKRQLVETRQITKHVAQILDSRMNTKYDENDKLIREVKVITLKSKLVSDFRKDFQFYKVREINNYHHAHDAYLNAVVGTALIKKYPKLESEFVYGDYKVYDVRKMIAKSEQEIGKATAKYFFYSNIMNFFKTEITLANGEIRKRPLIETNGETGEIVWDKGRDFATVRKVLSMPQVNIVKKTEVQTGGFSKESILPKRNSDKLIARKKDWDPKKYGGFDSPTVAYSVLVVAKVEKGKSKKLKSVKELLGITIMERSSFEKNPIDFLEAKGYKEVKKDLIIKLPKYSLFELENGRKRMLASAGELQKGNELALPSKYVNFLYLASHYEKLKGSPEDNEQKQLFVEQHKHYLDEIIEQISEFSKRVILADANLDKVLSAYNKHRDKPIREQAENIIHLFTLTNLGAPAAFKYFDTTIDRKRYTSTKEVLDATLIHQSITGLYETRIDLSQLGGDGGGGSPAPGSSGGMDPLQLLQPLEAEIKGTKLKAHWNSGATITCVPQAFLEEEVPIKNIWIKTIHGEKEQPVYYLTFKIQGRKVEAEVISSPYDYILVSPSDIPWLMKKPLQLTTLVPLQEYEERLLKQTMLTGSYKEKLQSLFLKYDALWQHWENQVGHRRIKPHHIATGTVNPRPQKQYPINPKAKASIQTVINDLLKQGVLIQQNSIMNTPVYPVPKPDGKWRMVLDYREVNKTIPLIAAQNQHSAGILSSIFRGKYKTTLDLSNGFWAHSITPESYWLTAFTWLGQQYCWTRLPQGFLNSPALFNADVVDLLKEVPNVQVYVDDIYISHDDPREHLEQLEKVFSLLLNAGYVVSLKKSEIAQHEVEFLGFNITKEGRGLTETFKQKLLNITPPRDLKQLQSILGLLNFARNFIPNFSELVKPLYNIIATAPGKYITWTTDNSQQLQNIISMLNSAENLEERNPEVRLIMKVNTSPSAGYIRFYNEFAKRPIMYLNYVYTKAEVKFTNTEKLLTTIHKGLIKALDLGMGQEILVYSPIVSMTKIQKTPLPERKALPIRWITWMSYLEDPRIQFHYDKTLPELQQVPTVTDDIIAKIKHPSEFSMVFYTDGSAIKHPNVNKSHNAGMGIAQVQFKPEFTVINTWSIPLGDHTAQLAEVAAVEFACKKALKIDGPVLIVTDSFYVAESVNKELPYWQSNGFFNNKKKPLKHVSKWKSIADCIQLKPDIIIIHEKGHQPTASTFHTEGNNLADKLATQGSYVVNAGKRTADGSEFEKRTADGSEFESPKKKAKVE

SEQ ID NO: 610 - protein, 2174 aa, synthetic construct
  source 1..2174: note = Description of Artificial Sequence: Synthetic polypeptide
MPAAKRVKLDGGDKKYSIGLDIGTNSVGWAVITDEYKVPSKKFKVLGNTDRHSIKKNLIGALLFDSGETAEATRLKRTARRRYTRRKNRICYLQEIFSNEMAKVDDSFFHRLEESFLVEEDKKHERHPIFGNIVDEVAYHEKYPTIYHLRKKLVDSTDKADLRLIYLALAHMIKFRGHFLIEGDLNPDNSDVDKLFIQLVQTYNQLFEENPINASGVDAKAILSARLSKSRRLENLIAQLPGEKKNGLFGNLIALSLGLTPNFKSNFDLAEDAKLQLSKDTYDDDLDNLLAQIGDQYADLFLAAKNLSDAILLSDILRVNTEITKAPLSASMIKRYDEHHQDLTLLKALVRQQLPEKYKEIFFDQSKNGYAGYIDGGASQEEFYKFIKPILEKMDGTEELLVKLNREDLLRKQRTFDNGSIPHQIHLGELHAILRRQEDFYPFLKDNREKIEKILTFRIPYYVGPLARGNSRFAWMTRKSEETITPWNFEEVVDKGASAQSFIERMTNFDKNLPNEKVLPKHSLLYEYFTVYNELTKVKYVTEGMRKPAFLSGEQKKAIVDLLFKTNRKVTVKQLKEDYFKKIECFDSVEISGVEDRFNASLGTYHDLLKIIKDKDFLDNEENEDILEDIVLTLTLFEDREMIEERLKTYAHLFDDKVMKQLKRRRYTGWGRLSRKLINGIRDKQSGKTILDFLKSDGFANRNFMQLIHDDSLTFKEDIQKAQVSGQGDSLHEHIANLAGSPAIKKGILQTVKVVDELVKVMGRHKPENIVIEMARENQTTQKGQKNSRERMKRIEEGIKELGSQILKEHPVENTQLQNEKLYLYYLQNGRDMYVDQELDINRLSDYDVDHIVPQSFLKDDSIDNKVLTRSDKARGKSDNVPSEEVVKKMKNYWRQLLNAKLITQRKFDNLTKAERGGLSELDKAGFIKRQLVETRQITKHVAQILDSRMNTKYDENDKLIREVKVITLKSKLVSDFRKDFQFYKVREINNYHHAHDAYLNAVVGTALIKKYPKLESEFVYGDYKVYDVRKMIAKSEQEIGKATAKYFFYSNIMNFFKTEITLANGEIRKRPLIETNGETGEIVWDKGRDFATVRKVLSMPQVNIVKKTEVQTGGFSKESILPKRNSDKLIARKKDWDPKKYGGFDSPTVAYSVLVVAKVEKGKSKKLKSVKELLGITIMERSSFEKNPIDFLEAKGYKEVKKDLIIKLPKYSLFELENGRKRMLASAGELQKGNELALPSKYVNFLYLASHYEKLKGSPEDNEQKQLFVEQHKHYLDEIIEQISEFSKRVILADANLDKVLSAYNKHRDKPIREQAENIIHLFTLTNLGAPAAFKYFDTTIDRKRYTSTKEVLDATLIHQSITGLYETRIDLSQLGGDGGGSSGGGGGSGGMDPLQLLQPLEAEIKGTKLKAHWNSGATITCVPQAFLEEEVPIKNIWIKTIHGEKEQPVYYLTFKIQGRKVEAEVISSPYDYILVSPSDIPWLMKKPLQLTTLVPLQEYEERLLKQTMLTGSYKEKLQSLFLKYDALWQHWENQVGHRRIKPHHIATGTVNPRPQKQYPINPKAKASIQTVINDLLKQGVLIQQNSIMNTPVYPVPKPDGKWRMVLDYREVNKTIPLIAAQNQHSAGILSSIFRGKYKTTLDLSNGFWAHSITPESYWLTAFTWLGQQYCWTRLPQGFLNSPALFNADVVDLLKEVPNVQVYVDDIYISHDDPREHLEQLEKVFSLLLNAGYVVSLKKSEIAQHEVEFLGFNITKEGRGLTETFKQKLLNITPPRDLKQLQSILGLLNFARNFIPNFSELVKPLYNIIATAPGKYITWTTDNSQQLQNIISMLNSAENLEERNPEVRLIMKVNTSPSAGYIRFYNEFAKRPIMYLNYVYTKAEVKFTNTEKLLTTIHKGLIKALDLGMGQEILVYSPIVSMTKIQKTPLPERKALPIRWITWMSYLEDPRIQFHYDKTLPELQQVPTVTDDIIAKIKHPSEFSMVFYTDGSAIKHPNVNKSHNAGMGIAQVQFKPEFTVINTWSIPLGDHTAQLAEVAAVEFACKKALKIDGPVLIVTDSFYVAESVNKELPYWQSNGFFNNKKKPLKHVSKWKSIADCIQLKPDIIIIHEKGHQPTASTFHTEGNNLADKLATQGSYVVNAGKRTADGSEFEKRTADGSEFESPKKKAKVE

SEQ ID NO: 611 - protein, 2180 aa, synthetic construct
  source 1..2180: note = Description of Artificial Sequence: Synthetic polypeptide
MPAAKRVKLDGGDKKYSIGLDIGTNSVGWAVITDEYKVPSKKFKVLGNTDRHSIKKNLIGALLFDSGETAEATRLKRTARRRYTRRKNRICYLQEIFSNEMAKVDDSFFHRLEESFLVEEDKKHERHPIFGNIVDEVAYHEKYPTIYHLRKKLVDSTDKADLRLIYLALAHMIKFRGHFLIEGDLNPDNSDVDKLFIQLVQTYNQLFEENPINASGVDAKAILSARLSKSRRLENLIAQLPGEKKNGLFGNLIALSLGLTPNFKSNFDLAEDAKLQLSKDTYDDDLDNLLAQIGDQYADLFLAAKNLSDAILLSDILRVNTEITKAPLSASMIKRYDEHHQDLTLLKALVRQQLPEKYKEIFFDQSKNGYAGYIDGGASQEEFYKFIKPILEKMDGTEELLVKLNREDLLRKQRTFDNGSIPHQIHLGELHAILRRQEDFYPFLKDNREKIEKILTFRIPYYVGPLARGNSRFAWMTRKSEETITPWNFEEVVDKGASAQSFIERMTNFDKNLPNEKVLPKHSLLYEYFTVYNELTKVKYVTEGMRKPAFLSGEQKKAIVDLLFKTNRKVTVKQLKEDYFKKIECFDSVEISGVEDRFNASLGTYHDLLKIIKDKDFLDNEENEDILEDIVLTLTLFEDREMIEERLKTYAHLFDDKVMKQLKRRRYTGWGRLSRKLINGIRDKQSGKTILDFLKSDGFANRNFMQLIHDDSLTFKEDIQKAQVSGQGDSLHEHIANLAGSPAIKKGILQTVKVVDELVKVMGRHKPENIVIEMARENQTTQKGQKNSRERMKRIEEGIKELGSQILKEHPVENTQLQNEKLYLYYLQNGRDMYVDQELDINRLSDYDVDHIVPQSFLKDDSIDNKVLTRSDKARGKSDNVPSEEVVKKMKNYWRQLLNAKLITQRKFDNLTKAERGGLSELDKAGFIKRQLVETRQITKHVAQILDSRMNTKYDENDKLIREVKVITLKSKLVSDFRKDFQFYKVREINNYHHAHDAYLNAVVGTALIKKYPKLESEFVYGDYKVYDVRKMIAKSEQEIGKATAKYFFYSNIMNFFKTEITLANGEIRKRPLIETNGETGEIVWDKGRDFATVRKVLSMPQVNIVKKTEVQTGGFSKESILPKRNSDKLIARKKDWDPKKYGGFDSPTVAYSVLVVAKVEKGKSKKLKSVKELLGITIMERSSFEKNPIDFLEAKGYKEVKKDLIIKLPKYSLFELENGRKRMLASAGELQKGNELALPSKYVNFLYLASHYEKLKGSPEDNEQKQLFVEQHKHYLDEIIEQISEFSKRVILADANLDKVLSAYNKHRDKPIREQAENIIHLFTLTNLGAPAAFKYFDTTIDRKRYTSTKEVLDATLIHQSITGLYETRIDLSQLGGDGGGGGGSEAAAKGGGGSGGMDPLQLLQPLEAEIKGTKLKAHWNSGATITCVPQAFLEEEVPIKNIWIKTIHGEKEQPVYYLTFKIQGRKVEAEVISSPYDYILVSPSDIPWLMKKPLQLTTLVPLQEYEERLLKQTMLTGSYKEKLQSLFLKYDALWQHWENQVGHRRIKPHHIATGTVNPRPQKQYPINPKAKASIQTVINDLLKQGVLIQQNSIMNTPVYPVPKPDGKWRMVLDYREVNKTIPLIAAQNQHSAGILSSIFRGKYKTTLDLSNGFWAHSITPESYWLTAFTWLGQQYCWTRLPQGFLNSPALFNADVVDLLKEVPNVQVYVDDIYISHDDPREHLEQLEKVFSLLLNAGYVVSLKKSEIAQHEVEFLGFNITKEGRGLTETFKQKLLNITPPRDLKQLQSILGLLNFARNFIPNFSELVKPLYNIIATAPGKYITWTTDNSQQLQNIISMLNSAENLEERNPEVRLIMKVNTSPSAGYIRFYNEFAKRPIMYLNYVYTKAEVKFTNTEKLLTTIHKGLIKALDLGMGQEILVYSPIVSMTKIQKTPLPERKALPIRWITWMSYLEDPRIQFHYDKTLPELQQVPTVTDDIIAKIKHPSEFSMVFYTDGSAIKHPNVNKSHNAGMGIAQVQFKPEFTVINTWSIPLGDHTAQLAEVAAVEFACKKALKIDGPVLIVTDSFYVAESVNKELPYWQSNGFFNNKKKPLKHVSKWKSIADCIQLKPDIIIIHEKGHQPTASTFHTEGNNLADKLATQGSYVVNAGKRTADGSEFEKRTADGSEFESPKKKAKVE

SEQ ID NO: 612 - protein, 2174 aa, synthetic construct
  source 1..2174: note = Description of Artificial Sequence: Synthetic polypeptide
MPAAKRVKLDGGDKKYSIGLDIGTNSVGWAVITDEYKVPSKKFKVLGNTDRHSIKKNLIGALLFDSGETAEATRLKRTARRRYTRRKNRICYLQEIFSNEMAKVDDSFFHRLEESFLVEEDKKHERHPIFGNIVDEVAYHEKYPTIYHLRKKLVDSTDKADLRLIYLALAHMIKFRGHFLIEGDLNPDNSDVDKLFIQLVQTYNQLFEENPINASGVDAKAILSARLSKSRRLENLIAQLPGEKKNGLFGNLIALSLGLTPNFKSNFDLAEDAKLQLSKDTYDDDLDNLLAQIGDQYADLFLAAKNLSDAILLSDILRVNTEITKAPLSASMIKRYDEHHQDLTLLKALVRQQLPEKYKEIFFDQSKNGYAGYIDGGASQEEFYKFIKPILEKMDGTEELLVKLNREDLLRKQRTFDNGSIPHQIHLGELHAILRRQEDFYPFLKDNREKIEKILTFRIPYYVGPLARGNSRFAWMTRKSEETITPWNFEEVVDKGASAQSFIERMTNFDKNLPNEKVLPKHSLLYEYFTVYNELTKVKYVTEGMRKPAFLSGEQKKAIVDLLFKTNRKVTVKQLKEDYFKKIECFDSVEISGVEDRFNASLGTYHDLLKIIKDKDFLDNEENEDILEDIVLTLTLFEDREMIEERLKTYAHLFDDKVMKQLKRRRYTGWGRLSRKLINGIRDKQSGKTILDFLKSDGFANRNFMQLIHDDSLTFKEDIQKAQVSGQGDSLHEHIANLAGSPAIKKGILQTVKVVDELVKVMGRHKPENIVIEMARENQTTQKGQKNSRERMKRIEEGIKELGSQILKEHPVENTQLQNEKLYLYYLQNGRDMYVDQELDINRLSDYDVDHIVPQSFLKDDSIDNKVLTRSDKARGKSDNVPSEEVVKKMKNYWRQLLNAKLITQRKFDNLTKAERGGLSELDKAGFIKRQLVETRQITKHVAQILDSRMNTKYDENDKLIREVKVITLKSKLVSDFRKDFQFYKVREINNYHHAHDAYLNAVVGTALIKKYPKLESEFVYGDYKVYDVRKMIAKSEQEIGKATAKYFFYSNIMNFFKTEITLANGEIRKRPLIETNGETGEIVWDKGRDFATVRKVLSMPQVNIVKKTEVQTGGFSKESILPKRNSDKLIARKKDWDPKKYGGFDSPTVAYSVLVVAKVEKGKSKKLKSVKELLGITIMERSSFEKNPIDFLEAKGYKEVKKDLIIKLPKYSLFELENGRKRMLASAGELQKGNELALPSKYVNFLYLASHYEKLKGSPEDNEQKQLFVEQHKHYLDEIIEQISEFSKRVILADANLDKVLSAYNKHRDKPIREQAENIIHLFTLTNLGAPAAFKYFDTTIDRKRYTSTKEVLDATLIHQSITGLYETRIDLSQLGGDGGGSSPAPGGGGGMDPLQLLQPLEAEIKGTKLKAHWNSGATITCVPQAFLEEEVPIKNIWIKTIHGEKEQPVYYLTFKIQGRKVEAEVISSPYDYILVSPSDIPWLMKKPLQLTTLVPLQEYEERLLKQTMLTGSYKEKLQSLFLKYDALWQHWENQVGHRRIKPHHIATGTVNPRPQKQYPINPKAKASIQTVINDLLKQGVLIQQNSIMNTPVYPVPKPDGKWRMVLDYREVNKTIPLIAAQNQHSAGILSSIFRGKYKTTLDLSNGFWAHSITPESYWLTAFTWLGQQYCWTRLPQGFLNSPALFNADVVDLLKEVPNVQVYVDDIYISHDDPREHLEQLEKVFSLLLNAGYVVSLKKSEIAQHEVEFLGFNITKEGRGLTETFKQKLLNITPPRDLKQLQSILGLLNFARNFIPNFSELVKPLYNIIATAPGKYITWTTDNSQQLQNIISMLNSAENLEERNPEVRLIMKVNTSPSAGYIRFYNEFAKRPIMYLNYVYTKAEVKFTNTEKLLTTIHKGLIKALDLGMGQEILVYSPIVSMTKIQKTPLPERKALPIRWITWMSYLEDPRIQFHYDKTLPELQQVPTVTDDIIAKIKHPSEFSMVFYTDGSAIKHPNVNKSHNAGMGIAQVQFKPEFTVINTWSIPLGDHTAQLAEVAAVEFACKKALKIDGPVLIVTDSFYVAESVNKELPYWQSNGFFNNKKKPLKHVSKWKSIADCIQLKPDIIIIHEKGHQPTASTFHTEGNNLADKLATQGSYVVNAGKRTADGSEFEKRTADGSEFESPKKKAKVE

SEQ ID NO: 613 - protein, 2176 aa, synthetic construct
  source 1..2176: note = Description of Artificial Sequence: Synthetic polypeptide
MPAAKRVKLDGGDKKYSIGLDIGTNSVGWAVITDEYKVPSKKFKVLGNTDRHSIKKNLIGALLFDSGETAEATRLKRTARRRYTRRKNRICYLQEIFSNEMAKVDDSFFHRLEESFLVEEDKKHERHPIFGNIVDEVAYHEKYPTIYHLRKKLVDSTDKADLRLIYLALAHMIKFRGHFLIEGDLNPDNSDVDKLFIQLVQTYNQLFEENPINASGVDAKAILSARLSKSRRLENLIAQLPGEKKNGLFGNLIALSLGLTPNFKSNFDLAEDAKLQLSKDTYDDDLDNLLAQIGDQYADLFLAAKNLSDAILLSDILRVNTEITKAPLSASMIKRYDEHHQDLTLLKALVRQQLPEKYKEIFFDQSKNGYAGYIDGGASQEEFYKFIKPILEKMDGTEELLVKLNREDLLRKQRTFDNGSIPHQIHLGELHAILRRQEDFYPFLKDNREKIEKILTFRIPYYVGPLARGNSRFAWMTRKSEETITPWNFEEVVDKGASAQSFIERMTNFDKNLPNEKVLPKHSLLYEYFTVYNELTKVKYVTEGMRKPAFLSGEQKKAIVDLLFKTNRKVTVKQLKEDYFKKIECFDSVEISGVEDRFNASLGTYHDLLKIIKDKDFLDNEENEDILEDIVLTLTLFEDREMIEERLKTYAHLFDDKVMKQLKRRRYTGWGRLSRKLINGIRDKQSGKTILDFLKSDGFANRNFMQLIHDDSLTFKEDIQKAQVSGQGDSLHEHIANLAGSPAIKKGILQTVKVVDELVKVMGRHKPENIVIEMARENQTTQKGQKNSRERMKRIEEGIKELGSQILKEHPVENTQLQNEKLYLYYLQNGRDMYVDQELDINRLSDYDVDHIVPQSFLKDDSIDNKVLTRSDKARGKSDNVPSEEVVKKMKNYWRQLLNAKLITQRKFDNLTKAERGGLSELDKAGFIKRQLVETRQITKHVAQILDSRMNTKYDENDKLIREVKVITLKSKLVSDFRKDFQFYKVREINNYHHAHDAYLNAVVGTALIKKYPKLESEFVYGDYKVYDVRKMIAKSEQEIGKATAKYFFYSNIMNFFKTEITLANGEIRKRPLIETNGETGEIVWDKGRDFATVRKVLSMPQVNIVKKTEVQTGGFSKESILPKRNSDKLIARKKDWDPKKYGGFDSPTVAYSVLVVAKVEKGKSKKLKSVKELLGITIMERSSFEKNPIDFLEAKGYKEVKKDLIIKLPKYSLFELENGRKRMLASAGELQKGNELALPSKYVNFLYLASHYEKLKGSPEDNEQKQLFVEQHKHYLDEIIEQISEFSKRVILADANLDKVLSAYNKHRDKPIREQAENIIHLFTLTNLGAPAAFKYFDTTIDRKRYTSTKEVLDATLIHQSITGLYETRIDLSQLGGDGGGGGGSSEAAAKGGMDPLQLLQPLEAEIKGTKLKAHWNSGATITCVPQAFLEEEVPIKNIWIKTIHGEKEQPVYYLTFKIQGRKVEAEVISSPYDYILVSPSDIPWLMKKPLQLTTLVPLQEYEERLLKQTMLTGSYKEKLQSLFLKYDALWQHWENQVGHRRIKPHHIATGTVNPRPQKQYPINPKAKASIQTVINDLLKQGVLIQQNSIMNTPVYPVPKPDGKWRMVLDYREVNKTIPLIAAQNQHSAGILSSIFRGKYKTTLDLSNGFWAHSITPESYWLTAFTWLGQQYCWTRLPQGFLNSPALFNADVVDLLKEVPNVQVYVDDIYISHDDPREHLEQLEKVFSLLLNAGYVVSLKKSEIAQHEVEFLGFNITKEGRGLTETFKQKLLNITPPRDLKQLQSILGLLNFARNFIPNFSELVKPLYNIIATAPGKYITWTTDNSQQLQNIISMLNSAENLEERNPEVRLIMKVNTSPSAGYIRFYNEFAKRPIMYLNYVYTKAEVKFTNTEKLLTTIHKGLIKALDLGMGQEILVYSPIVSMTKIQKTPLPERKALPIRWITWMSYLEDPRIQFHYDKTLPELQQVPTVTDDIIAKIKHPSEFSMVFYTDGSAIKHPNVNKSHNAGMGIAQVQFKPEFTVINTWSIPLGDHTAQLAEVAAVEFACKKALKIDGPVLIVTDSFYVAESVNKELPYWQSNGFFNNKKKPLKHVSKWKSIADCIQLKPDIIIIHEKGHQPTASTFHTEGNNLADKLATQGSYVVNAGKRTADGSEFEKRTADGSEFESPKKKAKVE

SEQ ID NO: 614 - protein, 2176 aa, synthetic construct
  source 1..2176: note = Description of Artificial Sequence: Synthetic polypeptide
MPAAKRVKLDGGDKKYSIGLDIGTNSVGWAVITDEYKVPSKKFKVLGNTDRHSIKKNLIGALLFDSGETAEATRLKRTARRRYTRRKNRICYLQEIFSNEMAKVDDSFFHRLEESFLVEEDKKHERHPIFGNIVDEVAYHEKYPTIYHLRKKLVDSTDKADLRLIYLALAHMIKFRGHFLIEGDLNPDNSDVDKLFIQLVQTYNQLFEENPINASGVDAKAILSARLSKSRRLENLIAQLPGEKKNGLFGNLIALSLGLTPNFKSNFDLAEDAKLQLSKDTYDDDLDNLLAQIGDQYADLFLAAKNLSDAILLSDILRVNTEITKAPLSASMIKRYDEHHQDLTLLKALVRQQLPEKYKEIFFDQSKNGYAGYIDGGASQEEFYKFIKPILEKMDGTEELLVKLNREDLLRKQRTFDNGSIPHQIHLGELHAILRRQEDFYPFLKDNREKIEKILTFRIPYYVGPLARGNSRFAWMTRKSEETITPWNFEEVVDKGASAQSFIERMTNFDKNLPNEKVLPKHSLLYEYFTVYNELTKVKYVTEGMRKPAFLSGEQKKAIVDLLFKTNRKVTVKQLKEDYFKKIECFDSVEISGVEDRFNASLGTYHDLLKIIKDKDFLDNEENEDILEDIVLTLTLFEDREMIEERLKTYAHLFDDKVMKQLKRRRYTGWGRLSRKLINGIRDKQSGKTILDFLKSDGFANRNFMQLIHDDSLTFKEDIQKAQVSGQGDSLHEHIANLAGSPAIKKGILQTVKVVDELVKVMGRHKPENIVIEMARENQTTQKGQKNSRERMKRIEEGIKELGSQILKEHPVENTQLQNEKLYLYYLQNGRDMYVDQELDINRLSDYDVDHIVPQSFLKDDSIDNKVLTRSDKARGKSDNVPSEEVVKKMKNYWRQLLNAKLITQRKFDNLTKAERGGLSELDKAGFIKRQLVETRQITKHVAQILDSRMNTKYDENDKLIREVKVITLKSKLVSDFRKDFQFYKVREINNYHHAHDAYLNAVVGTALIKKYPKLESEFVYGDYKVYDVRKMIAKSEQEIGKATAKYFFYSNIMNFFKTEITLANGEIRKRPLIETNGETGEIVWDKGRDFATVRKVLSMPQVNIVKKTEVQTGGFSKESILPKRNSDKLIARKKDWDPKKYGGFDSPTVAYSVLVVAKVEKGKSKKLKSVKELLGITIMERSSFEKNPIDFLEAKGYKEVKKDLIIKLPKYSLFELENGRKRMLASAGELQKGNELALPSKYVNFLYLASHYEKLKGSPEDNEQKQLFVEQHKHYLDEIIEQISEFSKRVILADANLDKVLSAYNKHRDKPIREQAENIIHLFTLTNLGAPAAFKYFDTTIDRKRYTSTKEVLDATLIHQSITGLYETRIDLSQLGGDGGGGSGSSEAAAKGGMDPLQLLQPLEAEIKGTKLKAHWNSGATITCVPQAFLEEEVPIKNIWIKTIHGEKEQPVYYLTFKIQGRKVEAEVISSPYDYILVSPSDIPWLMKKPLQLTTLVPLQEYEERLLKQTMLTGSYKEKLQSLFLKYDALWQHWENQVGHRRIKPHHIATGTVNPRPQKQYPINPKAKASIQTVINDLLKQGVLIQQNSIMNTPVYPVPKPDGKWRMVLDYREVNKTIPLIAAQNQHSAGILSSIFRGKYKTTLDLSNGFWAHSITPESYWLTAFTWLGQQYCWTRLPQGFLNSPALFNADVVDLLKEVPNVQVYVDDIYISHDDPREHLEQLEKVFSLLLNAGYVVSLKKSEIAQHEVEFLGFNITKEGRGLTETFKQKLLNITPPRDLKQLQSILGLLNFARNFIPNFSELVKPLYNIIATAPGKYITWTTDNSQQLQNIISMLNSAENLEERNPEVRLIMKVNTSPSAGYIRFYNEFAKRPIMYLNYVYTKAEVKFTNTEKLLTTIHKGLIKALDLGMGQEILVYSPIVSMTKIQKTPLPERKALPIRWITWMSYLEDPRIQFHYDKTLPELQQVPTVTDDIIAKIKHPSEFSMVFYTDGSAIKHPNVNKSHNAGMGIAQVQFKPEFTVINTWSIPLGDHTAQLAEVAAVEFACKKALKIDGPVLIVTDSFYVAESVNKELPYWQSNGFFNNKKKPLKHVSKWKSIADCIQLKPDIIIIHEKGHQPTASTFHTEGNNLADKLATQGSYVVNAGKRTADGSEFEKRTADGSEFESPKKKAKVE

SEQ ID NO: 615 - protein, 2185 aa, synthetic construct
  source 1..2185: note = Description of Artificial Sequence: Synthetic polypeptide
MPAAKRVKLDGGDKKYSIGLDIGTNSVGWAVITDEYKVPSKKFKVLGNTDRHSIKKNLIGALLFDSGETAEATRLKRTARRRYTRRKNRICYLQEIFSNEMAKVDDSFFHRLEESFLVEEDKKHERHPIFGNIVDEVAYHEKYPTIYHLRKKLVDSTDKADLRLIYLALAHMIKFRGHFLIEGDLNPDNSDVDKLFIQLVQTYNQLFEENPINASGVDAKAILSARLSKSRRLENLIAQLPGEKKNGLFGNLIALSLGLTPNFKSNFDLAEDAKLQLSKDTYDDDLDNLLAQIGDQYADLFLAAKNLSDAILLSDILRVNTEITKAPLSASMIKRYDEHHQDLTLLKALVRQQLPEKYKEIFFDQSKNGYAGYIDGGASQEEFYKFIKPILEKMDGTEELLVKLNREDLLRKQRTFDNGSIPHQIHLGELHAILRRQEDFYPFLKDNREKIEKILTFRIPYYVGPLARGNSRFAWMTRKSEETITPWNFEEVVDKGASAQSFIERMTNFDKNLPNEKVLPKHSLLYEYFTVYNELTKVKYVTEGMRKPAFLSGEQKKAIVDLLFKTNRKVTVKQLKEDYFKKIECFDSVEISGVEDRFNASLGTYHDLLKIIKDKDFLDNEENEDILEDIVLTLTLFEDREMIEERLKTYAHLFDDKVMKQLKRRRYTGWGRLSRKLINGIRDKQSGKTILDFLKSDGFANRNFMQLIHDDSLTFKEDIQKAQVSGQGDSLHEHIANLAGSPAIKKGILQTVKVVDELVKVMGRHKPENIVIEMARENQTTQKGQKNSRERMKRIEEGIKELGSQILKEHPVENTQLQNEKLYLYYLQNGRDMYVDQELDINRLSDYDVDHIVPQSFLKDDSIDNKVLTRSDKARGKSDNVPSEEVVKKMKNYWRQLLNAKLITQRKFDNLTKAERGGLSELDKAGFIKRQLVETRQITKHVAQILDSRMNTKYDENDKLIREVKVITLKSKLVSDFRKDFQFYKVREINNYHHAHDAYLNAVVGTALIKKYPKLESEFVYGDYKVYDVRKMIAKSEQEIGKATAKYFFYSNIMNFFKTEITLANGEIRKRPLIETNGETGEIVWDKGRDFATVRKVLSMPQVNIVKKTEVQTGGFSKESILPKRNSDKLIARKKDWDPKKYGGFDSPTVAYSVLVVAKVEKGKSKKLKSVKELLGITIMERSSFEKNPIDFLEAKGYKEVKKDLIIKLPKYSLFELENGRKRMLASAGELQKGNELALPSKYVNFLYLASHYEKLKGSPEDNEQKQLFVEQHKHYLDEIIEQISEFSKRVILADANLDKVLSAYNKHRDKPIREQAENIIHLFTLTNLGAPAAFKYFDTTIDRKRYTSTKEVLDATLIHQSITGLYETRIDLSQLGGDGGGGGGSGGGGSGGGGSGGGGSGGMDPLQLLQPLEAEIKGTKLKAHWNSGATITCVPQAFLEEEVPIKNIWIKTIHGEKEQPVYYLTFKIQGRKVEAEVISSPYDYILVSPSDIPWLMKKPLQLTTLVPLQEYEERLLKQTMLTGSYKEKLQSLFLKYDALWQHWENQVGHRRIKPHHIATGTVNPRPQKQYPINPKAKASIQTVINDLLKQGVLIQQNSIMNTPVYPVPKPDGKWRMVLDYREVNKTIPLIAAQNQHSAGILSSIFRGKYKTTLDLSNGFWAHSITPESYWLTAFTWLGQQYCWTRLPQGFLNSPALFNADVVDLLKEVPNVQVYVDDIYISHDDPREHLEQLEKVFSLLLNAGYVVSLKKSEIAQHEVEFLGFNITKEGRGLTETFKQKLLNITPPRDLKQLQSILGLLNFARNFIPNFSELVKPLYNIIATAPGKYITWTTDNSQQLQNIISMLNSAENLEERNPEVRLIMKVNTSPSAGYIRFYNEFAKRPIMYLNYVYTKAEVKFTNTEKLLTTIHKGLIKALDLGMGQEILVYSPIVSMTKIQKTPLPERKALPIRWITWMSYLEDPRIQFHYDKTLPELQQVPTVTDDIIAKIKHPSEFSMVFYTDGSAIKHPNVNKSHNAGMGIAQVQFKPEFTVINTWSIPLGDHTAQLAEVAAVEFACKKALKIDGPVLIVTDSFYVAESVNKELPYWQSNGFFNNKKKPLKHVSKWKSIADCIQLKPDIIIIHEKGHQPTASTFHTEGNNLADKLATQGSYVVNAGKRTADGSEFEKRTADGSEFESPKKKAKVE

SEQ ID NO: 616 - protein, 2176 aa, synthetic construct
  source 1..2176: note = Description of Artificial Sequence: Synthetic polypeptide
MPAAKRVKLDGGDKKYSIGLDIGTNSVGWAVITDEYKVPSKKFKVLGNTDRHSIKKNLIGALLFDSGETAEATRLKRTARRRYTRRKNRICYLQEIFSNEMAKVDDSFFHRLEESFLVEEDKKHERHPIFGNIVDEVAYHEKYPTIYHLRKKLVDSTDKADLRLIYLALAHMIKFRGHFLIEGDLNPDNSDVDKLFIQLVQTYNQLFEENPINASGVDAKAILSARLSKSRRLENLIAQLPGEKKNGLFGNLIALSLGLTPNFKSNFDLAEDAKLQLSKDTYDDDLDNLLAQIGDQYADLFLAAKNLSDAILLSDILRVNTEITKAPLSASMIKRYDEHHQDLTLLKALVRQQLPEKYKEIFFDQSKNGYAGYIDGGASQEEFYKFIKPILEKMDGTEELLVKLNREDLLRKQRTFDNGSIPHQIHLGELHAILRRQEDFYPFLKDNREKIEKILTFRIPYYVGPLARGNSRFAWMTRKSEETITPWNFEEVVDKGASAQSFIERMTNFDKNLPNEKVLPKHSLLYEYFTVYNELTKVKYVTEGMRKPAFLSGEQKKAIVDLLFKTNRKVTVKQLKEDYFKKIECFDSVEISGVEDRFNASLGTYHDLLKIIKDKDFLDNEENEDILEDIVLTLTLFEDREMIEERLKTYAHLFDDKVMKQLKRRRYTGWGRLSRKLINGIRDKQSGKTILDFLKSDGFANRNFMQLIHDDSLTFKEDIQKAQVSGQGDSLHEHIANLAGSPAIKKGILQTVKVVDELVKVMGRHKPENIVIEMARENQTTQKGQKNSRERMKRIEEGIKELGSQILKEHPVENTQLQNEKLYLYYLQNGRDMYVDQELDINRLSDYDVDHIVPQSFLKDDSIDNKVLTRSDKARGKSDNVPSEEVVKKMKNYWRQLLNAKLITQRKFDNLTKAERGGLSELDKAGFIKRQLVETRQITKHVAQILDSRMNTKYDENDKLIREVKVITLKSKLVSDFRKDFQFYKVREINNYHHAHDAYLNAVVGTALIKKYPKLESEFVYGDYKVYDVRKMIAKSEQEIGKATAKYFFYSNIMNFFKTEITLANGEIRKRPLIETNGETGEIVWDKGRDFATVRKVLSMPQVNIVKKTEVQTGGFSKESILPKRNSDKLIARKKDWDPKKYGGFDSPTVAYSVLVVAKVEKGKSKKLKSVKELLGITIMERSSFEKNPIDFLEAKGYKEVKKDLIIKLPKYSLFELENGRKRMLASAGELQKGNELALPSKYVNFLYLASHYEKLKGSPEDNEQKQLFVEQHKHYLDEIIEQISEFSKRVILADANLDKVLSAYNKHRDKPIREQAENIIHLFTLTNLGAPAAFKYFDTTIDRKRYTSTKEVLDATLIHQSITGLYETRIDLSQLGGDGGPAPEAAAKGGGGGMDPLQLLQPLEAEIKGTKLKAHWNSGATITCVPQAFLEEEVPIKNIWIKTIHGEKEQPVYYLTFKIQGRKVEAEVISSPYDYILVSPSDIPWLMKKPLQLTTLVPLQEYEERLLKQTMLTGSYKEKLQSLFLKYDALWQHWENQVGHRRIKPHHIATGTVNPRPQKQYPINPKAKASIQTVINDLLKQGVLIQQNSIMNTPVYPVPKPDGKWRMVLDYREVNKTIPLIAAQNQHSAGILSSIFRGKYKTTLDLSNGFWAHSITPESYWLTAFTWLGQQYCWTRLPQGFLNSPALFNADVVDLLKEVPNVQVYVDDIYISHDDPREHLEQLEKVFSLLLNAGYVVSLKKSEIAQHEVEFLGFNITKEGRGLTETFKQKLLNITPPRDLKQLQSILGLLNFARNFIPNFSELVKPLYNIIATAPGKYITWTTDNSQQLQNIISMLNSAENLEERNPEVRLIMKVNTSPSAGYIRFYNEFAKRPIMYLNYVYTKAEVKFTNTEKLLTTIHKGLIKALDLGMGQEILVYSPIVSMTKIQKTPLPERKALPIRWITWMSYLEDPRIQFHYDKTLPELQQVPTVTDDIIAKIKHPSEFSMVFYTDGSAIKHPNVNKSHNAGMGIAQVQFKPEFTVINTWSIPLGDHTAQLAEVAAVEFACKKALKIDGPVLIVTDSFYVAESVNKELPYWQSNGFFNNKKKPLKHVSKWKSIADCIQLKPDIIIIHEKGHQPTASTFHTEGNNLADKLATQGSYVVNAGKRTADGSEFEKRTADGSEFESPKKKAKVE

SEQ ID NO: 617 - protein, 2174 aa, synthetic construct
  source 1..2174: note = Description of Artificial Sequence: Synthetic polypeptide
MPAAKRVKLDGGDKKYSIGLDIGTNSVGWAVITDEYKVPSKKFKVLGNTDRHSIKKNLIGALLFDSGETAEATRLKRTARRRYTRRKNRICYLQEIFSNEMAKVDDSFFHRLEESFLVEEDKKHERHPIFGNIVDEVAYHEKYPTIYHLRKKLVDSTDKADLRLIYLALAHMIKFRGHFLIEGDLNPDNSDVDKLFIQLVQTYNQLFEENPINASGVDAKAILSARLSKSRRLENLIAQLPGEKKNGLFGNLIALSLGLTPNFKSNFDLAEDAKLQLSKDTYDDDLDNLLAQIGDQYADLFLAAKNLSDAILLSDILRVNTEITKAPLSASMIKRYDEHHQDLTLLKALVRQQLPEKYKEIFFDQSKNGYAGYIDGGASQEEFYKFIKPILEKMDGTEELLVKLNREDLLRKQRTFDNGSIPHQIHLGELHAILRRQEDFYPFLKDNREKIEKILTFRIPYYVGPLARGNSRFAWMTRKSEETITPWNFEEVVDKGASAQSFIERMTNFDKNLPNEKVLPKHSLLYEYFTVYNELTKVKYVTEGMRKPAFLSGEQKKAIVDLLFKTNRKVTVKQLKEDYFKKIECFDSVEISGVEDRFNASLGTYHDLLKIIKDKDFLDNEENEDILEDIVLTLTLFEDREMIEERLKTYAHLFDDKVMKQLKRRRYTGWGRLSRKLINGIRDKQSGKTILDFLKSDGFANRNFMQLIHDDSLTFKEDIQKAQVSGQGDSLHEHIANLAGSPAIKKGILQTVKVVDELVKVMGRHKPENIVIEMARENQTTQKGQKNSRERMKRIEEGIKELGSQILKEHPVENTQLQNEKLYLYYLQNGRDMYVDQELDINRLSDYDVDHIVPQSFLKDDSIDNKVLTRSDKARGKSDNVPSEEVVKKMKNYWRQLLNAKLITQRKFDNLTKAERGGLSELDKAGFIKRQLVETRQITKHVAQILDSRMNTKYDENDKLIREVKVITLKSKLVSDFRKDFQFYKVREINNYHHAHDAYLNAVVGTALIKKYPKLESEFVYGDYKVYDVRKMIAKSEQEIGKATAKYFFYSNIMNFFKTEITLANGEIRKRPLIETNGETGEIVWDKGRDFATVRKVLSMPQVNIVKKTEVQTGGFSKESILPKRNSDKLIARKKDWDPKKYGGFDSPTVAYSVLVVAKVEKGKSKKLKSVKELLGITIMERSSFEKNPIDFLEAKGYKEVKKDLIIKLPKYSLFELENGRKRMLASAGELQKGNELALPSKYVNFLYLASHYEKLKGSPEDNEQKQLFVEQHKHYLDEIIEQISEFSKRVILADANLDKVLSAYNKHRDKPIREQAENIIHLFTLTNLGAPAAFKYFDTTIDRKRYTSTKEVLDATLIHQSITGLYETRIDLSQLGGDGGPAPGSSGGGGGMDPLQLLQPLEAEIKGTKLKAHWNSGATITCVPQAFLEEEVPIKNIWIKTIHGEKEQPVYYLTFKIQGRKVEAEVISSPYDYILVSPSDIPWLMKKPLQLTTLVPLQEYEERLLKQTMLTGSYKEKLQSLFLKYDALWQHWENQVGHRRIKPHHIATGTVNPRPQKQYPINPKAKASIQTVINDLLKQGVLIQQNSIMNTPVYPVPKPDGKWRMVLDYREVNKTIPLIAAQNQHSAGILSSIFRGKYKTTLDLSNGFWAHSITPESYWLTAFTWLGQQYCWTRLPQGFLNSPALFNADVVDLLKEVPNVQVYVDDIYISHDDPREHLEQLEKVFSLLLNAGYVVSLKKSEIAQHEVEFLGFNITKEGRGLTETFKQKLLNITPPRDLKQLQSILGLLNFARNFIPNFSELVKPLYNIIATAPGKYITWTTDNSQQLQNIISMLNSAENLEERNPEVRLIMKVNTSPSAGYIRFYNEFAKRPIMYLNYVYTKAEVKFTNTEKLLTTIHKGLIKALDLGMGQEILVYSPIVSMTKIQKTPLPERKALPIRWITWMSYLEDPRIQFHYDKTLPELQQVPTVTDDIIAKIKHPSEFSMVFYTDGSAIKHPNVNKSHNAGMGIAQVQFKPEFTVINTWSIPLGDHTAQLAEVAAVEFACKKALKIDGPVLIVTDSFYVAESVNKELPYWQSNGFFNNKKKPLKHVSKWKSIADCIQLKPDIIIIHEKGHQPTASTFHTEGNNLADKLATQGSYVVNAGKRTADGSEFEKRTADGSEFESPKKKAKVE

SEQ ID NO: 618 - protein, 2174 aa, synthetic construct
  source 1..2174: note = Description of Artificial Sequence: Synthetic polypeptide
MPAAKRVKLDGGDKKYSIGLDIGTNSVGWAVITDEYKVPSKKFKVLGNTDRHSIKKNLIGALLFDSGETAEATRLKRTARRRYTRRKNRICYLQEIFSNEMAKVDDSFFHRLEESFLVEEDKKHERHPIFGNIVDEVAYHEKYPTIYHLRKKLVDSTDKADLRLIYLALAHMIKFRGHFLIEGDLNPDNSDVDKLFIQLVQTYNQLFEENPINASGVDAKAILSARLSKSRRLENLIAQLPGEKKNGLFGNLIALSLGLTPNFKSNFDLAEDAKLQLSKDTYDDDLDNLLAQIGDQYADLFLAAKNLSDAILLSDILRVNTEITKAPLSASMIKRYDEHHQDLTLLKALVRQQLPEKYKEIFFDQSKNGYAGYIDGGASQEEFYKFIKPILEKMDGTEELLVKLNREDLLRKQRTFDNGSIPHQIHLGELHAILRRQEDFYPFLKDNREKIEKILTFRIPYYVGPLARGNSRFAWMTRKSEETITPWNFEEVVDKGASAQSFIERMTNFDKNLPNEKVLPKHSLLYEYFTVYNELTKVKYVTEGMRKPAFLSGEQKKAIVDLLFKTNRKVTVKQLKEDYFKKIECFDSVEISGVEDRFNASLGTYHDLLKIIKDKDFLDNEENEDILEDIVLTLTLFEDREMIEERLKTYAHLFDDKVMKQLKRRRYTGWGRLSRKLINGIRDKQSGKTILDFLKSDGFANRNFMQLIHDDSLTFKEDIQKAQVSGQGDSLHEHIANLAGSPAIKKGILQTVKVVDELVKVMGRHKPENIVIEMARENQTTQKGQKNSRERMKRIEEGIKELGSQILKEHPVENTQLQNEKLYLYYLQNGRDMYVDQELDINRLSDYDVDHIVPQSFLKDDSIDNKVLTRSDKARGKSDNVPSEEVVKKMKNYWRQLLNAKLITQRKFDNLTKAERGGLSELDKAGFIKRQLVETRQITKHVAQILDSRMNTKYDENDKLIREVKVITLKSKLVSDFRKDFQFYKVREINNYHHAHDAYLNAVVGTALIKKYPKLESEFVYGDYKVYDVRKMIAKSEQEIGKATAKYFFYSNIMNFFKTEITLANGEIRKRPLIETNGETGEIVWDKGRDFATVRKVLSMPQVNIVKKTEVQTGGFSKESILPKRNSDKLIARKKDWDPKKYGGFDSPTVAYSVLVVAKVEKGKSKKLKSVKELLGITIMERSSFEKNPIDFLEAKGYKEVKKDLIIKLPKYSLFELENGRKRMLASAGELQKGNELALPSKYVNFLYLASHYEKLKGSPEDNEQKQLFVEQHKHYLDEIIEQISEFSKRVILADANLDKVLSAYNKHRDKPIREQAENIIHLFTLTNLGAPAAFKYFDTTIDRKRYTSTKEVLDATLIHQSITGLYETRIDLSQLGGDGGPAPGGSGGGGGMDPLQLLQPLEAEIKGTKLKAHWNSGATITCVPQAFLEEEVPIKNIWIKTIHGEKEQPVYYLTFKIQGRKVEAEVISSPYDYILVSPSDIPWLMKKPLQLTTLVPLQEYEERLLKQTMLTGSYKEKLQSLFLKYDALWQHWENQVGHRRIKPHHIATGTVNPRPQKQYPINPKAKASIQTVINDLLKQGVLIQQNSIMNTPVYPVPKPDGKWRMVLDYREVNKTIPLIAAQNQHSAGILSSIFRGKYKTTLDLSNGFWAHSITPESYWLTAFTWLGQQYCWTRLPQGFLNSPALFNADVVDLLKEVPNVQVYVDDIYISHDDPREHLEQLEKVFSLLLNAGYVVSLKKSEIAQHEVEFLGFNITKEGRGLTETFKQKLLNITPPRDLKQLQSILGLLNFARNFIPNFSELVKPLYNIIATAPGKYITWTTDNSQQLQNIISMLNSAENLEERNPEVRLIMKVNTSPSAGYIRFYNEFAKRPIMYLNYVYTKAEVKFTNTEKLLTTIHKGLIKALDLGMGQEILVYSPIVSMTKIQKTPLPERKALPIRWITWMSYLEDPRIQFHYDKTLPELQQVPTVTDDIIAKIKHPSEFSMVFYTDGSAIKHPNVNKSHNAGMGIAQVQFKPEFTVINTWSIPLGDHTAQLAEVAAVEFACKKALKIDGPVLIVTDSFYVAESVNKELPYWQSNGFFNNKKKPLKHVSKWKSIADCIQLKPDIIIIHEKGHQPTASTFHTEGNNLADKLATQGSYVVNAGKRTADGSEFEKRTADGSEFESPKKKAKVE

SEQ ID NO: 619 - protein, 2173 aa, synthetic construct
  source 1..2173: note = Description of Artificial Sequence: Synthetic polypeptide
MPAAKRVKLDGGDKKYSIGLDIGTNSVGWAVITDEYKVPSKKFKVLGNTDRHSIKKNLIGALLFDSGETAEATRLKRTARRRYTRRKNRICYLQEIFSNEMAKVDDSFFHRLEESFLVEEDKKHERHPIFGNIVDEVAYHEKYPTIYHLRKKLVDSTDKADLRLIYLALAHMIKFRGHFLIEGDLNPDNSDVDKLFIQLVQTYNQLFEENPINASGVDAKAILSARLSKSRRLENLIAQLPGEKKNGLFGNLIALSLGLTPNFKSNFDLAEDAKLQLSKDTYDDDLDNLLAQIGDQYADLFLAAKNLSDAILLSDILRVNTEITKAPLSASMIKRYDEHHQDLTLLKALVRQQLPEKYKEIFFDQSKNGYAGYIDGGASQEEFYKFIKPILEKMDGTEELLVKLNREDLLRKQRTFDNGSIPHQIHLGELHAILRRQEDFYPFLKDNREKIEKILTFRIPYYVGPLARGNSRFAWMTRKSEETITPWNFEEVVDKGASAQSFIERMTNFDKNLPNEKVLPKHSLLYEYFTVYNELTKVKYVTEGMRKPAFLSGEQKKAIVDLLFKTNRKVTVKQLKEDYFKKIECFDSVEISGVEDRFNASLGTYHDLLKIIKDKDFLDNEENEDILEDIVLTLTLFEDREMIEERLKTYAHLFDDKVMKQLKRRRYTGWGRLSRKLINGIRDKQSGKTILDFLKSDGFANRNFMQLIHDDSLTFKEDIQKAQVSGQGDSLHEHIANLAGSPAIKKGILQTVKVVDELVKVMGRHKPENIVIEMARENQTTQKGQKNSRERMKRIEEGIKELGSQILKEHPVENTQLQNEKLYLYYLQNGRDMYVDQELDINRLSDYDVDHIVPQSFLKDDSIDNKVLTRSDKARGKSDNVPSEEVVKKMKNYWRQLLNAKLITQRKFDNLTKAERGGLSELDKAGFIKRQLVETRQITKHVAQILDSRMNTKYDENDKLIREVKVITLKSKLVSDFRKDFQFYKVREINNYHHAHDAYLNAVVGTALIKKYPKLESEFVYGDYKVYDVRKMIAKSEQEIGKATAKYFFYSNIMNFFKTEITLANGEIRKRPLIETNGETGEIVWDKGRDFATVRKVLSMPQVNIVKKTEVQTGGFSKESILPKRNSDKLIARKKDWDPKKYGGFDSPTVAYSVLVVAKVEKGKSKKLKSVKELLGITIMERSSFEKNPIDFLEAKGYKEVKKDLIIKLPKYSLFELENGRKRMLASAGELQKGNELALPSKYVNFLYLASHYEKLKGSPEDNEQKQLFVEQHKHYLDEIIEQISEFSKRVILADANLDKVLSAYNKHRDKPIREQAENIIHLFTLTNLGAPAAFKYFDTTIDRKRYTSTKEVLDATLIHQSITGLYETRIDLSQLGGDGGEAAAKPAPGGMDPLQLLQPLEAEIKGTKLKAHWNSGATITCVPQAFLEEEVPIKNIWIKTIHGEKEQPVYYLTFKIQGRKVEAEVISSPYDYILVSPSDIPWLMKKPLQLTTLVPLQEYEERLLKQTMLTGSYKEKLQSLFLKYDALWQHWENQVGHRRIKPHHIATGTVNPRPQKQYPINPKAKASIQTVINDLLKQGVLIQQNSIMNTPVYPVPKPDGKWRMVLDYREVNKTIPLIAAQNQHSAGILSSIFRGKYKTTLDLSNGFWAHSITPESYWLTAFTWLGQQYCWTRLPQGFLNSPALFNADVVDLLKEVPNVQVYVDDIYISHDDPREHLEQLEKVFSLLLNAGYVVSLKKSEIAQHEVEFLGFNITKEGRGLTETFKQKLLNITPPRDLKQLQSILGLLNFARNFIPNFSELVKPLYNIIATAPGKYITWTTDNSQQLQNIISMLNSAENLEERNPEVRLIMKVNTSPSAGYIRFYNEFAKRPIMYLNYVYTKAEVKFTNTEKLLTTIHKGLIKALDLGMGQEILVYSPIVSMTKIQKTPLPERKALPIRWITWMSYLEDPRIQFHYDKTLPELQQVPTVTDDIIAKIKHPSEFSMVFYTDGSAIKHPNVNKSHNAGMGIAQVQFKPEFTVINTWSIPLGDHTAQLAEVAAVEFACKKALKIDGPVLIVTDSFYVAESVNKELPYWQSNGFFNNKKKPLKHVSKWKSIADCIQLKPDIIIIHEKGHQPTASTFHTEGNNLADKLATQGSYVVNAGKRTADGSEFEKRTADGSEFESPKKKAKVE

SEQ ID NO: 620 - protein, 2176 aa, synthetic construct
  source 1..2176: note = Description of Artificial Sequence: Synthetic polypeptide
MPAAKRVKLDGGDKKYSIGLDIGTNSVGWAVITDEYKVPSKKFKVLGNTDRHSIKKNLIGALLFDSGETAEATRLKRTARRRYTRRKNRICYLQEIFSNEMAKVDDSFFHRLEESFLVEEDKKHERHPIFGNIVDEVAYHEKYPTIYHLRKKLVDSTDKADLRLIYLALAHMIKFRGHFLIEGDLNPDNSDVDKLFIQLVQTYNQLFEENPINASGVDAKAILSARLSKSRRLENLIAQLPGEKKNGLFGNLIALSLGLTPNFKSNFDLAEDAKLQLSKDTYDDDLDNLLAQIGDQYADLFLAAKNLSDAILLSDILRVNTEITKAPLSASMIKRYDEHHQDLTLLKALVRQQLPEKYKEIFFDQSKNGYAGYIDGGASQEEFYKFIKPILEKMDGTEELLVKLNREDLLRKQRTFDNGSIPHQIHLGELHAILRRQEDFYPFLKDNREKIEKILTFRIPYYVGPLARGNSRFAWMTRKSEETITPWNFEEVVDKGASAQSFIERMTNFDKNLPNEKVLPKHSLLYEYFTVYNELTKVKYVTEGMRKPAFLSGEQKKAIVDLLFKTNRKVTVKQLKEDYFKKIECFDSVEISGVEDRFNASLGTYHDLLKIIKDKDFLDNEENEDILEDIVLTLTLFEDREMIEERLKTYAHLFDDKVMKQLKRRRYTGWGRLSRKLINGIRDKQSGKTILDFLKSDGFANRNFMQLIHDDSLTFKEDIQKAQVSGQGDSLHEHIANLAGSPAIKKGILQTVKVVDELVKVMGRHKPENIVIEMARENQTTQKGQKNSRERMKRIEEGIKELGSQILKEHPVENTQLQNEKLYLYYLQNGRDMYVDQELDINRLSDYDVDHIVPQSFLKDDSIDNKVLTRSDKARGKSDNVPSEEVVKKMKNYWRQLLNAKLITQRKFDNLTKAERGGLSELDKAGFIKRQLVETRQITKHVAQILDSRMNTKYDENDKLIREVKVITLKSKLVSDFRKDFQFYKVREINNYHHAHDAYLNAVVGTALIKKYPKLESEFVYGDYKVYDVRKMIAKSEQEIGKATAKYFFYSNIMNFFKTEITLANGEIRKRPLIETNGETGEIVWDKGRDFATVRKVLSMPQVNIVKKTEVQTGGFSKESILPKRNSDKLIARKKDWDPKKYGGFDSPTVAYSVLVVAKVEKGKSKKLKSVKELLGITIMERSSFEKNPIDFLEAKGYKEVKKDLIIKLPKYSLFELENGRKRMLASAGELQKGNELALPSKYVNFLYLASHYEKLKGSPEDNEQKQLFVEQHKHYLDEIIEQISEFSKRVILADANLDKVLSAYNKHRDKPIREQAENIIHLFTLTNLGAPAAFKYFDTTIDRKRYTSTKEVLDATLIHQSITGLYETRIDLSQLGGDGGGGGEAAAKGSSGGMDPLQLLQPLEAEIKGTKLKAHWNSGATITCVPQAFLEEEVPIKNIWIKTIHGEKEQPVYYLTFKIQGRKVEAEVISSPYDYILVSPSDIPWLMKKPLQLTTLVPLQEYEERLLKQTMLTGSYKEKLQSLFLKYDALWQHWENQVGHRRIKPHHIATGTVNPRPQKQYPINPKAKASIQTVINDLLKQGVLIQQNSIMNTPVYPVPKPDGKWRMVLDYREVNKTIPLIAAQNQHSAGILSSIFRGKYKTTLDLSNGFWAHSITPESYWLTAFTWLGQQYCWTRLPQGFLNSPALFNADVVDLLKEVPNVQVYVDDIYISHDDPREHLEQLEKVFSLLLNAGYVVSLKKSEIAQHEVEFLGFNITKEGRGLTETFKQKLLNITPPRDLKQLQSILGLLNFARNFIPNFSELVKPLYNIIATAPGKYITWTTDNSQQLQNIISMLNSAENLEERNPEVRLIMKVNTSPSAGYIRFYNEFAKRPIMYLNYVYTKAEVKFTNTEKLLTTIHKGLIKALDLGMGQEILVYSPIVSMTKIQKTPLPERKALPIRWITWMSYLEDPRIQFHYDKTLPELQQVPTVTDDIIAKIKHPSEFSMVFYTDGSAIKHPNVNKSHNAGMGIAQVQFKPEFTVINTWSIPLGDHTAQLAEVAAVEFACKKALKIDGPVLIVTDSFYVAESVNKELPYWQSNGFFNNKKKPLKHVSKWKSIADCIQLKPDIIIIHEKGHQPTASTFHTEGNNLADKLATQGSYVVNAGKRTADGSEFEKRTADGSEFESPKKKAKVE

SEQ ID NO: 621 - protein, 2176 aa, synthetic construct
  source 1..2176: note = Description of Artificial Sequence: Synthetic polypeptide
MPAAKRVKLDGGDKKYSIGLDIGTNSVGWAVITDEYKVPSKKFKVLGNTDRHSIKKNLIGALLFDSGETAEATRLKRTARRRYTRRKNRICYLQEIFSNEMAKVDDSFFHRLEESFLVEEDKKHERHPIFGNIVDEVAYHEKYPTIYHLRKKLVDSTDKADLRLIYLALAHMIKFRGHFLIEGDLNPDNSDVDKLFIQLVQTYNQLFEENPINASGVDAKAILSARLSKSRRLENLIAQLPGEKKNGLFGNLIALSLGLTPNFKSNFDLAEDAKLQLSKDTYDDDLDNLLAQIGDQYADLFLAAKNLSDAILLSDILRVNTEITKAPLSASMIKRYDEHHQDLTLLKALVRQQLPEKYKEIFFDQSKNGYAGYIDGGASQEEFYKFIKPILEKMDGTEELLVKLNREDLLRKQRTFDNGSIPHQIHLGELHAILRRQEDFYPFLKDNREKIEKILTFRIPYYVGPLARGNSRFAWMTRKSEETITPWNFEEVVDKGASAQSFIERMTNFDKNLPNEKVLPKHSLLYEYFTVYNELTKVKYVTEGMRKPAFLSGEQKKAIVDLLFKTNRKVTVKQLKEDYFKKIECFDSVEISGVEDRFNASLGTYHDLLKIIKDKDFLDNEENEDILEDIVLTLTLFEDREMIEERLKTYAHLFDDKVMKQLKRRRYTGWGRLSRKLINGIRDKQSGKTILDFLKSDGFANRNFMQLIHDDSLTFKEDIQKAQVSGQGDSLHEHIANLAGSPAIKKGILQTVKVVDELVKVMGRHKPENIVIEMARENQTTQKGQKNSRERMKRIEEGIKELGSQILKEHPVENTQLQNEKLYLYYLQNGRDMYVDQELDINRLSDYDVDHIVPQSFLKDDSIDNKVLTRSDKARGKSDNVPSEEVVKKMKNYWRQLLNAKLITQRKFDNLTKAERGGLSELDKAGFIKRQLVETRQITKHVAQILDSRMNTKYDENDKLIREVKVITLKSKLVSDFRKDFQFYKVREINNYHHAHDAYLNAVVGTALIKKYPKLESEFVYGDYKVYDVRKMIAKSEQEIGKATAKYFFYSNIMNFFKTEITLANGEIRKRPLIETNGETGEIVWDKGRDFATVRKVLSMPQVNIVKKTEVQTGGFSKESILPKRNSDKLIARKKDWDPKKYGGFDSPTVAYSVLVVAKVEKGKSKKLKSVKELLGITIMERSSFEKNPIDFLEAKGYKEVKKDLIIKLPKYSLFELENGRKRMLASAGELQKGNELALPSKYVNFLYLASHYEKLKGSPEDNEQKQLFVEQHKHYLDEIIEQISEFSKRVILADANLDKVLSAYNKHRDKPIREQAENIIHLFTLTNLGAPAAFKYFDTTIDRKRYTSTKEVLDATLIHQSITGLYETRIDLSQLGGDGGGGGEAAAKPAPGGMDPLQLLQPLEAEIKGTKLKAHWNSGATITCVPQAFLEEEVPIKNIWIKTIHGEKEQPVYYLTFKIQGRKVEAEVISSPYDYILVSPSDIPWLMKKPLQLTTLVPLQEYEERLLKQTMLTGSYKEKLQSLFLKYDALWQHWENQVGHRRIKPHHIATGTVNPRPQKQYPINPKAKASIQTVINDLLKQGVLIQQNSIMNTPVYPVPKPDGKWRMVLDYREVNKTIPLIAAQNQHSAGILSSIFRGKYKTTLDLSNGFWAHSITPESYWLTAFTWLGQQYCWTRLPQGFLNSPALFNADVVDLLKEVPNVQVYVDDIYISHDDPREHLEQLEKVFSLLLNAGYVVSLKKSEIAQHEVEFLGFNITKEGRGLTETFKQKLLNITPPRDLKQLQSILGLLNFARNFIPNFSELVKPLYNIIATAPGKYITWTTDNSQQLQNIISMLNSAENLEERNPEVRLIMKVNTSPSAGYIRFYNEFAKRPIMYLNYVYTKAEVKFTNTEKLLTTIHKGLIKALDLGMGQEILVYSPIVSMTKIQKTPLPERKALPIRWITWMSYLEDPRIQFHYDKTLPELQQVPTVTDDIIAKIKHPSEFSMVFYTDGSAIKHPNVNKSHNAGMGIAQVQFKPEFTVINTWSIPLGDHTAQLAEVAAVEFACKKALKIDGPVLIVTDSFYVAESVNKELPYWQSNGFFNNKKKPLKHVSKWKSIADCIQLKPDIIIIHEKGHQPTASTFHTEGNNLADKLATQGSYVVNAGKRTADGSEFEKRTADGSEFESPKKKAKVE

SEQ ID NO: 622 - protein, 2176 aa, synthetic construct
  source 1..2176: note = Description of Artificial Sequence: Synthetic polypeptide
MPAAKRVKLDGGDKKYSIGLDIGTNSVGWAVITDEYKVPSKKFKVLGNTDRHSIKKNLIGALLFDSGETAEATRLKRTARRRYTRRKNRICYLQEIFSNEMAKVDDSFFHRLEESFLVEEDKKHERHPIFGNIVDEVAYHEKYPTIYHLRKKLVDSTDKADLRLIYLALAHMIKFRGHFLIEGDLNPDNSDVDKLFIQLVQTYNQLFEENPINASGVDAKAILSARLSKSRRLENLIAQLPGEKKNGLFGNLIALSLGLTPNFKSNFDLAEDAKLQLSKDTYDDDLDNLLAQIGDQYADLFLAAKNLSDAILLSDILRVNTEITKAPLSASMIKRYDEHHQDLTLLKALVRQQLPEKYKEIFFDQSKNGYAGYIDGGASQEEFYKFIKPILEKMDGTEELLVKLNREDLLRKQRTFDNGSIPHQIHLGELHAILRRQEDFYPFLKDNREKIEKILTFRIPYYVGPLARGNSRFAWMTRKSEETITPWNFEEVVDKGASAQSFIERMTNFDKNLPNEKVLPKHSLLYEYFTVYNELTKVKYVTEGMRKPAFLSGEQKKAIVDLLFKTNRKVTVKQLKEDYFKKIECFDSVEISGVEDRFNASLGTYHDLLKIIKDKDFLDNEENEDILEDIVLTLTLFEDREMIEERLKTYAHLFDDKVMKQLKRRRYTGWGRLSRKLINGIRDKQSGKTILDFLKSDGFANRNFMQLIHDDSLTFKEDIQKAQVSGQGDSLHEHIANLAGSPAIKKGILQTVKVVDELVKVMGRHKPENIVIEMARENQTTQKGQKNSRERMKRIEEGIKELGSQILKEHPVENTQLQNEKLYLYYLQNGRDMYVDQELDINRLSDYDVDHIVPQSFLKDDSIDNKVLTRSDKARGKSDNVPSEEVVKKMKNYWRQLLNAKLITQRKFDNLTKAERGGLSELDKAGFIKRQLVETRQITKHVAQILDSRMNTKYDENDKLIREVKVITLKSKLVSDFRKDFQFYKVREINNYHHAHDAYLNAVVGTALIKKYPKLESEFVYGDYKVYDVRKMIAKSEQEIGKATAKYFFYSNIMNFFKTEITLANGEIRKRPLIETNGETGEIVWDKGRDFATVRKVLSMPQVNIVKKTEVQTGGFSKESILPKRNSDKLIARKKDWDPKKYGGFDSPTVAYSVLVVAKVEKGKSKKLKSVKELLGITIMERSSFEKNPIDFLEAKGYKEVKKDLIIKLPKYSLFELENGRKRMLASAGELQKGNELALPSKYVNFLYLASHYEKLKGSPEDNEQKQLFVEQHKHYLDEIIEQISEFSKRVILADANLDKVLSAYNKHRDKPIREQAENIIHLFTLTNLGAPAAFKYFDTTIDRKRYTSTKEVLDATLIHQSITGLYETRIDLSQLGGDGGPAPGGGEAAAKGGMDPLQLLQPLEAEIKGTKLKAHWNSGATITCVPQAFLEEEVPIKNIWIKTIHGEKEQPVYYLTFKIQGRKVEAEVISSPYDYILVSPSDIPWLMKKPLQLTTLVPLQEYEERLLKQTMLTGSYKEKLQSLFLKYDALWQHWENQVGHRRIKPHHIATGTVNPRPQKQYPINPKAKASIQTVINDLLKQGVLIQQNSIMNTPVYPVPKPDGKWRMVLDYREVNKTIPLIAAQNQHSAGILSSIFRGKYKTTLDLSNGFWAHSITPESYWLTAFTWLGQQYCWTRLPQGFLNSPALFNADVVDLLKEVPNVQVYVDDIYISHDDPREHLEQLEKVFSLLLNAGYVVSLKKSEIAQHEVEFLGFNITKEGRGLTETFKQKLLNITPPRDLKQLQSILGLLNFARNFIPNFSELVKPLYNIIATAPGKYITWTTDNSQQLQNIISMLNSAENLEERNPEVRLIMKVNTSPSAGYIRFYNEFAKRPIMYLNYVYTKAEVKFTNTEKLLTTIHKGLIKALDLGMGQEILVYSPIVSMTKIQKTPLPERKALPIRWITWMSYLEDPRIQFHYDKTLPELQQVPTVTDDIIAKIKHPSEFSMVFYTDGSAIKHPNVNKSHNAGMGIAQVQFKPEFTVINTWSIPLGDHTAQLAEVAAVEFACKKALKIDGPVLIVTDSFYVAESVNKELPYWQSNGFFNNKKKPLKHVSKWKSIADCIQLKPDIIIIHEKGHQPTASTFHTEGNNLADKLATQGSYVVNAGKRTADGSEFEKRTADGSEFESPKKKAKVE

SEQ ID NO: 623 - protein, 2168 aa, synthetic construct
  source 1..2168: note = Description of Artificial Sequence: Synthetic polypeptide
MPAAKRVKLDGGDKKYSIGLDIGTNSVGWAVITDEYKVPSKKFKVLGNTDRHSIKKNLIGALLFDSGETAEATRLKRTARRRYTRRKNRICYLQEIFSNEMAKVDDSFFHRLEESFLVEEDKKHERHPIFGNIVDEVAYHEKYPTIYHLRKKLVDSTDKADLRLIYLALAHMIKFRGHFLIEGDLNPDNSDVDKLFIQLVQTYNQLFEENPINASGVDAKAILSARLSKSRRLENLIAQLPGEKKNGLFGNLIALSLGLTPNFKSNFDLAEDAKLQLSKDTYDDDLDNLLAQIGDQYADLFLAAKNLSDAILLSDILRVNTEITKAPLSASMIKRYDEHHQDLTLLKALVRQQLPEKYKEIFFDQSKNGYAGYIDGGASQEEFYKFIKPILEKMDGTEELLVKLNREDLLRKQRTFDNGSIPHQIHLGELHAILRRQEDFYPFLKDNREKIEKILTFRIPYYVGPLARGNSRFAWMTRKSEETITPWNFEEVVDKGASAQSFIERMTNFDKNLPNEKVLPKHSLLYEYFTVYNELTKVKYVTEGMRKPAFLSGEQKKAIVDLLFKTNRKVTVKQLKEDYFKKIECFDSVEISGVEDRFNASLGTYHDLLKIIKDKDFLDNEENEDILEDIVLTLTLFEDREMIEERLKTYAHLFDDKVMKQLKRRRYTGWGRLSRKLINGIRDKQSGKTILDFLKSDGFANRNFMQLIHDDSLTFKEDIQKAQVSGQGDSLHEHIANLAGSPAIKKGILQTVKVVDELVKVMGRHKPENIVIEMARENQTTQKGQKNSRERMKRIEEGIKELGSQILKEHPVENTQLQNEKLYLYYLQNGRDMYVDQELDINRLSDYDVDHIVPQSFLKDDSIDNKVLTRSDKARGKSDNVPSEEVVKKMKNYWRQLLNAKLITQRKFDNLTKAERGGLSELDKAGFIKRQLVETRQITKHVAQILDSRMNTKYDENDKLIREVKVITLKSKLVSDFRKDFQFYKVREINNYHHAHDAYLNAVVGTALIKKYPKLESEFVYGDYKVYDVRKMIAKSEQEIGKATAKYFFYSNIMNFFKTEITLANGEIRKRPLIETNGETGEIVWDKGRDFATVRKVLSMPQVNIVKKTEVQTGGFSKESILPKRNSDKLIARKKDWDPKKYGGFDSPTVAYSVLVVAKVEKGKSKKLKSVKELLGITIMERSSFEKNPIDFLEAKGYKEVKKDLIIKLPKYSLFELENGRKRMLASAGELQKGNELALPSKYVNFLYLASHYEKLKGSPEDNEQKQLFVEQHKHYLDEIIEQISEFSKRVILADANLDKVLSAYNKHRDKPIREQAENIIHLFTLTNLGAPAAFKYFDTTIDRKRYTSTKEVLDATLIHQSITGLYETRIDLSQLGGDGGGGGGGMDPLQLLQPLEAEIKGTKLKAHWNSGATITCVPQAFLEEEVPIKNIWIKTIHGEKEQPVYYLTFKIQGRKVEAEVISSPYDYILVSPSDIPWLMKKPLQLTTLVPLQEYEERLLKQTMLTGSYKEKLQSLFLKYDALWQHWENQVGHRRIKPHHIATGTVNPRPQKQYPINPKAKASIQTVINDLLKQGVLIQQNSIMNTPVYPVPKPDGKWRMVLDYREVNKTIPLIAAQNQHSAGILSSIFRGKYKTTLDLSNGFWAHSITPESYWLTAFTWLGQQYCWTRLPQGFLNSPALFNADVVDLLKEVPNVQVYVDDIYISHDDPREHLEQLEKVFSLLLNAGYVVSLKKSEIAQHEVEFLGFNITKEGRGLTETFKQKLLNITPPRDLKQLQSILGLLNFARNFIPNFSELVKPLYNIIATAPGKYITWTTDNSQQLQNIISMLNSAENLEERNPEVRLIMKVNTSPSAGYIRFYNEFAKRPIMYLNYVYTKAEVKFTNTEKLLTTIHKGLIKALDLGMGQEILVYSPIVSMTKIQKTPLPERKALPIRWITWMSYLEDPRIQFHYDKTLPELQQVPTVTDDIIAKIKHPSEFSMVFYTDGSAIKHPNVNKSHNAGMGIAQVQFKPEFTVINTWSIPLGDHTAQLAEVAAVEFACKKALKIDGPVLIVTDSFYVAESVNKELPYWQSNGFFNNKKKPLKHVSKWKSIADCIQLKPDIIIIHEKGHQPTASTFHTEGNNLADKLATQGSYVVNAGKRTADGSEFEKRTADGSEFESPKKKAKVE

SEQ ID NO: 624 - protein, 2180 aa, synthetic construct
  source 1..2180: note = Description of Artificial Sequence: Synthetic polypeptide
MPAAKRVKLDGGDKKYSIGLDIGTNSVGWAVITDEYKVPSKKFKVLGNTDRHSIKKNLIGALLFDSGETAEATRLKRTARRRYTRRKNRICYLQEIFSNEMAKVDDSFFHRLEESFLVEEDKKHERHPIFGNIVDEVAYHEKYPTIYHLRKKLVDSTDKADLRLIYLALAHMIKFRGHFLIEGDLNPDNSDVDKLFIQLVQTYNQLFEENPINASGVDAKAILSARLSKSRRLENLIAQLPGEKKNGLFGNLIALSLGLTPNFKSNFDLAEDAKLQLSKDTYDDDLDNLLAQIGDQYADLFLAAKNLSDAILLSDILRVNTEITKAPLSASMIKRYDEHHQDLTLLKALVRQQLPEKYKEIFFDQSKNGYAGYIDGGASQEEFYKFIKPILEKMDGTEELLVKLNREDLLRKQRTFDNGSIPHQIHLGELHAILRRQEDFYPFLKDNREKIEKILTFRIPYYVGPLARGNSRFAWMTRKSEETITPWNFEEVVDKGASAQSFIERMTNFDKNLPNEKVLPKHSLLYEYFTVYNELTKVKYVTEGMRKPAFLSGEQKKAIVDLLFKTNRKVTVKQLKEDYFKKIECFDSVEISGVEDRFNASLGTYHDLLKIIKDKDFLDNEENEDILEDIVLTLTLFEDREMIEERLKTYAHLFDDKVMKQLKRRRYTGWGRLSRKLINGIRDKQSGKTILDFLKSDGFANRNFMQLIHDDSLTFKEDIQKAQVSGQGDSLHEHIANLAGSPAIKKGILQTVKVVDELVKVMGRHKPENIVIEMARENQTTQKGQKNSRERMKRIEEGIKELGSQILKEHPVENTQLQNEKLYLYYLQNGRDMYVDQELDINRLSDYDVDHIVPQSFLKDDSIDNKVLTRSDKARGKSDNVPSEEVVKKMKNYWRQLLNAKLITQRKFDNLTKAERGGLSELDKAGFIKRQLVETRQITKHVAQILDSRMNTKYDENDKLIREVKVITLKSKLVSDFRKDFQFYKVREINNYHHAHDAYLNAVVGTALIKKYPKLESEFVYGDYKVYDVRKMIAKSEQEIGKATAKYFFYSNIMNFFKTEITLANGEIRKRPLIETNGETGEIVWDKGRDFATVRKVLSMPQVNIVKKTEVQTGGFSKESILPKRNSDKLIARKKDWDPKKYGGFDSPTVAYSVLVVAKVEKGKSKKLKSVKELLGITIMERSSFEKNPIDFLEAKGYKEVKKDLIIKLPKYSLFELENGRKRMLASAGELQKGNELALPSKYVNFLYLASHYEKLKGSPEDNEQKQLFVEQHKHYLDEIIEQISEFSKRVILADANLDKVLSAYNKHRDKPIREQAENIIHLFTLTNLGAPAAFKYFDTTIDRKRYTSTKEVLDATLIHQSITGLYETRIDLSQLGGDGGEAAAKEAAAKEAAAKGGMDPLQLLQPLEAEIKGTKLKAHWNSGATITCVPQAFLEEEVPIKNIWIKTIHGEKEQPVYYLTFKIQGRKVEAEVISSPYDYILVSPSDIPWLMKKPLQLTTLVPLQEYEERLLKQTMLTGSYKEKLQSLFLKYDALWQHWENQVGHRRIKPHHIATGTVNPRPQKQYPINPKAKASIQTVINDLLKQGVLIQQNSIMNTPVYPVPKPDGKWRMVLDYREVNKTIPLIAAQNQHSAGILSSIFRGKYKTTLDLSNGFWAHSITPESYWLTAFTWLGQQYCWTRLPQGFLNSPALFNADVVDLLKEVPNVQVYVDDIYISHDDPREHLEQLEKVFSLLLNAGYVVSLKKSEIAQHEVEFLGFNITKEGRGLTETFKQKLLNITPPRDLKQLQSILGLLNFARNFIPNFSELVKPLYNIIATAPGKYITWTTDNSQQLQNIISMLNSAENLEERNPEVRLIMKVNTSPSAGYIRFYNEFAKRPIMYLNYVYTKAEVKFTNTEKLLTTIHKGLIKALDLGMGQEILVYSPIVSMTKIQKTPLPERKALPIRWITWMSYLEDPRIQFHYDKTLPELQQVPTVTDDIIAKIKHPSEFSMVFYTDGSAIKHPNVNKSHNAGMGIAQVQFKPEFTVINTWSIPLGDHTAQLAEVAAVEFACKKALKIDGPVLIVTDSFYVAESVNKELPYWQSNGFFNNKKKPLKHVSKWKSIADCIQLKPDIIIIHEKGHQPTASTFHTEGNNLADKLATQGSYVVNAGKRTADGSEFEKRTADGSEFESPKKKAKVE

SEQ ID NO: 625 - protein, 2173 aa, synthetic construct
  source 1..2173: note = Description of Artificial Sequence: Synthetic polypeptide
MPAAKRVKLDGGDKKYSIGLDIGTNSVGWAVITDEYKVPSKKFKVLGNTDRHSIKKNLIGALLFDSGETAEATRLKRTARRRYTRRKNRICYLQEIFSNEMAKVDDSFFHRLEESFLVEEDKKHERHPIFGNIVDEVAYHEKYPTIYHLRKKLVDSTDKADLRLIYLALAHMIKFRGHFLIEGDLNPDNSDVDKLFIQLVQTYNQLFEENPINASGVDAKAILSARLSKSRRLENLIAQLPGEKKNGLFGNLIALSLGLTPNFKSNFDLAEDAKLQLSKDTYDDDLDNLLAQIGDQYADLFLAAKNLSDAILLSDILRVNTEITKAPLSASMIKRYDEHHQDLTLLKALVRQQLPEKYKEIFFDQSKNGYAGYIDGGASQEEFYKFIKPILEKMDGTEELLVKLNREDLLRKQRTFDNGSIPHQIHLGELHAILRRQEDFYPFLKDNREKIEKILTFRIPYYVGPLARGNSRFAWMTRKSEETITPWNFEEVVDKGASAQSFIERMTNFDKNLPNEKVLPKHSLLYEYFTVYNELTKVKYVTEGMRKPAFLSGEQKKAIVDLLFKTNRKVTVKQLKEDYFKKIECFDSVEISGVEDRFNASLGTYHDLLKIIKDKDFLDNEENEDILEDIVLTLTLFEDREMIEERLKTYAHLFDDKVMKQLKRRRYTGWGRLSRKLINGIRDKQSGKTILDFLKSDGFANRNFMQLIHDDSLTFKEDIQKAQVSGQGDSLHEHIANLAGSPAIKKGILQTVKVVDELVKVMGRHKPENIVIEMARENQTTQKGQKNSRERMKRIEEGIKELGSQILKEHPVENTQLQNEKLYLYYLQNGRDMYVDQELDINRLSDYDVDHIVPQSFLKDDSIDNKVLTRSDKARGKSDNVPSEEVVKKMKNYWRQLLNAKLITQRKFDNLTKAERGGLSELDKAGFIKRQLVETRQITKHVAQILDSRMNTKYDENDKLIREVKVITLKSKLVSDFRKDFQFYKVREINNYHHAHDAYLNAVVGTALIKKYPKLESEFVYGDYKVYDVRKMIAKSEQEIGKATAKYFFYSNIMNFFKTEITLANGEIRKRPLIETNGETGEIVWDKGRDFATVRKVLSMPQVNIVKKTEVQTGGFSKESILPKRNSDKLIARKKDWDPKKYGGFDSPTVAYSVLVVAKVEKGKSKKLKSVKELLGITIMERSSFEKNPIDFLEAKGYKEVKKDLIIKLPKYSLFELENGRKRMLASAGELQKGNELALPSKYVNFLYLASHYEKLKGSPEDNEQKQLFVEQHKHYLDEIIEQISEFSKRVILADANLDKVLSAYNKHRDKPIREQAENIIHLFTLTNLGAPAAFKYFDTTIDRKRYTSTKEVLDATLIHQSITGLYETRIDLSQLGGDGGEAAAKGGGGGMDPLQLLQPLEAEIKGTKLKAHWNSGATITCVPQAFLEEEVPIKNIWIKTIHGEKEQPVYYLTFKIQGRKVEAEVISSPYDYILVSPSDIPWLMKKPLQLTTLVPLQEYEERLLKQTMLTGSYKEKLQSLFLKYDALWQHWENQVGHRRIKPHHIATGTVNPRPQKQYPINPKAKASIQTVINDLLKQGVLIQQNSIMNTPVYPVPKPDGKWRMVLDYREVNKTIPLIAAQNQHSAGILSSIFRGKYKTTLDLSNGFWAHSITPESYWLTAFTWLGQQYCWTRLPQGFLNSPALFNADVVDLLKEVPNVQVYVDDIYISHDDPREHLEQLEKVFSLLLNAGYVVSLKKSEIAQHEVEFLGFNITKEGRGLTETFKQKLLNITPPRDLKQLQSILGLLNFARNFIPNFSELVKPLYNIIATAPGKYITWTTDNSQQLQNIISMLNSAENLEERNPEVRLIMKVNTSPSAGYIRFYNEFAKRPIMYLNYVYTKAEVKFTNTEKLLTTIHKGLIKALDLGMGQEILVYSPIVSMTKIQKTPLPERKALPIRWITWMSYLEDPRIQFHYDKTLPELQQVPTVTDDIIAKIKHPSEFSMVFYTDGSAIKHPNVNKSHNAGMGIAQVQFKPEFTVINTWSIPLGDHTAQLAEVAAVEFACKKALKIDGPVLIVTDSFYVAESVNKELPYWQSNGFFNNKKKPLKHVSKWKSIADCIQLKPDIIIIHEKGHQPTASTFHTEGNNLADKLATQGSYVVNAGKRTADGSEFEKRTADGSEFESPKKKAKVE

SEQ ID NO: 626 - protein, 2176 aa, synthetic construct
  source 1..2176: note = Description of Artificial Sequence: Synthetic polypeptide
MPAAKRVKLDGGDKKYSIGLDIGTNSVGWAVITDEYKVPSKKFKVLGNTDRHSIKKNLIGALLFDSGETAEATRLKRTARRRYTRRKNRICYLQEIFSNEMAKVDDSFFHRLEESFLVEEDKKHERHPIFGNIVDEVAYHEKYPTIYHLRKKLVDSTDKADLRLIYLALAHMIKFRGHFLIEGDLNPDNSDVDKLFIQLVQTYNQLFEENPINASGVDAKAILSARLSKSRRLENLIAQLPGEKKNGLFGNLIALSLGLTPNFKSNFDLAEDAKLQLSKDTYDDDLDNLLAQIGDQYADLFLAAKNLSDAILLSDILRVNTEITKAPLSASMIKRYDEHHQDLTLLKALVRQQLPEKYKEIFFDQSKNGYAGYIDGGASQEEFYKFIKPILEKMDGTEELLVKLNREDLLRKQRTFDNGSIPHQIHLGELHAILRRQEDFYPFLKDNREKIEKILTFRIPYYVGPLARGNSRFAWMTRKSEETITPWNFEEVVDKGASAQSFIERMTNFDKNLPNEKVLPKHSLLYEYFTVYNELTKVKYVTEGMRKPAFLSGEQKKAIVDLLFKTNRKVTVKQLKEDYFKKIECFDSVEISGVEDRFNASLGTYHDLLKIIKDKDFLDNEENEDILEDIVLTLTLFEDREMIEERLKTYAHLFDDKVMKQLKRRRYTGWGRLSRKLINGIRDKQSGKTILDFLKSDGFANRNFMQLIHDDSLTFKEDIQKAQVSGQGDSLHEHIANLAGSPAIKKGILQTVKVVDELVKVMGRHKPENIVIEMARENQTTQKGQKNSRERMKRIEEGIKELGSQILKEHPVENTQLQNEKLYLYYLQNGRDMYVDQELDINRLSDYDVDHIVPQSFLKDDSIDNKVLTRSDKARGKSDNVPSEEVVKKMKNYWRQLLNAKLITQRKFDNLTKAERGGLSELDKAGFIKRQLVETRQITKHVAQILDSRMNTKYDENDKLIREVKVITLKSKLVSDFRKDFQFYKVREINNYHHAHDAYLNAVVGTALIKKYPKLESEFVYGDYKVYDVRKMIAKSEQEIGKATAKYFFYSNIMNFFKTEITLANGEIRKRPLIETNGETGEIVWDKGRDFATVRKVLSMPQVNIVKKTEVQTGGFSKESILPKRNSDKLIARKKDWDPKKYGGFDSPTVAYSVLVVAKVEKGKSKKLKSVKELLGITIMERSSFEKNPIDFLEAKGYKEVKKDLIIKLPKYSLFELENGRKRMLASAGELQKGNELALPSKYVNFLYLASHYEKLKGSPEDNEQKQLFVEQHKHYLDEIIEQISEFSKRVILADANLDKVLSAYNKHRDKPIREQAENIIHLFTLTNLGAPAAFKYFDTTIDRKRYTSTKEVLDATLIHQSITGLYETRIDLSQLGGDGGEAAAKGGGGGSGGMDPLQLLQPLEAEIKGTKLKAHWNSGATITCVPQAFLEEEVPIKNIWIKTIHGEKEQPVYYLTFKIQGRKVEAEVISSPYDYILVSPSDIPWLMKKPLQLTTLVPLQEYEERLLKQTMLTGSYKEKLQSLFLKYDALWQHWENQVGHRRIKPHHIATGTVNPRPQKQYPINPKAKASIQTVINDLLKQGVLIQQNSIMNTPVYPVPKPDGKWRMVLDYREVNKTIPLIAAQNQHSAGILSSIFRGKYKTTLDLSNGFWAHSITPESYWLTAFTWLGQQYCWTRLPQGFLNSPALFNADVVDLLKEVPNVQVYVDDIYISHDDPREHLEQLEKVFSLLLNAGYVVSLKKSEIAQHEVEFLGFNITKEGRGLTETFKQKLLNITPPRDLKQLQSILGLLNFARNFIPNFSELVKPLYNIIATAPGKYITWTTDNSQQLQNIISMLNSAENLEERNPEVRLIMKVNTSPSAGYIRFYNEFAKRPIMYLNYVYTKAEVKFTNTEKLLTTIHKGLIKALDLGMGQEILVYSPIVSMTKIQKTPLPERKALPIRWITWMSYLEDPRIQFHYDKTLPELQQVPTVTDDIIAKIKHPSEFSMVFYTDGSAIKHPNVNKSHNAGMGIAQVQFKPEFTVINTWSIPLGDHTAQLAEVAAVEFACKKALKIDGPVLIVTDSFYVAESVNKELPYWQSNGFFNNKKKPLKHVSKWKSIADCIQLKPDIIIIHEKGHQPTASTFHTEGNNLADKLATQGSYVVNAGKRTADGSEFEKRTADGSEFESPKKKAKVE

SEQ ID NO: 627 - protein, 2177 aa, synthetic construct
  source 1..2177: note = Description of Artificial Sequence: Synthetic polypeptide
MPAAKRVKLDGGDKKYSIGLDIGTNSVGWAVITDEYKVPSKKFKVLGNTDRHSIKKNLIGALLFDSGETAEATRLKRTARRRYTRRKNRICYLQEIFSNEMAKVDDSFFHRLEESFLVEEDKKHERHPIFGNIVDEVAYHEKYPTIYHLRKKLVDSTDKADLRLIYLALAHMIKFRGHFLIEGDLNPDNSDVDKLFIQLVQTYNQLFEENPINASGVDAKAILSARLSKSRRLENLIAQLPGEKKNGLFGNLIALSLGLTPNFKSNFDLAEDAKLQLSKDTYDDDLDNLLAQIGDQYADLFLAAKNLSDAILLSDILRVNTEITKAPLSASMIKRYDEHHQDLTLLKALVRQQLPEKYKEIFFDQSKNGYAGYIDGGASQEEFYKFIKPILEKMDGTEELLVKLNREDLLRKQRTFDNGSIPHQIHLGELHAILRRQEDFYPFLKDNREKIEKILTFRIPYYVGPLARGNSRFAWMTRKSEETITPWNFEEVVDKGASAQSFIERMTNFDKNLPNEKVLPKHSLLYEYFTVYNELTKVKYVTEGMRKPAFLSGEQKKAIVDLLFKTNRKVTVKQLKEDYFKKIECFDSVEISGVEDRFNASLGTYHDLLKIIKDKDFLDNEENEDILEDIVLTLTLFEDREMIEERLKTYAHLFDDKVMKQLKRRRYTGWGRLSRKLINGIRDKQSGKTILDFLKSDGFANRNFMQLIHDDSLTFKEDIQKAQVSGQGDSLHEHIANLAGSPAIKKGILQTVKVVDELVKVMGRHKPENIVIEMARENQTTQKGQKNSRERMKRIEEGIKELGSQILKEHPVENTQLQNEKLYLYYLQNGRDMYVDQELDINRLSDYDVDHIVPQSFLKDDSIDNKVLTRSDKARGKSDNVPSEEVVKKMKNYWRQLLNAKLITQRKFDNLTKAERGGLSELDKAGFIKRQLVETRQITKHVAQILDSRMNTKYDENDKLIREVKVITLKSKLVSDFRKDFQFYKVREINNYHHAHDAYLNAVVGTALIKKYPKLESEFVYGDYKVYDVRKMIAKSEQEIGKATAKYFFYSNIMNFFKTEITLANGEIRKRPLIETNGETGEIVWDKGRDFATVRKVLSMPQVNIVKKTEVQTGGFSKESILPKRNSDKLIARKKDWDPKKYGGFDSPTVAYSVLVVAKVEKGKSKKLKSVKELLGITIMERSSFEKNPIDFLEAKGYKEVKKDLIIKLPKYSLFELENGRKRMLASAGELQKGNELALPSKYVNFLYLASHYEKLKGSPEDNEQKQLFVEQHKHYLDEIIEQISEFSKRVILADANLDKVLSAYNKHRDKPIREQAENIIHLFTLTNLGAPAAFKYFDTTIDRKRYTSTKEVLDATLIHQSITGLYETRIDLSQLGGDGGGSSGSSGSSGSSGGMDPLQLLQPLEAEIKGTKLKAHWNSGATITCVPQAFLEEEVPIKNIWIKTIHGEKEQPVYYLTFKIQGRKVEAEVISSPYDYILVSPSDIPWLMKKPLQLTTLVPLQEYEERLLKQTMLTGSYKEKLQSLFLKYDALWQHWENQVGHRRIKPHHIATGTVNPRPQKQYPINPKAKASIQTVINDLLKQGVLIQQNSIMNTPVYPVPKPDGKWRMVLDYREVNKTIPLIAAQNQHSAGILSSIFRGKYKTTLDLSNGFWAHSITPESYWLTAFTWLGQQYCWTRLPQGFLNSPALFNADVVDLLKEVPNVQVYVDDIYISHDDPREHLEQLEKVFSLLLNAGYVVSLKKSEIAQHEVEFLGFNITKEGRGLTETFKQKLLNITPPRDLKQLQSILGLLNFARNFIPNFSELVKPLYNIIATAPGKYITWTTDNSQQLQNIISMLNSAENLEERNPEVRLIMKVNTSPSAGYIRFYNEFAKRPIMYLNYVYTKAEVKFTNTEKLLTTIHKGLIKALDLGMGQEILVYSPIVSMTKIQKTPLPERKALPIRWITWMSYLEDPRIQFHYDKTLPELQQVPTVTDDIIAKIKHPSEFSMVFYTDGSAIKHPNVNKSHNAGMGIAQVQFKPEFTVINTWSIPLGDHTAQLAEVAAVEFACKKALKIDGPVLIVTDSFYVAESVNKELPYWQSNGFFNNKKKPLKHVSKWKSIADCIQLKPDIIIIHEKGHQPTASTFHTEGNNLADKLATQGSYVVNAGKRTADGSEFEKRTADGSEFESPKKKAKVE

SEQ ID NO: 628 - protein, 2176 aa, synthetic construct
  source 1..2176: note = Description of Artificial Sequence: Synthetic polypeptide
MPAAKRVKLDGGDKKYSIGLDIGTNSVGWAVITDEYKVPSKKFKVLGNTDRHSIKKNLIGALLFDSGETAEATRLKRTARRRYTRRKNRICYLQEIFSNEMAKVDDSFFHRLEESFLVEEDKKHERHPIFGNIVDEVAYHEKYPTIYHLRKKLVDSTDKADLRLIYLALAHMIKFRGHFLIEGDLNPDNSDVDKLFIQLVQTYNQLFEENPINASGVDAKAILSARLSKSRRLENLIAQLPGEKKNGLFGNLIALSLGLTPNFKSNFDLAEDAKLQLSKDTYDDDLDNLLAQIGDQYADLFLAAKNLSDAILLSDILRVNTEITKAPLSASMIKRYDEHHQDLTLLKALVRQQLPEKYKEIFFDQSKNGYAGYIDGGASQEEFYKFIKPILEKMDGTEELLVKLNREDLLRKQRTFDNGSIPHQIHLGELHAILRRQEDFYPFLKDNREKIEKILTFRIPYYVGPLARGNSRFAWMTRKSEETITPWNFEEVVDKGASAQSFIERMTNFDKNLPNEKVLPKHSLLYEYFTVYNELTKVKYVTEGMRKPAFLSGEQKKAIVDLLFKTNRKVTVKQLKEDYFKKIECFDSVEISGVEDRFNASLGTYHDLLKIIKDKDFLDNEENEDILEDIVLTLTLFEDREMIEERLKTYAHLFDDKVMKQLKRRRYTGWGRLSRKLINGIRDKQSGKTILDFLKSDGFANRNFMQLIHDDSLTFKEDIQKAQVSGQGDSLHEHIANLAGSPAIKKGILQTVKVVDELVKVMGRHKPENIVIEMARENQTTQKGQKNSRERMKRIEEGIKELGSQILKEHPVENTQLQNEKLYLYYLQNGRDMYVDQELDINRLSDYDVDHIVPQSFLKDDSIDNKVLTRSDKARGKSDNVPSEEVVKKMKNYWRQLLNAKLITQRKFDNLTKAERGGLSELDKAGFIKRQLVETRQITKHVAQILDSRMNTKYDENDKLIREVKVITLKSKLVSDFRKDFQFYKVREINNYHHAHDAYLNAVVGTALIKKYPKLESEFVYGDYKVYDVRKMIAKSEQEIGKATAKYFFYSNIMNFFKTEITLANGEIRKRPLIETNGETGEIVWDKGRDFATVRKVLSMPQVNIVKKTEVQTGGFSKESILPKRNSDKLIARKKDWDPKKYGGFDSPTVAYSVLVVAKVEKGKSKKLKSVKELLGITIMERSSFEKNPIDFLEAKGYKEVKKDLIIKLPKYSLFELENGRKRMLASAGELQKGNELALPSKYVNFLYLASHYEKLKGSPEDNEQKQLFVEQHKHYLDEIIEQISEFSKRVILADANLDKVLSAYNKHRDKPIREQAENIIHLFTLTNLGAPAAFKYFDTTIDRKRYTSTKEVLDATLIHQSITGLYETRIDLSQLGGDGGGSSEAAAKGGSGGMDPLQLLQPLEAEIKGTKLKAHWNSGATITCVPQAFLEEEVPIKNIWIKTIHGEKEQPVYYLTFKIQGRKVEAEVISSPYDYILVSPSDIPWLMKKPLQLTTLVPLQEYEERLLKQTMLTGSYKEKLQSLFLKYDALWQHWENQVGHRRIKPHHIATGTVNPRPQKQYPINPKAKASIQTVINDLLKQGVLIQQNSIMNTPVYPVPKPDGKWRMVLDYREVNKTIPLIAAQNQHSAGILSSIFRGKYKTTLDLSNGFWAHSITPESYWLTAFTWLGQQYCWTRLPQGFLNSPALFNADVVDLLKEVPNVQVYVDDIYISHDDPREHLEQLEKVFSLLLNAGYVVSLKKSEIAQHEVEFLGFNITKEGRGLTETFKQKLLNITPPRDLKQLQSILGLLNFARNFIPNFSELVKPLYNIIATAPGKYITWTTDNSQQLQNIISMLNSAENLEERNPEVRLIMKVNTSPSAGYIRFYNEFAKRPIMYLNYVYTKAEVKFTNTEKLLTTIHKGLIKALDLGMGQEILVYSPIVSMTKIQKTPLPERKALPIRWITWMSYLEDPRIQFHYDKTLPELQQVPTVTDDIIAKIKHPSEFSMVFYTDGSAIKHPNVNKSHNAGMGIAQVQFKPEFTVINTWSIPLGDHTAQLAEVAAVEFACKKALKIDGPVLIVTDSFYVAESVNKELPYWQSNGFFNNKKKPLKHVSKWKSIADCIQLKPDIIIIHEKGHQPTASTFHTEGNNLADKLATQGSYVVNAGKRTADGSEFEKRTADGSEFESPKKKAKVE

SEQ ID NO: 629 - protein, 2176 aa, synthetic construct
  source 1..2176: note = Description of Artificial Sequence: Synthetic polypeptide
MPAAKRVKLDGGDKKYSIGLDIGTNSVGWAVITDEYKVPSKKFKVLGNTDRHSIKKNLIGALLFDSGETAEATRLKRTARRRYTRRKNRICYLQEIFSNEMAKVDDSFFHRLEESFLVEEDKKHERHPIFGNIVDEVAYHEKYPTIYHLRKKLVDSTDKADLRLIYLALAHMIKFRGHFLIEGDLNPDNSDVDKLFIQLVQTYNQLFEENPINASGVDAKAILSARLSKSRRLENLIAQLPGEKKNGLFGNLIALSLGLTPNFKSNFDLAEDAKLQLSKDTYDDDLDNLLAQIGDQYADLFLAAKNLSDAILLSDILRVNTEITKAPLSASMIKRYDEHHQDLTLLKALVRQQLPEKYKEIFFDQSKNGYAGYIDGGASQEEFYKFIKPILEKMDGTEELLVKLNREDLLRKQRTFDNGSIPHQIHLGELHAILRRQEDFYPFLKDNREKIEKILTFRIPYYVGPLARGNSRFAWMTRKSEETITPWNFEEVVDKGASAQSFIERMTNFDKNLPNEKVLPKHSLLYEYFTVYNELTKVKYVTEGMRKPAFLSGEQKKAIVDLLFKTNRKVTVKQLKEDYFKKIECFDSVEISGVEDRFNASLGTYHDLLKIIKDKDFLDNEENEDILEDIVLTLTLFEDREMIEERLKTYAHLFDDKVMKQLKRRRYTGWGRLSRKLINGIRDKQSGKTILDFLKSDGFANRNFMQLIHDDSLTFKEDIQKAQVSGQGDSLHEHIANLAGSPAIKKGILQTVKVVDELVKVMGRHKPENIVIEMARENQTTQKGQKNSRERMKRIEEGIKELGSQILKEHPVENTQLQNEKLYLYYLQNGRDMYVDQELDINRLSDYDVDHIVPQSFLKDDSIDNKVLTRSDKARGKSDNVPSEEVVKKMKNYWRQLLNAKLITQRKFDNLTKAERGGLSELDKAGFIKRQLVETRQITKHVAQILDSRMNTKYDENDKLIREVKVITLKSKLVSDFRKDFQFYKVREINNYHHAHDAYLNAVVGTALIKKYPKLESEFVYGDYKVYDVRKMIAKSEQEIGKATAKYFFYSNIMNFFKTEITLANGEIRKRPLIETNGETGEIVWDKGRDFATVRKVLSMPQVNIVKKTEVQTGGFSKESILPKRNSDKLIARKKDWDPKKYGGFDSPTVAYSVLVVAKVEKGKSKKLKSVKELLGITIMERSSFEKNPIDFLEAKGYKEVKKDLIIKLPKYSLFELENGRKRMLASAGELQKGNELALPSKYVNFLYLASHYEKLKGSPEDNEQKQLFVEQHKHYLDEIIEQISEFSKRVILADANLDKVLSAYNKHRDKPIREQAENIIHLFTLTNLGAPAAFKYFDTTIDRKRYTSTKEVLDATLIHQSITGLYETRIDLSQLGGDGGEAAAKGGSPAPGGMDPLQLLQPLEAEIKGTKLKAHWNSGATITCVPQAFLEEEVPIKNIWIKTIHGEKEQPVYYLTFKIQGRKVEAEVISSPYDYILVSPSDIPWLMKKPLQLTTLVPLQEYEERLLKQTMLTGSYKEKLQSLFLKYDALWQHWENQVGHRRIKPHHIATGTVNPRPQKQYPINPKAKASIQTVINDLLKQGVLIQQNSIMNTPVYPVPKPDGKWRMVLDYREVNKTIPLIAAQNQHSAGILSSIFRGKYKTTLDLSNGFWAHSITPESYWLTAFTWLGQQYCWTRLPQGFLNSPALFNADVVDLLKEVPNVQVYVDDIYISHDDPREHLEQLEKVFSLLLNAGYVVSLKKSEIAQHEVEFLGFNITKEGRGLTETFKQKLLNITPPRDLKQLQSILGLLNFARNFIPNFSELVKPLYNIIATAPGKYITWTTDNSQQLQNIISMLNSAENLEERNPEVRLIMKVNTSPSAGYIRFYNEFAKRPIMYLNYVYTKAEVKFTNTEKLLTTIHKGLIKALDLGMGQEILVYSPIVSMTKIQKTPLPERKALPIRWITWMSYLEDPRIQFHYDKTLPELQQVPTVTDDIIAKIKHPSEFSMVFYTDGSAIKHPNVNKSHNAGMGIAQVQFKPEFTVINTWSIPLGDHTAQLAEVAAVEFACKKALKIDGPVLIVTDSFYVAESVNKELPYWQSNGFFNNKKKPLKHVSKWKSIADCIQLKPDIIIIHEKGHQPTASTFHTEGNNLADKLATQGSYVVNAGKRTADGSEFEKRTADGSEFESPKKKAKVE

SEQ ID NO: 630 - protein, 2176 aa, synthetic construct
  source 1..2176: note = Description of Artificial Sequence: Synthetic polypeptide
MPAAKRVKLDGGDKKYSIGLDIGTNSVGWAVITDEYKVPSKKFKVLGNTDRHSIKKNLIGALLFDSGETAEATRLKRTARRRYTRRKNRICYLQEIFSNEMAKVDDSFFHRLEESFLVEEDKKHERHPIFGNIVDEVAYHEKYPTIYHLRKKLVDSTDKADLRLIYLALAHMIKFRGHFLIEGDLNPDNSDVDKLFIQLVQTYNQLFEENPINASGVDAKAILSARLSKSRRLENLIAQLPGEKKNGLFGNLIALSLGLTPNFKSNFDLAEDAKLQLSKDTYDDDLDNLLAQIGDQYADLFLAAKNLSDAILLSDILRVNTEITKAPLSASMIKRYDEHHQDLTLLKALVRQQLPEKYKEIFFDQSKNGYAGYIDGGASQEEFYKFIKPILEKMDGTEELLVKLNREDLLRKQRTFDNGSIPHQIHLGELHAILRRQEDFYPFLKDNREKIEKILTFRIPYYVGPLARGNSRFAWMTRKSEETITPWNFEEVVDKGASAQSFIERMTNFDKNLPNEKVLPKHSLLYEYFTVYNELTKVKYVTEGMRKPAFLSGEQKKAIVDLLFKTNRKVTVKQLKEDYFKKIECFDSVEISGVEDRFNASLGTYHDLLKIIKDKDFLDNEENEDILEDIVLTLTLFEDREMIEERLKTYAHLFDDKVMKQLKRRRYTGWGRLSRKLINGIRDKQSGKTILDFLKSDGFANRNFMQLIHDDSLTFKEDIQKAQVSGQGDSLHEHIANLAGSPAIKKGILQTVKVVDELVKVMGRHKPENIVIEMARENQTTQKGQKNSRERMKRIEEGIKELGSQILKEHPVENTQLQNEKLYLYYLQNGRDMYVDQELDINRLSDYDVDHIVPQSFLKDDSIDNKVLTRSDKARGKSDNVPSEEVVKKMKNYWRQLLNAKLITQRKFDNLTKAERGGLSELDKAGFIKRQLVETRQITKHVAQILDSRMNTKYDENDKLIREVKVITLKSKLVSDFRKDFQFYKVREINNYHHAHDAYLNAVVGTALIKKYPKLESEFVYGDYKVYDVRKMIAKSEQEIGKATAKYFFYSNIMNFFKTEITLANGEIRKRPLIETNGETGEIVWDKGRDFATVRKVLSMPQVNIVKKTEVQTGGFSKESILPKRNSDKLIARKKDWDPKKYGGFDSPTVAYSVLVVAKVEKGKSKKLKSVKELLGITIMERSSFEKNPIDFLEAKGYKEVKKDLIIKLPKYSLFELENGRKRMLASAGELQKGNELALPSKYVNFLYLASHYEKLKGSPEDNEQKQLFVEQHKHYLDEIIEQISEFSKRVILADANLDKVLSAYNKHRDKPIREQAENIIHLFTLTNLGAPAAFKYFDTTIDRKRYTSTKEVLDATLIHQSITGLYETRIDLSQLGGDGGGGGGGSEAAAKGGMDPLQLLQPLEAEIKGTKLKAHWNSGATITCVPQAFLEEEVPIKNIWIKTIHGEKEQPVYYLTFKIQGRKVEAEVISSPYDYILVSPSDIPWLMKKPLQLTTLVPLQEYEERLLKQTMLTGSYKEKLQSLFLKYDALWQHWENQVGHRRIKPHHIATGTVNPRPQKQYPINPKAKASIQTVINDLLKQGVLIQQNSIMNTPVYPVPKPDGKWRMVLDYREVNKTIPLIAAQNQHSAGILSSIFRGKYKTTLDLSNGFWAHSITPESYWLTAFTWLGQQYCWTRLPQGFLNSPALFNADVVDLLKEVPNVQVYVDDIYISHDDPREHLEQLEKVFSLLLNAGYVVSLKKSEIAQHEVEFLGFNITKEGRGLTETFKQKLLNITPPRDLKQLQSILGLLNFARNFIPNFSELVKPLYNIIATAPGKYITWTTDNSQQLQNIISMLNSAENLEERNPEVRLIMKVNTSPSAGYIRFYNEFAKRPIMYLNYVYTKAEVKFTNTEKLLTTIHKGLIKALDLGMGQEILVYSPIVSMTKIQKTPLPERKALPIRWITWMSYLEDPRIQFHYDKTLPELQQVPTVTDDIIAKIKHPSEFSMVFYTDGSAIKHPNVNKSHNAGMGIAQVQFKPEFTVINTWSIPLGDHTAQLAEVAAVEFACKKALKIDGPVLIVTDSFYVAESVNKELPYWQSNGFFNNKKKPLKHVSKWKSIADCIQLKPDIIIIHEKGHQPTASTFHTEGNNLADKLATQGSYVVNAGKRTADGSEFEKRTADGSEFESPKKKAKVE

SEQ ID NO: 631 - protein, 2174 aa, synthetic construct
  source 1..2174: note = Description of Artificial Sequence: Synthetic polypeptide
MPAAKRVKLDGGDKKYSIGLDIGTNSVGWAVITDEYKVPSKKFKVLGNTDRHSIKKNLIGALLFDSGETAEATRLKRTARRRYTRRKNRICYLQEIFSNEMAKVDDSFFHRLEESFLVEEDKKHERHPIFGNIVDEVAYHEKYPTIYHLRKKLVDSTDKADLRLIYLALAHMIKFRGHFLIEGDLNPDNSDVDKLFIQLVQTYNQLFEENPINASGVDAKAILSARLSKSRRLENLIAQLPGEKKNGLFGNLIALSLGLTPNFKSNFDLAEDAKLQLSKDTYDDDLDNLLAQIGDQYADLFLAAKNLSDAILLSDILRVNTEITKAPLSASMIKRYDEHHQDLTLLKALVRQQLPEKYKEIFFDQSKNGYAGYIDGGASQEEFYKFIKPILEKMDGTEELLVKLNREDLLRKQRTFDNGSIPHQIHLGELHAILRRQEDFYPFLKDNREKIEKILTFRIPYYVGPLARGNSRFAWMTRKSEETITPWNFEEVVDKGASAQSFIERMTNFDKNLPNEKVLPKHSLLYEYFTVYNELTKVKYVTEGMRKPAFLSGEQKKAIVDLLFKTNRKVTVKQLKEDYFKKIECFDSVEISGVEDRFNASLGTYHDLLKIIKDKDFLDNEENEDILEDIVLTLTLFEDREMIEERLKTYAHLFDDKVMKQLKRRRYTGWGRLSRKLINGIRDKQSGKTILDFLKSDGFANRNFMQLIHDDSLTFKEDIQKAQVSGQGDSLHEHIANLAGSPAIKKGILQTVKVVDELVKVMGRHKPENIVIEMARENQTTQKGQKNSRERMKRIEEGIKELGSQILKEHPVENTQLQNEKLYLYYLQNGRDMYVDQELDINRLSDYDVDHIVPQSFLKDDSIDNKVLTRSDKARGKSDNVPSEEVVKKMKNYWRQLLNAKLITQRKFDNLTKAERGGLSELDKAGFIKRQLVETRQITKHVAQILDSRMNTKYDENDKLIREVKVITLKSKLVSDFRKDFQFYKVREINNYHHAHDAYLNAVVGTALIKKYPKLESEFVYGDYKVYDVRKMIAKSEQEIGKATAKYFFYSNIMNFFKTEITLANGEIRKRPLIETNGETGEIVWDKGRDFATVRKVLSMPQVNIVKKTEVQTGGFSKESILPKRNSDKLIARKKDWDPKKYGGFDSPTVAYSVLVVAKVEKGKSKKLKSVKELLGITIMERSSFEKNPIDFLEAKGYKEVKKDLIIKLPKYSLFELENGRKRMLASAGELQKGNELALPSKYVNFLYLASHYEKLKGSPEDNEQKQLFVEQHKHYLDEIIEQISEFSKRVILADANLDKVLSAYNKHRDKPIREQAENIIHLFTLTNLGAPAAFKYFDTTIDRKRYTSTKEVLDATLIHQSITGLYETRIDLSQLGGDGGGGGGSSPAPGGMDPLQLLQPLEAEIKGTKLKAHWNSGATITCVPQAFLEEEVPIKNIWIKTIHGEKEQPVYYLTFKIQGRKVEAEVISSPYDYILVSPSDIPWLMKKPLQLTTLVPLQEYEERLLKQTMLTGSYKEKLQSLFLKYDALWQHWENQVGHRRIKPHHIATGTVNPRPQKQYPINPKAKASIQTVINDLLKQGVLIQQNSIMNTPVYPVPKPDGKWRMVLDYREVNKTIPLIAAQNQHSAGILSSIFRGKYKTTLDLSNGFWAHSITPESYWLTAFTWLGQQYCWTRLPQGFLNSPALFNADVVDLLKEVPNVQVYVDDIYISHDDPREHLEQLEKVFSLLLNAGYVVSLKKSEIAQHEVEFLGFNITKEGRGLTETFKQKLLNITPPRDLKQLQSILGLLNFARNFIPNFSELVKPLYNIIATAPGKYITWTTDNSQQLQNIISMLNSAENLEERNPEVRLIMKVNTSPSAGYIRFYNEFAKRPIMYLNYVYTKAEVKFTNTEKLLTTIHKGLIKALDLGMGQEILVYSPIVSMTKIQKTPLPERKALPIRWITWMSYLEDPRIQFHYDKTLPELQQVPTVTDDIIAKIKHPSEFSMVFYTDGSAIKHPNVNKSHNAGMGIAQVQFKPEFTVINTWSIPLGDHTAQLAEVAAVEFACKKALKIDGPVLIVTDSFYVAESVNKELPYWQSNGFFNNKKKPLKHVSKWKSIADCIQLKPDIIIIHEKGHQPTASTFHTEGNNLADKLATQGSYVVNAGKRTADGSEFEKRTADGSEFESPKKKAKVE

SEQ ID NO: 632 - protein, 2176 aa, synthetic construct
  source 1..2176: note = Description of Artificial Sequence: Synthetic polypeptide
MPAAKRVKLDGGDKKYSIGLDIGTNSVGWAVITDEYKVPSKKFKVLGNTDRHSIKKNLIGALLFDSGETAEATRLKRTARRRYTRRKNRICYLQEIFSNEMAKVDDSFFHRLEESFLVEEDKKHERHPIFGNIVDEVAYHEKYPTIYHLRKKLVDSTDKADLRLIYLALAHMIKFRGHFLIEGDLNPDNSDVDKLFIQLVQTYNQLFEENPINASGVDAKAILSARLSKSRRLENLIAQLPGEKKNGLFGNLIALSLGLTPNFKSNFDLAEDAKLQLSKDTYDDDLDNLLAQIGDQYADLFLAAKNLSDAILLSDILRVNTEITKAPLSASMIKRYDEHHQDLTLLKALVRQQLPEKYKEIFFDQSKNGYAGYIDGGASQEEFYKFIKPILEKMDGTEELLVKLNREDLLRKQRTFDNGSIPHQIHLGELHAILRRQEDFYPFLKDNREKIEKILTFRIPYYVGPLARGNSRFAWMTRKSEETITPWNFEEVVDKGASAQSFIERMTNFDKNLPNEKVLPKHSLLYEYFTVYNELTKVKYVTEGMRKPAFLSGEQKKAIVDLLFKTNRKVTVKQLKEDYFKKIECFDSVEISGVEDRFNASLGTYHDLLKIIKDKDFLDNEENEDILEDIVLTLTLFEDREMIEERLKTYAHLFDDKVMKQLKRRRYTGWGRLSRKLINGIRDKQSGKTILDFLKSDGFANRNFMQLIHDDSLTFKEDIQKAQVSGQGDSLHEHIANLAGSPAIKKGILQTVKVVDELVKVMGRHKPENIVIEMARENQTTQKGQKNSRERMKRIEEGIKELGSQILKEHPVENTQLQNEKLYLYYLQNGRDMYVDQELDINRLSDYDVDHIVPQSFLKDDSIDNKVLTRSDKARGKSDNVPSEEVVKKMKNYWRQLLNAKLITQRKFDNLTKAERGGLSELDKAGFIKRQLVETRQITKHVAQILDSRMNTKYDENDKLIREVKVITLKSKLVSDFRKDFQFYKVREINNYHHAHDAYLNAVVGTALIKKYPKLESEFVYGDYKVYDVRKMIAKSEQEIGKATAKYFFYSNIMNFFKTEITLANGEIRKRPLIETNGETGEIVWDKGRDFATVRKVLSMPQVNIVKKTEVQTGGFSKESILPKRNSDKLIARKKDWDPKKYGGFDSPTVAYSVLVVAKVEKGKSKKLKSVKELLGITIMERSSFEKNPIDFLEAKGYKEVKKDLIIKLPKYSLFELENGRKRMLASAGELQKGNELALPSKYVNFLYLASHYEKLKGSPEDNEQKQLFVEQHKHYLDEIIEQISEFSKRVILADANLDKVLSAYNKHRDKPIREQAENIIHLFTLTNLGAPAAFKYFDTTIDRKRYTSTKEVLDATLIHQSITGLYETRIDLSQLGGDGGEAAAKPAPGSSGGMDPLQLLQPLEAEIKGTKLKAHWNSGATITCVPQAFLEEEVPIKNIWIKTIHGEKEQPVYYLTFKIQGRKVEAEVISSPYDYILVSPSDIPWLMKKPLQLTTLVPLQEYEERLLKQTMLTGSYKEKLQSLFLKYDALWQHWENQVGHRRIKPHHIATGTVNPRPQKQYPINPKAKASIQTVINDLLKQGVLIQQNSIMNTPVYPVPKPDGKWRMVLDYREVNKTIPLIAAQNQHSAGILSSIFRGKYKTTLDLSNGFWAHSITPESYWLTAFTWLGQQYCWTRLPQGFLNSPALFNADVVDLLKEVPNVQVYVDDIYISHDDPREHLEQLEKVFSLLLNAGYVVSLKKSEIAQHEVEFLGFNITKEGRGLTETFKQKLLNITPPRDLKQLQSILGLLNFARNFIPNFSELVKPLYNIIATAPGKYITWTTDNSQQLQNIISMLNSAENLEERNPEVRLIMKVNTSPSAGYIRFYNEFAKRPIMYLNYVYTKAEVKFTNTEKLLTTIHKGLIKALDLGMGQEILVYSPIVSMTKIQKTPLPERKALPIRWITWMSYLEDPRIQFHYDKTLPELQQVPTVTDDIIAKIKHPSEFSMVFYTDGSAIKHPNVNKSHNAGMGIAQVQFKPEFTVINTWSIPLGDHTAQLAEVAAVEFACKKALKIDGPVLIVTDSFYVAESVNKELPYWQSNGFFNNKKKPLKHVSKWKSIADCIQLKPDIIIIHEKGHQPTASTFHTEGNNLADKLATQGSYVVNAGKRTADGSEFEKRTADGSEFESPKKKAKVE

SEQ ID NO: 633 - protein, 2176 aa, synthetic construct
  source 1..2176: note = Description of Artificial Sequence: Synthetic polypeptide
MPAAKRVKLDGGDKKYSIGLDIGTNSVGWAVITDEYKVPSKKFKVLGNTDRHSIKKNLIGALLFDSGETAEATRLKRTARRRYTRRKNRICYLQEIFSNEMAKVDDSFFHRLEESFLVEEDKKHERHPIFGNIVDEVAYHEKYPTIYHLRKKLVDSTDKADLRLIYLALAHMIKFRGHFLIEGDLNPDNSDVDKLFIQLVQTYNQLFEENPINASGVDAKAILSARLSKSRRLENLIAQLPGEKKNGLFGNLIALSLGLTPNFKSNFDLAEDAKLQLSKDTYDDDLDNLLAQIGDQYADLFLAAKNLSDAILLSDILRVNTEITKAPLSASMIKRYDEHHQDLTLLKALVRQQLPEKYKEIFFDQSKNGYAGYIDGGASQEEFYKFIKPILEKMDGTEELLVKLNREDLLRKQRTFDNGSIPHQIHLGELHAILRRQEDFYPFLKDNREKIEKILTFRIPYYVGPLARGNSRFAWMTRKSEETITPWNFEEVVDKGASAQSFIERMTNFDKNLPNEKVLPKHSLLYEYFTVYNELTKVKYVTEGMRKPAFLSGEQKKAIVDLLFKTNRKVTVKQLKEDYFKKIECFDSVEISGVEDRFNASLGTYHDLLKIIKDKDFLDNEENEDILEDIVLTLTLFEDREMIEERLKTYAHLFDDKVMKQLKRRRYTGWGRLSRKLINGIRDKQSGKTILDFLKSDGFANRNFMQLIHDDSLTFKEDIQKAQVSGQGDSLHEHIANLAGSPAIKKGILQTVKVVDELVKVMGRHKPENIVIEMARENQTTQKGQKNSRERMKRIEEGIKELGSQILKEHPVENTQLQNEKLYLYYLQNGRDMYVDQELDINRLSDYDVDHIVPQSFLKDDSIDNKVLTRSDKARGKSDNVPSEEVVKKMKNYWRQLLNAKLITQRKFDNLTKAERGGLSELDKAGFIKRQLVETRQITKHVAQILDSRMNTKYDENDKLIREVKVITLKSKLVSDFRKDFQFYKVREINNYHHAHDAYLNAVVGTALIKKYPKLESEFVYGDYKVYDVRKMIAKSEQEIGKATAKYFFYSNIMNFFKTEITLANGEIRKRPLIETNGETGEIVWDKGRDFATVRKVLSMPQVNIVKKTEVQTGGFSKESILPKRNSDKLIARKKDWDPKKYGGFDSPTVAYSVLVVAKVEKGKSKKLKSVKELLGITIMERSSFEKNPIDFLEAKGYKEVKKDLIIKLPKYSLFELENGRKRMLASAGELQKGNELALPSKYVNFLYLASHYEKLKGSPEDNEQKQLFVEQHKHYLDEIIEQISEFSKRVILADANLDKVLSAYNKHRDKPIREQAENIIHLFTLTNLGAPAAFKYFDTTIDRKRYTSTKEVLDATLIHQSITGLYETRIDLSQLGGDGGGGSPAPEAAAKGGMDPLQLLQPLEAEIKGTKLKAHWNSGATITCVPQAFLEEEVPIKNIWIKTIHGEKEQPVYYLTFKIQGRKVEAEVISSPYDYILVSPSDIPWLMKKPLQLTTLVPLQEYEERLLKQTMLTGSYKEKLQSLFLKYDALWQHWENQVGHRRIKPHHIATGTVNPRPQKQYPINPKAKASIQTVINDLLKQGVLIQQNSIMNTPVYPVPKPDGKWRMVLDYREVNKTIPLIAAQNQHSAGILSSIFRGKYKTTLDLSNGFWAHSITPESYWLTAFTWLGQQYCWTRLPQGFLNSPALFNADVVDLLKEVPNVQVYVDDIYISHDDPREHLEQLEKVFSLLLNAGYVVSLKKSEIAQHEVEFLGFNITKEGRGLTETFKQKLLNITPPRDLKQLQSILGLLNFARNFIPNFSELVKPLYNIIATAPGKYITWTTDNSQQLQNIISMLNSAENLEERNPEVRLIMKVNTSPSAGYIRFYNEFAKRPIMYLNYVYTKAEVKFTNTEKLLTTIHKGLIKALDLGMGQEILVYSPIVSMTKIQKTPLPERKALPIRWITWMSYLEDPRIQFHYDKTLPELQQVPTVTDDIIAKIKHPSEFSMVFYTDGSAIKHPNVNKSHNAGMGIAQVQFKPEFTVINTWSIPLGDHTAQLAEVAAVEFACKKALKIDGPVLIVTDSFYVAESVNKELPYWQSNGFFNNKKKPLKHVSKWKSIADCIQLKPDIIIIHEKGHQPTASTFHTEGNNLADKLATQGSYVVNAGKRTADGSEFEKRTADGSEFESPKKKAKVE

SEQ ID NO: 634 - protein, 2174 aa, synthetic construct
  source 1..2174: note = Description of Artificial Sequence: Synthetic polypeptide
MPAAKRVKLDGGDKKYSIGLDIGTNSVGWAVITDEYKVPSKKFKVLGNTDRHSIKKNLIGALLFDSGETAEATRLKRTARRRYTRRKNRICYLQEIFSNEMAKVDDSFFHRLEESFLVEEDKKHERHPIFGNIVDEVAYHEKYPTIYHLRKKLVDSTDKADLRLIYLALAHMIKFRGHFLIEGDLNPDNSDVDKLFIQLVQTYNQLFEENPINASGVDAKAILSARLSKSRRLENLIAQLPGEKKNGLFGNLIALSLGLTPNFKSNFDLAEDAKLQLSKDTYDDDLDNLLAQIGDQYADLFLAAKNLSDAILLSDILRVNTEITKAPLSASMIKRYDEHHQDLTLLKALVRQQLPEKYKEIFFDQSKNGYAGYIDGGASQEEFYKFIKPILEKMDGTEELLVKLNREDLLRKQRTFDNGSIPHQIHLGELHAILRRQEDFYPFLKDNREKIEKILTFRIPYYVGPLARGNSRFAWMTRKSEETITPWNFEEVVDKGASAQSFIERMTNFDKNLPNEKVLPKHSLLYEYFTVYNELTKVKYVTEGMRKPAFLSGEQKKAIVDLLFKTNRKVTVKQLKEDYFKKIECFDSVEISGVEDRFNASLGTYHDLLKIIKDKDFLDNEENEDILEDIVLTLTLFEDREMIEERLKTYAHLFDDKVMKQLKRRRYTGWGRLSRKLINGIRDKQSGKTILDFLKSDGFANRNFMQLIHDDSLTFKEDIQKAQVSGQGDSLHEHIANLAGSPAIKKGILQTVKVVDELVKVMGRHKPENIVIEMARENQTTQKGQKNSRERMKRIEEGIKELGSQILKEHPVENTQLQNEKLYLYYLQNGRDMYVDQELDINRLSDYDVDHIVPQSFLKDDSIDNKVLTRSDKARGKSDNVPSEEVVKKMKNYWRQLLNAKLITQRKFDNLTKAERGGLSELDKAGFIKRQLVETRQITKHVAQILDSRMNTKYDENDKLIREVKVITLKSKLVSDFRKDFQFYKVREINNYHHAHDAYLNAVVGTALIKKYPKLESEFVYGDYKVYDVRKMIAKSEQEIGKATAKYFFYSNIMNFFKTEITLANGEIRKRPLIETNGETGEIVWDKGRDFATVRKVLSMPQVNIVKKTEVQTGGFSKESILPKRNSDKLIARKKDWDPKKYGGFDSPTVAYSVLVVAKVEKGKSKKLKSVKELLGITIMERSSFEKNPIDFLEAKGYKEVKKDLIIKLPKYSLFELENGRKRMLASAGELQKGNELALPSKYVNFLYLASHYEKLKGSPEDNEQKQLFVEQHKHYLDEIIEQISEFSKRVILADANLDKVLSAYNKHRDKPIREQAENIIHLFTLTNLGAPAAFKYFDTTIDRKRYTSTKEVLDATLIHQSITGLYETRIDLSQLGGDGGGGGPAPGSSGGMDPLQLLQPLEAEIKGTKLKAHWNSGATITCVPQAFLEEEVPIKNIWIKTIHGEKEQPVYYLTFKIQGRKVEAEVISSPYDYILVSPSDIPWLMKKPLQLTTLVPLQEYEERLLKQTMLTGSYKEKLQSLFLKYDALWQHWENQVGHRRIKPHHIATGTVNPRPQKQYPINPKAKASIQTVINDLLKQGVLIQQNSIMNTPVYPVPKPDGKWRMVLDYREVNKTIPLIAAQNQHSAGILSSIFRGKYKTTLDLSNGFWAHSITPESYWLTAFTWLGQQYCWTRLPQGFLNSPALFNADVVDLLKEVPNVQVYVDDIYISHDDPREHLEQLEKVFSLLLNAGYVVSLKKSEIAQHEVEFLGFNITKEGRGLTETFKQKLLNITPPRDLKQLQSILGLLNFARNFIPNFSELVKPLYNIIATAPGKYITWTTDNSQQLQNIISMLNSAENLEERNPEVRLIMKVNTSPSAGYIRFYNEFAKRPIMYLNYVYTKAEVKFTNTEKLLTTIHKGLIKALDLGMGQEILVYSPIVSMTKIQKTPLPERKALPIRWITWMSYLEDPRIQFHYDKTLPELQQVPTVTDDIIAKIKHPSEFSMVFYTDGSAIKHPNVNKSHNAGMGIAQVQFKPEFTVINTWSIPLGDHTAQLAEVAAVEFACKKALKIDGPVLIVTDSFYVAESVNKELPYWQSNGFFNNKKKPLKHVSKWKSIADCIQLKPDIIIIHEKGHQPTASTFHTEGNNLADKLATQGSYVVNAGKRTADGSEFEKRTADGSEFESPKKKAKVE

SEQ ID NO: 635 - protein, 2174 aa, synthetic construct
  source 1..2174: note = Description of Artificial Sequence: Synthetic polypeptide
MPAAKRVKLDGGDKKYSIGLDIGTNSVGWAVITDEYKVPSKKFKVLGNTDRHSIKKNLIGALLFDSGETAEATRLKRTARRRYTRRKNRICYLQEIFSNEMAKVDDSFFHRLEESFLVEEDKKHERHPIFGNIVDEVAYHEKYPTIYHLRKKLVDSTDKADLRLIYLALAHMIKFRGHFLIEGDLNPDNSDVDKLFIQLVQTYNQLFEENPINASGVDAKAILSARLSKSRRLENLIAQLPGEKKNGLFGNLIALSLGLTPNFKSNFDLAEDAKLQLSKDTYDDDLDNLLAQIGDQYADLFLAAKNLSDAILLSDILRVNTEITKAPLSASMIKRYDEHHQDLTLLKALVRQQLPEKYKEIFFDQSKNGYAGYIDGGASQEEFYKFIKPILEKMDGTEELLVKLNREDLLRKQRTFDNGSIPHQIHLGELHAILRRQEDFYPFLKDNREKIEKILTFRIPYYVGPLARGNSRFAWMTRKSEETITPWNFEEVVDKGASAQSFIERMTNFDKNLPNEKVLPKHSLLYEYFTVYNELTKVKYVTEGMRKPAFLSGEQKKAIVDLLFKTNRKVTVKQLKEDYFKKIECFDSVEISGVEDRFNASLGTYHDLLKIIKDKDFLDNEENEDILEDIVLTLTLFEDREMIEERLKTYAHLFDDKVMKQLKRRRYTGWGRLSRKLINGIRDKQSGKTILDFLKSDGFANRNFMQLIHDDSLTFKEDIQKAQVSGQGDSLHEHIANLAGSPAIKKGILQTVKVVDELVKVMGRHKPENIVIEMARENQTTQKGQKNSRERMKRIEEGIKELGSQILKEHPVENTQLQNEKLYLYYLQNGRDMYVDQELDINRLSDYDVDHIVPQSFLKDDSIDNKVLTRSDKARGKSDNVPSEEVVKKMKNYWRQLLNAKLITQRKFDNLTKAERGGLSELDKAGFIKRQLVETRQITKHVAQILDSRMNTKYDENDKLIREVKVITLKSKLVSDFRKDFQFYKVREINNYHHAHDAYLNAVVGTALIKKYPKLESEFVYGDYKVYDVRKMIAKSEQEIGKATAKYFFYSNIMNFFKTEITLANGEIRKRPLIETNGETGEIVWDKGRDFATVRKVLSMPQVNIVKKTEVQTGGFSKESILPKRNSDKLIARKKDWDPKKYGGFDSPTVAYSVLVVAKVEKGKSKKLKSVKELLGITIMERSSFEKNPIDFLEAKGYKEVKKDLIIKLPKYSLFELENGRKRMLASAGELQKGNELALPSKYVNFLYLASHYEKLKGSPEDNEQKQLFVEQHKHYLDEIIEQISEFSKRVILADANLDKVLSAYNKHRDKPIREQAENIIHLFTLTNLGAPAAFKYFDTTIDRKRYTSTKEVLDATLIHQSITGLYETRIDLSQLGGDGGGGSGSSPAPGGMDPLQLLQPLEAEIKGTKLKAHWNSGATITCVPQAFLEEEVPIKNIWIKTIHGEKEQPVYYLTFKIQGRKVEAEVISSPYDYILVSPSDIPWLMKKPLQLTTLVPLQEYEERLLKQTMLTGSYKEKLQSLFLKYDALWQHWENQVGHRRIKPHHIATGTVNPRPQKQYPINPKAKASIQTVINDLLKQGVLIQQNSIMNTPVYPVPKPDGKWRMVLDYREVNKTIPLIAAQNQHSAGILSSIFRGKYKTTLDLSNGFWAHSITPESYWLTAFTWLGQQYCWTRLPQGFLNSPALFNADVVDLLKEVPNVQVYVDDIYISHDDPREHLEQLEKVFSLLLNAGYVVSLKKSEIAQHEVEFLGFNITKEGRGLTETFKQKLLNITPPRDLKQLQSILGLLNFARNFIPNFSELVKPLYNIIATAPGKYITWTTDNSQQLQNIISMLNSAENLEERNPEVRLIMKVNTSPSAGYIRFYNEFAKRPIMYLNYVYTKAEVKFTNTEKLLTTIHKGLIKALDLGMGQEILVYSPIVSMTKIQKTPLPERKALPIRWITWMSYLEDPRIQFHYDKTLPELQQVPTVTDDIIAKIKHPSEFSMVFYTDGSAIKHPNVNKSHNAGMGIAQVQFKPEFTVINTWSIPLGDHTAQLAEVAAVEFACKKALKIDGPVLIVTDSFYVAESVNKELPYWQSNGFFNNKKKPLKHVSKWKSIADCIQLKPDIIIIHEKGHQPTASTFHTEGNNLADKLATQGSYVVNAGKRTADGSEFEKRTADGSEFESPKKKAKVE

SEQ ID NO: 636 - protein, 2176 aa, synthetic construct
  source 1..2176: note = Description of Artificial Sequence: Synthetic polypeptide
MPAAKRVKLDGGDKKYSIGLDIGTNSVGWAVITDEYKVPSKKFKVLGNTDRHSIKKNLIGALLFDSGETAEATRLKRTARRRYTRRKNRICYLQEIFSNEMAKVDDSFFHRLEESFLVEEDKKHERHPIFGNIVDEVAYHEKYPTIYHLRKKLVDSTDKADLRLIYLALAHMIKFRGHFLIEGDLNPDNSDVDKLFIQLVQTYNQLFEENPINASGVDAKAILSARLSKSRRLENLIAQLPGEKKNGLFGNLIALSLGLTPNFKSNFDLAEDAKLQLSKDTYDDDLDNLLAQIGDQYADLFLAAKNLSDAILLSDILRVNTEITKAPLSASMIKRYDEHHQDLTLLKALVRQQLPEKYKEIFFDQSKNGYAGYIDGGASQEEFYKFIKPILEKMDGTEELLVKLNREDLLRKQRTFDNGSIPHQIHLGELHAILRRQEDFYPFLKDNREKIEKILTFRIPYYVGPLARGNSRFAWMTRKSEETITPWNFEEVVDKGASAQSFIERMTNFDKNLPNEKVLPKHSLLYEYFTVYNELTKVKYVTEGMRKPAFLSGEQKKAIVDLLFKTNRKVTVKQLKEDYFKKIECFDSVEISGVEDRFNASLGTYHDLLKIIKDKDFLDNEENEDILEDIVLTLTLFEDREMIEERLKTYAHLFDDKVMKQLKRRRYTGWGRLSRKLINGIRDKQSGKTILDFLKSDGFANRNFMQLIHDDSLTFKEDIQKAQVSGQGDSLHEHIANLAGSPAIKKGILQTVKVVDELVKVMGRHKPENIVIEMARENQTTQKGQKNSRERMKRIEEGIKELGSQILKEHPVENTQLQNEKLYLYYLQNGRDMYVDQELDINRLSDYDVDHIVPQSFLKDDSIDNKVLTRSDKARGKSDNVPSEEVVKKMKNYWRQLLNAKLITQRKFDNLTKAERGGLSELDKAGFIKRQLVETRQITKHVAQILDSRMNTKYDENDKLIREVKVITLKSKLVSDFRKDFQFYKVREINNYHHAHDAYLNAVVGTALIKKYPKLESEFVYGDYKVYDVRKMIAKSEQEIGKATAKYFFYSNIMNFFKTEITLANGEIRKRPLIETNGETGEIVWDKGRDFATVRKVLSMPQVNIVKKTEVQTGGFSKESILPKRNSDKLIARKKDWDPKKYGGFDSPTVAYSVLVVAKVEKGKSKKLKSVKELLGITIMERSSFEKNPIDFLEAKGYKEVKKDLIIKLPKYSLFELENGRKRMLASAGELQKGNELALPSKYVNFLYLASHYEKLKGSPEDNEQKQLFVEQHKHYLDEIIEQISEFSKRVILADANLDKVLSAYNKHRDKPIREQAENIIHLFTLTNLGAPAAFKYFDTTIDRKRYTSTKEVLDATLIHQSITGLYETRIDLSQLGGDGGEAAAKGGGPAPGGMDPLQLLQPLEAEIKGTKLKAHWNSGATITCVPQAFLEEEVPIKNIWIKTIHGEKEQPVYYLTFKIQGRKVEAEVISSPYDYILVSPSDIPWLMKKPLQLTTLVPLQEYEERLLKQTMLTGSYKEKLQSLFLKYDALWQHWENQVGHRRIKPHHIATGTVNPRPQKQYPINPKAKASIQTVINDLLKQGVLIQQNSIMNTPVYPVPKPDGKWRMVLDYREVNKTIPLIAAQNQHSAGILSSIFRGKYKTTLDLSNGFWAHSITPESYWLTAFTWLGQQYCWTRLPQGFLNSPALFNADVVDLLKEVPNVQVYVDDIYISHDDPREHLEQLEKVFSLLLNAGYVVSLKKSEIAQHEVEFLGFNITKEGRGLTETFKQKLLNITPPRDLKQLQSILGLLNFARNFIPNFSELVKPLYNIIATAPGKYITWTTDNSQQLQNIISMLNSAENLEERNPEVRLIMKVNTSPSAGYIRFYNEFAKRPIMYLNYVYTKAEVKFTNTEKLLTTIHKGLIKALDLGMGQEILVYSPIVSMTKIQKTPLPERKALPIRWITWMSYLEDPRIQFHYDKTLPELQQVPTVTDDIIAKIKHPSEFSMVFYTDGSAIKHPNVNKSHNAGMGIAQVQFKPEFTVINTWSIPLGDHTAQLAEVAAVEFACKKALKIDGPVLIVTDSFYVAESVNKELPYWQSNGFFNNKKKPLKHVSKWKSIADCIQLKPDIIIIHEKGHQPTASTFHTEGNNLADKLATQGSYVVNAGKRTADGSEFEKRTADGSEFESPKKKAKVE

SEQ ID NO: 637 - protein, 2180 aa, synthetic construct
  source 1..2180: note = Description of Artificial Sequence: Synthetic polypeptide
MPAAKRVKLDGGDKKYSIGLDIGTNSVGWAVITDEYKVPSKKFKVLGNTDRHSIKKNLIGALLFDSGETAEATRLKRTARRRYTRRKNRICYLQEIFSNEMAKVDDSFFHRLEESFLVEEDKKHERHPIFGNIVDEVAYHEKYPTIYHLRKKLVDSTDKADLRLIYLALAHMIKFRGHFLIEGDLNPDNSDVDKLFIQLVQTYNQLFEENPINASGVDAKAILSARLSKSRRLENLIAQLPGEKKNGLFGNLIALSLGLTPNFKSNFDLAEDAKLQLSKDTYDDDLDNLLAQIGDQYADLFLAAKNLSDAILLSDILRVNTEITKAPLSASMIKRYDEHHQDLTLLKALVRQQLPEKYKEIFFDQSKNGYAGYIDGGASQEEFYKFIKPILEKMDGTEELLVKLNREDLLRKQRTFDNGSIPHQIHLGELHAILRRQEDFYPFLKDNREKIEKILTFRIPYYVGPLARGNSRFAWMTRKSEETITPWNFEEVVDKGASAQSFIERMTNFDKNLPNEKVLPKHSLLYEYFTVYNELTKVKYVTEGMRKPAFLSGEQKKAIVDLLFKTNRKVTVKQLKEDYFKKIECFDSVEISGVEDRFNASLGTYHDLLKIIKDKDFLDNEENEDILEDIVLTLTLFEDREMIEERLKTYAHLFDDKVMKQLKRRRYTGWGRLSRKLINGIRDKQSGKTILDFLKSDGFANRNFMQLIHDDSLTFKEDIQKAQVSGQGDSLHEHIANLAGSPAIKKGILQTVKVVDELVKVMGRHKPENIVIEMARENQTTQKGQKNSRERMKRIEEGIKELGSQILKEHPVENTQLQNEKLYLYYLQNGRDMYVDQELDINRLSDYDVDHIVPQSFLKDDSIDNKVLTRSDKARGKSDNVPSEEVVKKMKNYWRQLLNAKLITQRKFDNLTKAERGGLSELDKAGFIKRQLVETRQITKHVAQILDSRMNTKYDENDKLIREVKVITLKSKLVSDFRKDFQFYKVREINNYHHAHDAYLNAVVGTALIKKYPKLESEFVYGDYKVYDVRKMIAKSEQEIGKATAKYFFYSNIMNFFKTEITLANGEIRKRPLIETNGETGEIVWDKGRDFATVRKVLSMPQVNIVKKTEVQTGGFSKESILPKRNSDKLIARKKDWDPKKYGGFDSPTVAYSVLVVAKVEKGKSKKLKSVKELLGITIMERSSFEKNPIDFLEAKGYKEVKKDLIIKLPKYSLFELENGRKRMLASAGELQKGNELALPSKYVNFLYLASHYEKLKGSPEDNEQKQLFVEQHKHYLDEIIEQISEFSKRVILADANLDKVLSAYNKHRDKPIREQAENIIHLFTLTNLGAPAAFKYFDTTIDRKRYTSTKEVLDATLIHQSITGLYETRIDLSQLGGDGGGSSGSSGSSGSSGSSGGMDPLQLLQPLEAEIKGTKLKAHWNSGATITCVPQAFLEEEVPIKNIWIKTIHGEKEQPVYYLTFKIQGRKVEAEVISSPYDYILVSPSDIPWLMKKPLQLTTLVPLQEYEERLLKQTMLTGSYKEKLQSLFLKYDALWQHWENQVGHRRIKPHHIATGTVNPRPQKQYPINPKAKASIQTVINDLLKQGVLIQQNSIMNTPVYPVPKPDGKWRMVLDYREVNKTIPLIAAQNQHSAGILSSIFRGKYKTTLDLSNGFWAHSITPESYWLTAFTWLGQQYCWTRLPQGFLNSPALFNADVVDLLKEVPNVQVYVDDIYISHDDPREHLEQLEKVFSLLLNAGYVVSLKKSEIAQHEVEFLGFNITKEGRGLTETFKQKLLNITPPRDLKQLQSILGLLNFARNFIPNFSELVKPLYNIIATAPGKYITWTTDNSQQLQNIISMLNSAENLEERNPEVRLIMKVNTSPSAGYIRFYNEFAKRPIMYLNYVYTKAEVKFTNTEKLLTTIHKGLIKALDLGMGQEILVYSPIVSMTKIQKTPLPERKALPIRWITWMSYLEDPRIQFHYDKTLPELQQVPTVTDDIIAKIKHPSEFSMVFYTDGSAIKHPNVNKSHNAGMGIAQVQFKPEFTVINTWSIPLGDHTAQLAEVAAVEFACKKALKIDGPVLIVTDSFYVAESVNKELPYWQSNGFFNNKKKPLKHVSKWKSIADCIQLKPDIIIIHEKGHQPTASTFHTEGNNLADKLATQGSYVVNAGKRTADGSEFEKRTADGSEFESPKKKAKVE

SEQ ID NO: 638 - protein, 2173 aa, synthetic construct
  source 1..2173: note = Description of Artificial Sequence: Synthetic polypeptide
MPAAKRVKLDGGDKKYSIGLDIGTNSVGWAVITDEYKVPSKKFKVLGNTDRHSIKKNLIGALLFDSGETAEATRLKRTARRRYTRRKNRICYLQEIFSNEMAKVDDSFFHRLEESFLVEEDKKHERHPIFGNIVDEVAYHEKYPTIYHLRKKLVDSTDKADLRLIYLALAHMIKFRGHFLIEGDLNPDNSDVDKLFIQLVQTYNQLFEENPINASGVDAKAILSARLSKSRRLENLIAQLPGEKKNGLFGNLIALSLGLTPNFKSNFDLAEDAKLQLSKDTYDDDLDNLLAQIGDQYADLFLAAKNLSDAILLSDILRVNTEITKAPLSASMIKRYDEHHQDLTLLKALVRQQLPEKYKEIFFDQSKNGYAGYIDGGASQEEFYKFIKPILEKMDGTEELLVKLNREDLLRKQRTFDNGSIPHQIHLGELHAILRRQEDFYPFLKDNREKIEKILTFRIPYYVGPLARGNSRFAWMTRKSEETITPWNFEEVVDKGASAQSFIERMTNFDKNLPNEKVLPKHSLLYEYFTVYNELTKVKYVTEGMRKPAFLSGEQKKAIVDLLFKTNRKVTVKQLKEDYFKKIECFDSVEISGVEDRFNASLGTYHDLLKIIKDKDFLDNEENEDILEDIVLTLTLFEDREMIEERLKTYAHLFDDKVMKQLKRRRYTGWGRLSRKLINGIRDKQSGKTILDFLKSDGFANRNFMQLIHDDSLTFKEDIQKAQVSGQGDSLHEHIANLAGSPAIKKGILQTVKVVDELVKVMGRHKPENIVIEMARENQTTQKGQKNSRERMKRIEEGIKELGSQILKEHPVENTQLQNEKLYLYYLQNGRDMYVDQELDINRLSDYDVDHIVPQSFLKDDSIDNKVLTRSDKARGKSDNVPSEEVVKKMKNYWRQLLNAKLITQRKFDNLTKAERGGLSELDKAGFIKRQLVETRQITKHVAQILDSRMNTKYDENDKLIREVKVITLKSKLVSDFRKDFQFYKVREINNYHHAHDAYLNAVVGTALIKKYPKLESEFVYGDYKVYDVRKMIAKSEQEIGKATAKYFFYSNIMNFFKTEITLANGEIRKRPLIETNGETGEIVWDKGRDFATVRKVLSMPQVNIVKKTEVQTGGFSKESILPKRNSDKLIARKKDWDPKKYGGFDSPTVAYSVLVVAKVEKGKSKKLKSVKELLGITIMERSSFEKNPIDFLEAKGYKEVKKDLIIKLPKYSLFELENGRKRMLASAGELQKGNELALPSKYVNFLYLASHYEKLKGSPEDNEQKQLFVEQHKHYLDEIIEQISEFSKRVILADANLDKVLSAYNKHRDKPIREQAENIIHLFTLTNLGAPAAFKYFDTTIDRKRYTSTKEVLDATLIHQSITGLYETRIDLSQLGGDGGEAAAKGSSGGMDPLQLLQPLEAEIKGTKLKAHWNSGATITCVPQAFLEEEVPIKNIWIKTIHGEKEQPVYYLTFKIQGRKVEAEVISSPYDYILVSPSDIPWLMKKPLQLTTLVPLQEYEERLLKQTMLTGSYKEKLQSLFLKYDALWQHWENQVGHRRIKPHHIATGTVNPRPQKQYPINPKAKASIQTVINDLLKQGVLIQQNSIMNTPVYPVPKPDGKWRMVLDYREVNKTIPLIAAQNQHSAGILSSIFRGKYKTTLDLSNGFWAHSITPESYWLTAFTWLGQQYCWTRLPQGFLNSPALFNADVVDLLKEVPNVQVYVDDIYISHDDPREHLEQLEKVFSLLLNAGYVVSLKKSEIAQHEVEFLGFNITKEGRGLTETFKQKLLNITPPRDLKQLQSILGLLNFARNFIPNFSELVKPLYNIIATAPGKYITWTTDNSQQLQNIISMLNSAENLEERNPEVRLIMKVNTSPSAGYIRFYNEFAKRPIMYLNYVYTKAEVKFTNTEKLLTTIHKGLIKALDLGMGQEILVYSPIVSMTKIQKTPLPERKALPIRWITWMSYLEDPRIQFHYDKTLPELQQVPTVTDDIIAKIKHPSEFSMVFYTDGSAIKHPNVNKSHNAGMGIAQVQFKPEFTVINTWSIPLGDHTAQLAEVAAVEFACKKALKIDGPVLIVTDSFYVAESVNKELPYWQSNGFFNNKKKPLKHVSKWKSIADCIQLKPDIIIIHEKGHQPTASTFHTEGNNLADKLATQGSYVVNAGKRTADGSEFEKRTADGSEFESPKKKAKVE

SEQ ID NO: 639 - protein, 2172 aa, synthetic construct
  source 1..2172: note = Description of Artificial Sequence: Synthetic polypeptide
MPAAKRVKLDGGDKKYSIGLDIGTNSVGWAVITDEYKVPSKKFKVLGNTDRHSIKKNLIGALLFDSGETAEATRLKRTARRRYTRRKNRICYLQEIFSNEMAKVDDSFFHRLEESFLVEEDKKHERHPIFGNIVDEVAYHEKYPTIYHLRKKLVDSTDKADLRLIYLALAHMIKFRGHFLIEGDLNPDNSDVDKLFIQLVQTYNQLFEENPINASGVDAKAILSARLSKSRRLENLIAQLPGEKKNGLFGNLIALSLGLTPNFKSNFDLAEDAKLQLSKDTYDDDLDNLLAQIGDQYADLFLAAKNLSDAILLSDILRVNTEITKAPLSASMIKRYDEHHQDLTLLKALVRQQLPEKYKEIFFDQSKNGYAGYIDGGASQEEFYKFIKPILEKMDGTEELLVKLNREDLLRKQRTFDNGSIPHQIHLGELHAILRRQEDFYPFLKDNREKIEKILTFRIPYYVGPLARGNSRFAWMTRKSEETITPWNFEEVVDKGASAQSFIERMTNFDKNLPNEKVLPKHSLLYEYFTVYNELTKVKYVTEGMRKPAFLSGEQKKAIVDLLFKTNRKVTVKQLKEDYFKKIECFDSVEISGVEDRFNASLGTYHDLLKIIKDKDFLDNEENEDILEDIVLTLTLFEDREMIEERLKTYAHLFDDKVMKQLKRRRYTGWGRLSRKLINGIRDKQSGKTILDFLKSDGFANRNFMQLIHDDSLTFKEDIQKAQVSGQGDSLHEHIANLAGSPAIKKGILQTVKVVDELVKVMGRHKPENIVIEMARENQTTQKGQKNSRERMKRIEEGIKELGSQILKEHPVENTQLQNEKLYLYYLQNGRDMYVDQELDINRLSDYDVDHIVPQSFLKDDSIDNKVLTRSDKARGKSDNVPSEEVVKKMKNYWRQLLNAKLITQRKFDNLTKAERGGLSELDKAGFIKRQLVETRQITKHVAQILDSRMNTKYDENDKLIREVKVITLKSKLVSDFRKDFQFYKVREINNYHHAHDAYLNAVVGTALIKKYPKLESEFVYGDYKVYDVRKMIAKSEQEIGKATAKYFFYSNIMNFFKTEITLANGEIRKRPLIETNGETGEIVWDKGRDFATVRKVLSMPQVNIVKKTEVQTGGFSKESILPKRNSDKLIARKKDWDPKKYGGFDSPTVAYSVLVVAKVEKGKSKKLKSVKELLGITIMERSSFEKNPIDFLEAKGYKEVKKDLIIKLPKYSLFELENGRKRMLASAGELQKGNELALPSKYVNFLYLASHYEKLKGSPEDNEQKQLFVEQHKHYLDEIIEQISEFSKRVILADANLDKVLSAYNKHRDKPIREQAENIIHLFTLTNLGAPAAFKYFDTTIDRKRYTSTKEVLDATLIHQSITGLYETRIDLSQLGGDGGGGGGGGGGGMDPLQLLQPLEAEIKGTKLKAHWNSGATITCVPQAFLEEEVPIKNIWIKTIHGEKEQPVYYLTFKIQGRKVEAEVISSPYDYILVSPSDIPWLMKKPLQLTTLVPLQEYEERLLKQTMLTGSYKEKLQSLFLKYDALWQHWENQVGHRRIKPHHIATGTVNPRPQKQYPINPKAKASIQTVINDLLKQGVLIQQNSIMNTPVYPVPKPDGKWRMVLDYREVNKTIPLIAAQNQHSAGILSSIFRGKYKTTLDLSNGFWAHSITPESYWLTAFTWLGQQYCWTRLPQGFLNSPALFNADVVDLLKEVPNVQVYVDDIYISHDDPREHLEQLEKVFSLLLNAGYVVSLKKSEIAQHEVEFLGFNITKEGRGLTETFKQKLLNITPPRDLKQLQSILGLLNFARNFIPNFSELVKPLYNIIATAPGKYITWTTDNSQQLQNIISMLNSAENLEERNPEVRLIMKVNTSPSAGYIRFYNEFAKRPIMYLNYVYTKAEVKFTNTEKLLTTIHKGLIKALDLGMGQEILVYSPIVSMTKIQKTPLPERKALPIRWITWMSYLEDPRIQFHYDKTLPELQQVPTVTDDIIAKIKHPSEFSMVFYTDGSAIKHPNVNKSHNAGMGIAQVQFKPEFTVINTWSIPLGDHTAQLAEVAAVEFACKKALKIDGPVLIVTDSFYVAESVNKELPYWQSNGFFNNKKKPLKHVSKWKSIADCIQLKPDIIIIHEKGHQPTASTFHTEGNNLADKLATQGSYVVNAGKRTADGSEFEKRTADGSEFESPKKKAKVE

SEQ ID NO: 640 - protein, 2176 aa, synthetic construct
  source 1..2176: note = Description of Artificial Sequence: Synthetic polypeptide
MPAAKRVKLDGGDKKYSIGLDIGTNSVGWAVITDEYKVPSKKFKVLGNTDRHSIKKNLIGALLFDSGETAEATRLKRTARRRYTRRKNRICYLQEIFSNEMAKVDDSFFHRLEESFLVEEDKKHERHPIFGNIVDEVAYHEKYPTIYHLRKKLVDSTDKADLRLIYLALAHMIKFRGHFLIEGDLNPDNSDVDKLFIQLVQTYNQLFEENPINASGVDAKAILSARLSKSRRLENLIAQLPGEKKNGLFGNLIALSLGLTPNFKSNFDLAEDAKLQLSKDTYDDDLDNLLAQIGDQYADLFLAAKNLSDAILLSDILRVNTEITKAPLSASMIKRYDEHHQDLTLLKALVRQQLPEKYKEIFFDQSKNGYAGYIDGGASQEEFYKFIKPILEKMDGTEELLVKLNREDLLRKQRTFDNGSIPHQIHLGELHAILRRQEDFYPFLKDNREKIEKILTFRIPYYVGPLARGNSRFAWMTRKSEETITPWNFEEVVDKGASAQSFIERMTNFDKNLPNEKVLPKHSLLYEYFTVYNELTKVKYVTEGMRKPAFLSGEQKKAIVDLLFKTNRKVTVKQLKEDYFKKIECFDSVEISGVEDRFNASLGTYHDLLKIIKDKDFLDNEENEDILEDIVLTLTLFEDREMIEERLKTYAHLFDDKVMKQLKRRRYTGWGRLSRKLINGIRDKQSGKTILDFLKSDGFANRNFMQLIHDDSLTFKEDIQKAQVSGQGDSLHEHIANLAGSPAIKKGILQTVKVVDELVKVMGRHKPENIVIEMARENQTTQKGQKNSRERMKRIEEGIKELGSQILKEHPVENTQLQNEKLYLYYLQNGRDMYVDQELDINRLSDYDVDHIVPQSFLKDDSIDNKVLTRSDKARGKSDNVPSEEVVKKMKNYWRQLLNAKLITQRKFDNLTKAERGGLSELDKAGFIKRQLVETRQITKHVAQILDSRMNTKYDENDKLIREVKVITLKSKLVSDFRKDFQFYKVREINNYHHAHDAYLNAVVGTALIKKYPKLESEFVYGDYKVYDVRKMIAKSEQEIGKATAKYFFYSNIMNFFKTEITLANGEIRKRPLIETNGETGEIVWDKGRDFATVRKVLSMPQVNIVKKTEVQTGGFSKESILPKRNSDKLIARKKDWDPKKYGGFDSPTVAYSVLVVAKVEKGKSKKLKSVKELLGITIMERSSFEKNPIDFLEAKGYKEVKKDLIIKLPKYSLFELENGRKRMLASAGELQKGNELALPSKYVNFLYLASHYEKLKGSPEDNEQKQLFVEQHKHYLDEIIEQISEFSKRVILADANLDKVLSAYNKHRDKPIREQAENIIHLFTLTNLGAPAAFKYFDTTIDRKRYTSTKEVLDATLIHQSITGLYETRIDLSQLGGDGGGGSEAAAKGSSGGMDPLQLLQPLEAEIKGTKLKAHWNSGATITCVPQAFLEEEVPIKNIWIKTIHGEKEQPVYYLTFKIQGRKVEAEVISSPYDYILVSPSDIPWLMKKPLQLTTLVPLQEYEERLLKQTMLTGSYKEKLQSLFLKYDALWQHWENQVGHRRIKPHHIATGTVNPRPQKQYPINPKAKASIQTVINDLLKQGVLIQQNSIMNTPVYPVPKPDGKWRMVLDYREVNKTIPLIAAQNQHSAGILSSIFRGKYKTTLDLSNGFWAHSITPESYWLTAFTWLGQQYCWTRLPQGFLNSPALFNADVVDLLKEVPNVQVYVDDIYISHDDPREHLEQLEKVFSLLLNAGYVVSLKKSEIAQHEVEFLGFNITKEGRGLTETFKQKLLNITPPRDLKQLQSILGLLNFARNFIPNFSELVKPLYNIIATAPGKYITWTTDNSQQLQNIISMLNSAENLEERNPEVRLIMKVNTSPSAGYIRFYNEFAKRPIMYLNYVYTKAEVKFTNTEKLLTTIHKGLIKALDLGMGQEILVYSPIVSMTKIQKTPLPERKALPIRWITWMSYLEDPRIQFHYDKTLPELQQVPTVTDDIIAKIKHPSEFSMVFYTDGSAIKHPNVNKSHNAGMGIAQVQFKPEFTVINTWSIPLGDHTAQLAEVAAVEFACKKALKIDGPVLIVTDSFYVAESVNKELPYWQSNGFFNNKKKPLKHVSKWKSIADCIQLKPDIIIIHEKGHQPTASTFHTEGNNLADKLATQGSYVVNAGKRTADGSEFEKRTADGSEFESPKKKAKVE

SEQ ID NO: 641 - protein, 2176 aa, synthetic construct
  source 1..2176: note = Description of Artificial Sequence: Synthetic polypeptide
MPAAKRVKLDGGDKKYSIGLDIGTNSVGWAVITDEYKVPSKKFKVLGNTDRHSIKKNLIGALLFDSGETAEATRLKRTARRRYTRRKNRICYLQEIFSNEMAKVDDSFFHRLEESFLVEEDKKHERHPIFGNIVDEVAYHEKYPTIYHLRKKLVDSTDKADLRLIYLALAHMIKFRGHFLIEGDLNPDNSDVDKLFIQLVQTYNQLFEENPINASGVDAKAILSARLSKSRRLENLIAQLPGEKKNGLFGNLIALSLGLTPNFKSNFDLAEDAKLQLSKDTYDDDLDNLLAQIGDQYADLFLAAKNLSDAILLSDILRVNTEITKAPLSASMIKRYDEHHQDLTLLKALVRQQLPEKYKEIFFDQSKNGYAGYIDGGASQEEFYKFIKPILEKMDGTEELLVKLNREDLLRKQRTFDNGSIPHQIHLGELHAILRRQEDFYPFLKDNREKIEKILTFRIPYYVGPLARGNSRFAWMTRKSEETITPWNFEEVVDKGASAQSFIERMTNFDKNLPNEKVLPKHSLLYEYFTVYNELTKVKYVTEGMRKPAFLSGEQKKAIVDLLFKTNRKVTVKQLKEDYFKKIECFDSVEISGVEDRFNASLGTYHDLLKIIKDKDFLDNEENEDILEDIVLTLTLFEDREMIEERLKTYAHLFDDKVMKQLKRRRYTGWGRLSRKLINGIRDKQSGKTILDFLKSDGFANRNFMQLIHDDSLTFKEDIQKAQVSGQGDSLHEHIANLAGSPAIKKGILQTVKVVDELVKVMGRHKPENIVIEMARENQTTQKGQKNSRERMKRIEEGIKELGSQILKEHPVENTQLQNEKLYLYYLQNGRDMYVDQELDINRLSDYDVDHIVPQSFLKDDSIDNKVLTRSDKARGKSDNVPSEEVVKKMKNYWRQLLNAKLITQRKFDNLTKAERGGLSELDKAGFIKRQLVETRQITKHVAQILDSRMNTKYDENDKLIREVKVITLKSKLVSDFRKDFQFYKVREINNYHHAHDAYLNAVVGTALIKKYPKLESEFVYGDYKVYDVRKMIAKSEQEIGKATAKYFFYSNIMNFFKTEITLANGEIRKRPLIETNGETGEIVWDKGRDFATVRKVLSMPQVNIVKKTEVQTGGFSKESILPKRNSDKLIARKKDWDPKKYGGFDSPTVAYSVLVVAKVEKGKSKKLKSVKELLGITIMERSSFEKNPIDFLEAKGYKEVKKDLIIKLPKYSLFELENGRKRMLASAGELQKGNELALPSKYVNFLYLASHYEKLKGSPEDNEQKQLFVEQHKHYLDEIIEQISEFSKRVILADANLDKVLSAYNKHRDKPIREQAENIIHLFTLTNLGAPAAFKYFDTTIDRKRYTSTKEVLDATLIHQSITGLYETRIDLSQLGGDGGPAPEAAAKGGSGGMDPLQLLQPLEAEIKGTKLKAHWNSGATITCVPQAFLEEEVPIKNIWIKTIHGEKEQPVYYLTFKIQGRKVEAEVISSPYDYILVSPSDIPWLMKKPLQLTTLVPLQEYEERLLKQTMLTGSYKEKLQSLFLKYDALWQHWENQVGHRRIKPHHIATGTVNPRPQKQYPINPKAKASIQTVINDLLKQGVLIQQNSIMNTPVYPVPKPDGKWRMVLDYREVNKTIPLIAAQNQHSAGILSSIFRGKYKTTLDLSNGFWAHSITPESYWLTAFTWLGQQYCWTRLPQGFLNSPALFNADVVDLLKEVPNVQVYVDDIYISHDDPREHLEQLEKVFSLLLNAGYVVSLKKSEIAQHEVEFLGFNITKEGRGLTETFKQKLLNITPPRDLKQLQSILGLLNFARNFIPNFSELVKPLYNIIATAPGKYITWTTDNSQQLQNIISMLNSAENLEERNPEVRLIMKVNTSPSAGYIRFYNEFAKRPIMYLNYVYTKAEVKFTNTEKLLTTIHKGLIKALDLGMGQEILVYSPIVSMTKIQKTPLPERKALPIRWITWMSYLEDPRIQFHYDKTLPELQQVPTVTDDIIAKIKHPSEFSMVFYTDGSAIKHPNVNKSHNAGMGIAQVQFKPEFTVINTWSIPLGDHTAQLAEVAAVEFACKKALKIDGPVLIVTDSFYVAESVNKELPYWQSNGFFNNKKKPLKHVSKWKSIADCIQLKPDIIIIHEKGHQPTASTFHTEGNNLADKLATQGSYVVNAGKRTADGSEFEKRTADGSEFESPKKKAKVE

SEQ ID NO: 642 - protein, 2173 aa, synthetic construct
  source 1..2173: note = Description of Artificial Sequence: Synthetic polypeptide
MPAAKRVKLDGGDKKYSIGLDIGTNSVGWAVITDEYKVPSKKFKVLGNTDRHSIKKNLIGALLFDSGETAEATRLKRTARRRYTRRKNRICYLQEIFSNEMAKVDDSFFHRLEESFLVEEDKKHERHPIFGNIVDEVAYHEKYPTIYHLRKKLVDSTDKADLRLIYLALAHMIKFRGHFLIEGDLNPDNSDVDKLFIQLVQTYNQLFEENPINASGVDAKAILSARLSKSRRLENLIAQLPGEKKNGLFGNLIALSLGLTPNFKSNFDLAEDAKLQLSKDTYDDDLDNLLAQIGDQYADLFLAAKNLSDAILLSDILRVNTEITKAPLSASMIKRYDEHHQDLTLLKALVRQQLPEKYKEIFFDQSKNGYAGYIDGGASQEEFYKFIKPILEKMDGTEELLVKLNREDLLRKQRTFDNGSIPHQIHLGELHAILRRQEDFYPFLKDNREKIEKILTFRIPYYVGPLARGNSRFAWMTRKSEETITPWNFEEVVDKGASAQSFIERMTNFDKNLPNEKVLPKHSLLYEYFTVYNELTKVKYVTEGMRKPAFLSGEQKKAIVDLLFKTNRKVTVKQLKEDYFKKIECFDSVEISGVEDRFNASLGTYHDLLKIIKDKDFLDNEENEDILEDIVLTLTLFEDREMIEERLKTYAHLFDDKVMKQLKRRRYTGWGRLSRKLINGIRDKQSGKTILDFLKSDGFANRNFMQLIHDDSLTFKEDIQKAQVSGQGDSLHEHIANLAGSPAIKKGILQTVKVVDELVKVMGRHKPENIVIEMARENQTTQKGQKNSRERMKRIEEGIKELGSQILKEHPVENTQLQNEKLYLYYLQNGRDMYVDQELDINRLSDYDVDHIVPQSFLKDDSIDNKVLTRSDKARGKSDNVPSEEVVKKMKNYWRQLLNAKLITQRKFDNLTKAERGGLSELDKAGFIKRQLVETRQITKHVAQILDSRMNTKYDENDKLIREVKVITLKSKLVSDFRKDFQFYKVREINNYHHAHDAYLNAVVGTALIKKYPKLESEFVYGDYKVYDVRKMIAKSEQEIGKATAKYFFYSNIMNFFKTEITLANGEIRKRPLIETNGETGEIVWDKGRDFATVRKVLSMPQVNIVKKTEVQTGGFSKESILPKRNSDKLIARKKDWDPKKYGGFDSPTVAYSVLVVAKVEKGKSKKLKSVKELLGITIMERSSFEKNPIDFLEAKGYKEVKKDLIIKLPKYSLFELENGRKRMLASAGELQKGNELALPSKYVNFLYLASHYEKLKGSPEDNEQKQLFVEQHKHYLDEIIEQISEFSKRVILADANLDKVLSAYNKHRDKPIREQAENIIHLFTLTNLGAPAAFKYFDTTIDRKRYTSTKEVLDATLIHQSITGLYETRIDLSQLGGDGGGGGGGGGGGGMDPLQLLQPLEAEIKGTKLKAHWNSGATITCVPQAFLEEEVPIKNIWIKTIHGEKEQPVYYLTFKIQGRKVEAEVISSPYDYILVSPSDIPWLMKKPLQLTTLVPLQEYEERLLKQTMLTGSYKEKLQSLFLKYDALWQHWENQVGHRRIKPHHIATGTVNPRPQKQYPINPKAKASIQTVINDLLKQGVLIQQNSIMNTPVYPVPKPDGKWRMVLDYREVNKTIPLIAAQNQHSAGILSSIFRGKYKTTLDLSNGFWAHSITPESYWLTAFTWLGQQYCWTRLPQGFLNSPALFNADVVDLLKEVPNVQVYVDDIYISHDDPREHLEQLEKVFSLLLNAGYVVSLKKSEIAQHEVEFLGFNITKEGRGLTETFKQKLLNITPPRDLKQLQSILGLLNFARNFIPNFSELVKPLYNIIATAPGKYITWTTDNSQQLQNIISMLNSAENLEERNPEVRLIMKVNTSPSAGYIRFYNEFAKRPIMYLNYVYTKAEVKFTNTEKLLTTIHKGLIKALDLGMGQEILVYSPIVSMTKIQKTPLPERKALPIRWITWMSYLEDPRIQFHYDKTLPELQQVPTVTDDIIAKIKHPSEFSMVFYTDGSAIKHPNVNKSHNAGMGIAQVQFKPEFTVINTWSIPLGDHTAQLAEVAAVEFACKKALKIDGPVLIVTDSFYVAESVNKELPYWQSNGFFNNKKKPLKHVSKWKSIADCIQLKPDIIIIHEKGHQPTASTFHTEGNNLADKLATQGSYVVNAGKRTADGSEFEKRTADGSEFESPKKKAKVE

SEQ ID NO: 643 - protein, 2171 aa, synthetic construct
  source 1..2171: note = Description of Artificial Sequence: Synthetic polypeptide
MPAAKRVKLDGGDKKYSIGLDIGTNSVGWAVITDEYKVPSKKFKVLGNTDRHSIKKNLIGALLFDSGETAEATRLKRTARRRYTRRKNRICYLQEIFSNEMAKVDDSFFHRLEESFLVEEDKKHERHPIFGNIVDEVAYHEKYPTIYHLRKKLVDSTDKADLRLIYLALAHMIKFRGHFLIEGDLNPDNSDVDKLFIQLVQTYNQLFEENPINASGVDAKAILSARLSKSRRLENLIAQLPGEKKNGLFGNLIALSLGLTPNFKSNFDLAEDAKLQLSKDTYDDDLDNLLAQIGDQYADLFLAAKNLSDAILLSDILRVNTEITKAPLSASMIKRYDEHHQDLTLLKALVRQQLPEKYKEIFFDQSKNGYAGYIDGGASQEEFYKFIKPILEKMDGTEELLVKLNREDLLRKQRTFDNGSIPHQIHLGELHAILRRQEDFYPFLKDNREKIEKILTFRIPYYVGPLARGNSRFAWMTRKSEETITPWNFEEVVDKGASAQSFIERMTNFDKNLPNEKVLPKHSLLYEYFTVYNELTKVKYVTEGMRKPAFLSGEQKKAIVDLLFKTNRKVTVKQLKEDYFKKIECFDSVEISGVEDRFNASLGTYHDLLKIIKDKDFLDNEENEDILEDIVLTLTLFEDREMIEERLKTYAHLFDDKVMKQLKRRRYTGWGRLSRKLINGIRDKQSGKTILDFLKSDGFANRNFMQLIHDDSLTFKEDIQKAQVSGQGDSLHEHIANLAGSPAIKKGILQTVKVVDELVKVMGRHKPENIVIEMARENQTTQKGQKNSRERMKRIEEGIKELGSQILKEHPVENTQLQNEKLYLYYLQNGRDMYVDQELDINRLSDYDVDHIVPQSFLKDDSIDNKVLTRSDKARGKSDNVPSEEVVKKMKNYWRQLLNAKLITQRKFDNLTKAERGGLSELDKAGFIKRQLVETRQITKHVAQILDSRMNTKYDENDKLIREVKVITLKSKLVSDFRKDFQFYKVREINNYHHAHDAYLNAVVGTALIKKYPKLESEFVYGDYKVYDVRKMIAKSEQEIGKATAKYFFYSNIMNFFKTEITLANGEIRKRPLIETNGETGEIVWDKGRDFATVRKVLSMPQVNIVKKTEVQTGGFSKESILPKRNSDKLIARKKDWDPKKYGGFDSPTVAYSVLVVAKVEKGKSKKLKSVKELLGITIMERSSFEKNPIDFLEAKGYKEVKKDLIIKLPKYSLFELENGRKRMLASAGELQKGNELALPSKYVNFLYLASHYEKLKGSPEDNEQKQLFVEQHKHYLDEIIEQISEFSKRVILADANLDKVLSAYNKHRDKPIREQAENIIHLFTLTNLGAPAAFKYFDTTIDRKRYTSTKEVLDATLIHQSITGLYETRIDLSQLGGDGGGGSGSSGGMDPLQLLQPLEAEIKGTKLKAHWNSGATITCVPQAFLEEEVPIKNIWIKTIHGEKEQPVYYLTFKIQGRKVEAEVISSPYDYILVSPSDIPWLMKKPLQLTTLVPLQEYEERLLKQTMLTGSYKEKLQSLFLKYDALWQHWENQVGHRRIKPHHIATGTVNPRPQKQYPINPKAKASIQTVINDLLKQGVLIQQNSIMNTPVYPVPKPDGKWRMVLDYREVNKTIPLIAAQNQHSAGILSSIFRGKYKTTLDLSNGFWAHSITPESYWLTAFTWLGQQYCWTRLPQGFLNSPALFNADVVDLLKEVPNVQVYVDDIYISHDDPREHLEQLEKVFSLLLNAGYVVSLKKSEIAQHEVEFLGFNITKEGRGLTETFKQKLLNITPPRDLKQLQSILGLLNFARNFIPNFSELVKPLYNIIATAPGKYITWTTDNSQQLQNIISMLNSAENLEERNPEVRLIMKVNTSPSAGYIRFYNEFAKRPIMYLNYVYTKAEVKFTNTEKLLTTIHKGLIKALDLGMGQEILVYSPIVSMTKIQKTPLPERKALPIRWITWMSYLEDPRIQFHYDKTLPELQQVPTVTDDIIAKIKHPSEFSMVFYTDGSAIKHPNVNKSHNAGMGIAQVQFKPEFTVINTWSIPLGDHTAQLAEVAAVEFACKKALKIDGPVLIVTDSFYVAESVNKELPYWQSNGFFNNKKKPLKHVSKWKSIADCIQLKPDIIIIHEKGHQPTASTFHTEGNNLADKLATQGSYVVNAGKRTADGSEFEKRTADGSEFESPKKKAKVE

SEQ ID NO: 644 - protein, 2171 aa, synthetic construct
  source 1..2171: note = Description of Artificial Sequence: Synthetic polypeptide
MPAAKRVKLDGGDKKYSIGLDIGTNSVGWAVITDEYKVPSKKFKVLGNTDRHSIKKNLIGALLFDSGETAEATRLKRTARRRYTRRKNRICYLQEIFSNEMAKVDDSFFHRLEESFLVEEDKKHERHPIFGNIVDEVAYHEKYPTIYHLRKKLVDSTDKADLRLIYLALAHMIKFRGHFLIEGDLNPDNSDVDKLFIQLVQTYNQLFEENPINASGVDAKAILSARLSKSRRLENLIAQLPGEKKNGLFGNLIALSLGLTPNFKSNFDLAEDAKLQLSKDTYDDDLDNLLAQIGDQYADLFLAAKNLSDAILLSDILRVNTEITKAPLSASMIKRYDEHHQDLTLLKALVRQQLPEKYKEIFFDQSKNGYAGYIDGGASQEEFYKFIKPILEKMDGTEELLVKLNREDLLRKQRTFDNGSIPHQIHLGELHAILRRQEDFYPFLKDNREKIEKILTFRIPYYVGPLARGNSRFAWMTRKSEETITPWNFEEVVDKGASAQSFIERMTNFDKNLPNEKVLPKHSLLYEYFTVYNELTKVKYVTEGMRKPAFLSGEQKKAIVDLLFKTNRKVTVKQLKEDYFKKIECFDSVEISGVEDRFNASLGTYHDLLKIIKDKDFLDNEENEDILEDIVLTLTLFEDREMIEERLKTYAHLFDDKVMKQLKRRRYTGWGRLSRKLINGIRDKQSGKTILDFLKSDGFANRNFMQLIHDDSLTFKEDIQKAQVSGQGDSLHEHIANLAGSPAIKKGILQTVKVVDELVKVMGRHKPENIVIEMARENQTTQKGQKNSRERMKRIEEGIKELGSQILKEHPVENTQLQNEKLYLYYLQNGRDMYVDQELDINRLSDYDVDHIVPQSFLKDDSIDNKVLTRSDKARGKSDNVPSEEVVKKMKNYWRQLLNAKLITQRKFDNLTKAERGGLSELDKAGFIKRQLVETRQITKHVAQILDSRMNTKYDENDKLIREVKVITLKSKLVSDFRKDFQFYKVREINNYHHAHDAYLNAVVGTALIKKYPKLESEFVYGDYKVYDVRKMIAKSEQEIGKATAKYFFYSNIMNFFKTEITLANGEIRKRPLIETNGETGEIVWDKGRDFATVRKVLSMPQVNIVKKTEVQTGGFSKESILPKRNSDKLIARKKDWDPKKYGGFDSPTVAYSVLVVAKVEKGKSKKLKSVKELLGITIMERSSFEKNPIDFLEAKGYKEVKKDLIIKLPKYSLFELENGRKRMLASAGELQKGNELALPSKYVNFLYLASHYEKLKGSPEDNEQKQLFVEQHKHYLDEIIEQISEFSKRVILADANLDKVLSAYNKHRDKPIREQAENIIHLFTLTNLGAPAAFKYFDTTIDRKRYTSTKEVLDATLIHQSITGLYETRIDLSQLGGDGGGGGGGGGGMDPLQLLQPLEAEIKGTKLKAHWNSGATITCVPQAFLEEEVPIKNIWIKTIHGEKEQPVYYLTFKIQGRKVEAEVISSPYDYILVSPSDIPWLMKKPLQLTTLVPLQEYEERLLKQTMLTGSYKEKLQSLFLKYDALWQHWENQVGHRRIKPHHIATGTVNPRPQKQYPINPKAKASIQTVINDLLKQGVLIQQNSIMNTPVYPVPKPDGKWRMVLDYREVNKTIPLIAAQNQHSAGILSSIFRGKYKTTLDLSNGFWAHSITPESYWLTAFTWLGQQYCWTRLPQGFLNSPALFNADVVDLLKEVPNVQVYVDDIYISHDDPREHLEQLEKVFSLLLNAGYVVSLKKSEIAQHEVEFLGFNITKEGRGLTETFKQKLLNITPPRDLKQLQSILGLLNFARNFIPNFSELVKPLYNIIATAPGKYITWTTDNSQQLQNIISMLNSAENLEERNPEVRLIMKVNTSPSAGYIRFYNEFAKRPIMYLNYVYTKAEVKFTNTEKLLTTIHKGLIKALDLGMGQEILVYSPIVSMTKIQKTPLPERKALPIRWITWMSYLEDPRIQFHYDKTLPELQQVPTVTDDIIAKIKHPSEFSMVFYTDGSAIKHPNVNKSHNAGMGIAQVQFKPEFTVINTWSIPLGDHTAQLAEVAAVEFACKKALKIDGPVLIVTDSFYVAESVNKELPYWQSNGFFNNKKKPLKHVSKWKSIADCIQLKPDIIIIHEKGHQPTASTFHTEGNNLADKLATQGSYVVNAGKRTADGSEFEKRTADGSEFESPKKKAKVE

SEQ ID NO: 645 - protein, 2174 aa, synthetic construct
  source 1..2174: note = Description of Artificial Sequence: Synthetic polypeptide
MPAAKRVKLDGGDKKYSIGLDIGTNSVGWAVITDEYKVPSKKFKVLGNTDRHSIKKNLIGALLFDSGETAEATRLKRTARRRYTRRKNRICYLQEIFSNEMAKVDDSFFHRLEESFLVEEDKKHERHPIFGNIVDEVAYHEKYPTIYHLRKKLVDSTDKADLRLIYLALAHMIKFRGHFLIEGDLNPDNSDVDKLFIQLVQTYNQLFEENPINASGVDAKAILSARLSKSRRLENLIAQLPGEKKNGLFGNLIALSLGLTPNFKSNFDLAEDAKLQLSKDTYDDDLDNLLAQIGDQYADLFLAAKNLSDAILLSDILRVNTEITKAPLSASMIKRYDEHHQDLTLLKALVRQQLPEKYKEIFFDQSKNGYAGYIDGGASQEEFYKFIKPILEKMDGTEELLVKLNREDLLRKQRTFDNGSIPHQIHLGELHAILRRQEDFYPFLKDNREKIEKILTFRIPYYVGPLARGNSRFAWMTRKSEETITPWNFEEVVDKGASAQSFIERMTNFDKNLPNEKVLPKHSLLYEYFTVYNELTKVKYVTEGMRKPAFLSGEQKKAIVDLLFKTNRKVTVKQLKEDYFKKIECFDSVEISGVEDRFNASLGTYHDLLKIIKDKDFLDNEENEDILEDIVLTLTLFEDREMIEERLKTYAHLFDDKVMKQLKRRRYTGWGRLSRKLINGIRDKQSGKTILDFLKSDGFANRNFMQLIHDDSLTFKEDIQKAQVSGQGDSLHEHIANLAGSPAIKKGILQTVKVVDELVKVMGRHKPENIVIEMARENQTTQKGQKNSRERMKRIEEGIKELGSQILKEHPVENTQLQNEKLYLYYLQNGRDMYVDQELDINRLSDYDVDHIVPQSFLKDDSIDNKVLTRSDKARGKSDNVPSEEVVKKMKNYWRQLLNAKLITQRKFDNLTKAERGGLSELDKAGFIKRQLVETRQITKHVAQILDSRMNTKYDENDKLIREVKVITLKSKLVSDFRKDFQFYKVREINNYHHAHDAYLNAVVGTALIKKYPKLESEFVYGDYKVYDVRKMIAKSEQEIGKATAKYFFYSNIMNFFKTEITLANGEIRKRPLIETNGETGEIVWDKGRDFATVRKVLSMPQVNIVKKTEVQTGGFSKESILPKRNSDKLIARKKDWDPKKYGGFDSPTVAYSVLVVAKVEKGKSKKLKSVKELLGITIMERSSFEKNPIDFLEAKGYKEVKKDLIIKLPKYSLFELENGRKRMLASAGELQKGNELALPSKYVNFLYLASHYEKLKGSPEDNEQKQLFVEQHKHYLDEIIEQISEFSKRVILADANLDKVLSAYNKHRDKPIREQAENIIHLFTLTNLGAPAAFKYFDTTIDRKRYTSTKEVLDATLIHQSITGLYETRIDLSQLGGDGGGGSGGGPAPGGMDPLQLLQPLEAEIKGTKLKAHWNSGATITCVPQAFLEEEVPIKNIWIKTIHGEKEQPVYYLTFKIQGRKVEAEVISSPYDYILVSPSDIPWLMKKPLQLTTLVPLQEYEERLLKQTMLTGSYKEKLQSLFLKYDALWQHWENQVGHRRIKPHHIATGTVNPRPQKQYPINPKAKASIQTVINDLLKQGVLIQQNSIMNTPVYPVPKPDGKWRMVLDYREVNKTIPLIAAQNQHSAGILSSIFRGKYKTTLDLSNGFWAHSITPESYWLTAFTWLGQQYCWTRLPQGFLNSPALFNADVVDLLKEVPNVQVYVDDIYISHDDPREHLEQLEKVFSLLLNAGYVVSLKKSEIAQHEVEFLGFNITKEGRGLTETFKQKLLNITPPRDLKQLQSILGLLNFARNFIPNFSELVKPLYNIIATAPGKYITWTTDNSQQLQNIISMLNSAENLEERNPEVRLIMKVNTSPSAGYIRFYNEFAKRPIMYLNYVYTKAEVKFTNTEKLLTTIHKGLIKALDLGMGQEILVYSPIVSMTKIQKTPLPERKALPIRWITWMSYLEDPRIQFHYDKTLPELQQVPTVTDDIIAKIKHPSEFSMVFYTDGSAIKHPNVNKSHNAGMGIAQVQFKPEFTVINTWSIPLGDHTAQLAEVAAVEFACKKALKIDGPVLIVTDSFYVAESVNKELPYWQSNGFFNNKKKPLKHVSKWKSIADCIQLKPDIIIIHEKGHQPTASTFHTEGNNLADKLATQGSYVVNAGKRTADGSEFEKRTADGSEFESPKKKAKVE

SEQ ID NO: 646 - protein, 2176 aa, synthetic construct
  source 1..2176: note = Description of Artificial Sequence: Synthetic polypeptide
MPAAKRVKLDGGDKKYSIGLDIGTNSVGWAVITDEYKVPSKKFKVLGNTDRHSIKKNLIGALLFDSGETAEATRLKRTARRRYTRRKNRICYLQEIFSNEMAKVDDSFFHRLEESFLVEEDKKHERHPIFGNIVDEVAYHEKYPTIYHLRKKLVDSTDKADLRLIYLALAHMIKFRGHFLIEGDLNPDNSDVDKLFIQLVQTYNQLFEENPINASGVDAKAILSARLSKSRRLENLIAQLPGEKKNGLFGNLIALSLGLTPNFKSNFDLAEDAKLQLSKDTYDDDLDNLLAQIGDQYADLFLAAKNLSDAILLSDILRVNTEITKAPLSASMIKRYDEHHQDLTLLKALVRQQLPEKYKEIFFDQSKNGYAGYIDGGASQEEFYKFIKPILEKMDGTEELLVKLNREDLLRKQRTFDNGSIPHQIHLGELHAILRRQEDFYPFLKDNREKIEKILTFRIPYYVGPLARGNSRFAWMTRKSEETITPWNFEEVVDKGASAQSFIERMTNFDKNLPNEKVLPKHSLLYEYFTVYNELTKVKYVTEGMRKPAFLSGEQKKAIVDLLFKTNRKVTVKQLKEDYFKKIECFDSVEISGVEDRFNASLGTYHDLLKIIKDKDFLDNEENEDILEDIVLTLTLFEDREMIEERLKTYAHLFDDKVMKQLKRRRYTGWGRLSRKLINGIRDKQSGKTILDFLKSDGFANRNFMQLIHDDSLTFKEDIQKAQVSGQGDSLHEHIANLAGSPAIKKGILQTVKVVDELVKVMGRHKPENIVIEMARENQTTQKGQKNSRERMKRIEEGIKELGSQILKEHPVENTQLQNEKLYLYYLQNGRDMYVDQELDINRLSDYDVDHIVPQSFLKDDSIDNKVLTRSDKARGKSDNVPSEEVVKKMKNYWRQLLNAKLITQRKFDNLTKAERGGLSELDKAGFIKRQLVETRQITKHVAQILDSRMNTKYDENDKLIREVKVITLKSKLVSDFRKDFQFYKVREINNYHHAHDAYLNAVVGTALIKKYPKLESEFVYGDYKVYDVRKMIAKSEQEIGKATAKYFFYSNIMNFFKTEITLANGEIRKRPLIETNGETGEIVWDKGRDFATVRKVLSMPQVNIVKKTEVQTGGFSKESILPKRNSDKLIARKKDWDPKKYGGFDSPTVAYSVLVVAKVEKGKSKKLKSVKELLGITIMERSSFEKNPIDFLEAKGYKEVKKDLIIKLPKYSLFELENGRKRMLASAGELQKGNELALPSKYVNFLYLASHYEKLKGSPEDNEQKQLFVEQHKHYLDEIIEQISEFSKRVILADANLDKVLSAYNKHRDKPIREQAENIIHLFTLTNLGAPAAFKYFDTTIDRKRYTSTKEVLDATLIHQSITGLYETRIDLSQLGGDGGEAAAKGGSGGGGGMDPLQLLQPLEAEIKGTKLKAHWNSGATITCVPQAFLEEEVPIKNIWIKTIHGEKEQPVYYLTFKIQGRKVEAEVISSPYDYILVSPSDIPWLMKKPLQLTTLVPLQEYEERLLKQTMLTGSYKEKLQSLFLKYDALWQHWENQVGHRRIKPHHIATGTVNPRPQKQYPINPKAKASIQTVINDLLKQGVLIQQNSIMNTPVYPVPKPDGKWRMVLDYREVNKTIPLIAAQNQHSAGILSSIFRGKYKTTLDLSNGFWAHSITPESYWLTAFTWLGQQYCWTRLPQGFLNSPALFNADVVDLLKEVPNVQVYVDDIYISHDDPREHLEQLEKVFSLLLNAGYVVSLKKSEIAQHEVEFLGFNITKEGRGLTETFKQKLLNITPPRDLKQLQSILGLLNFARNFIPNFSELVKPLYNIIATAPGKYITWTTDNSQQLQNIISMLNSAENLEERNPEVRLIMKVNTSPSAGYIRFYNEFAKRPIMYLNYVYTKAEVKFTNTEKLLTTIHKGLIKALDLGMGQEILVYSPIVSMTKIQKTPLPERKALPIRWITWMSYLEDPRIQFHYDKTLPELQQVPTVTDDIIAKIKHPSEFSMVFYTDGSAIKHPNVNKSHNAGMGIAQVQFKPEFTVINTWSIPLGDHTAQLAEVAAVEFACKKALKIDGPVLIVTDSFYVAESVNKELPYWQSNGFFNNKKKPLKHVSKWKSIADCIQLKPDIIIIHEKGHQPTASTFHTEGNNLADKLATQGSYVVNAGKRTADGSEFEKRTADGSEFESPKKKAKVE

SEQ ID NO: 647 - protein, 2211 aa, synthetic construct
  source 1..2211: note = Description of Artificial Sequence: Synthetic polypeptide
MPAAKRVKLDGGDKKYSIGLDIGTNSVGWAVITDEYKVPSKKFKVLGNTDRHSIKKNLIGALLFDSGETAEATRLKRTARRRYTRRKNRICYLQEIFSNEMAKVDDSFFHRLEESFLVEEDKKHERHPIFGNIVDEVAYHEKYPTIYHLRKKLVDSTDKADLRLIYLALAHMIKFRGHFLIEGDLNPDNSDVDKLFIQLVQTYNQLFEENPINASGVDAKAILSARLSKSRRLENLIAQLPGEKKNGLFGNLIALSLGLTPNFKSNFDLAEDAKLQLSKDTYDDDLDNLLAQIGDQYADLFLAAKNLSDAILLSDILRVNTEITKAPLSASMIKRYDEHHQDLTLLKALVRQQLPEKYKEIFFDQSKNGYAGYIDGGASQEEFYKFIKPILEKMDGTEELLVKLNREDLLRKQRTFDNGSIPHQIHLGELHAILRRQEDFYPFLKDNREKIEKILTFRIPYYVGPLARGNSRFAWMTRKSEETITPWNFEEVVDKGASAQSFIERMTNFDKNLPNEKVLPKHSLLYEYFTVYNELTKVKYVTEGMRKPAFLSGEQKKAIVDLLFKTNRKVTVKQLKEDYFKKIECFDSVEISGVEDRFNASLGTYHDLLKIIKDKDFLDNEENEDILEDIVLTLTLFEDREMIEERLKTYAHLFDDKVMKQLKRRRYTGWGRLSRKLINGIRDKQSGKTILDFLKSDGFANRNFMQLIHDDSLTFKEDIQKAQVSGQGDSLHEHIANLAGSPAIKKGILQTVKVVDELVKVMGRHKPENIVIEMARENQTTQKGQKNSRERMKRIEEGIKELGSQILKEHPVENTQLQNEKLYLYYLQNGRDMYVDQELDINRLSDYDVDHIVPQSFLKDDSIDNKVLTRSDKARGKSDNVPSEEVVKKMKNYWRQLLNAKLITQRKFDNLTKAERGGLSELDKAGFIKRQLVETRQITKHVAQILDSRMNTKYDENDKLIREVKVITLKSKLVSDFRKDFQFYKVREINNYHHAHDAYLNAVVGTALIKKYPKLESEFVYGDYKVYDVRKMIAKSEQEIGKATAKYFFYSNIMNFFKTEITLANGEIRKRPLIETNGETGEIVWDKGRDFATVRKVLSMPQVNIVKKTEVQTGGFSKESILPKRNSDKLIARKKDWDPKKYGGFDSPTVAYSVLVVAKVEKGKSKKLKSVKELLGITIMERSSFEKNPIDFLEAKGYKEVKKDLIIKLPKYSLFELENGRKRMLASAGELQKGNELALPSKYVNFLYLASHYEKLKGSPEDNEQKQLFVEQHKHYLDEIIEQISEFSKRVILADANLDKVLSAYNKHRDKPIREQAENIIHLFTLTNLGAPAAFKYFDTTIDRKRYTSTKEVLDATLIHQSITGLYETRIDLSQLGGDGGAEAAAKEAAAKEAAAKEAAAKALEAEAAAKEAAAKEAAAKEAAAKAGGMDPLQLLQPLEAEIKGTKLKAHWNSGATITCVPQAFLEEEVPIKNIWIKTIHGEKEQPVYYLTFKIQGRKVEAEVISSPYDYILVSPSDIPWLMKKPLQLTTLVPLQEYEERLLKQTMLTGSYKEKLQSLFLKYDALWQHWENQVGHRRIKPHHIATGTVNPRPQKQYPINPKAKASIQTVINDLLKQGVLIQQNSIMNTPVYPVPKPDGKWRMVLDYREVNKTIPLIAAQNQHSAGILSSIFRGKYKTTLDLSNGFWAHSITPESYWLTAFTWLGQQYCWTRLPQGFLNSPALFNADVVDLLKEVPNVQVYVDDIYISHDDPREHLEQLEKVFSLLLNAGYVVSLKKSEIAQHEVEFLGFNITKEGRGLTETFKQKLLNITPPRDLKQLQSILGKLNFARNFIPNFSELVKPLYNIIATAPGKYITWTTDNSQQLQNIISMLNSAENLEERNPEVRLIMKVNTSPSAGYIRFYNEFAKRPIMYLNYVYTKAEVKFTNTEKLLTTIHKGLIKALDLGMGQEILVYSPIVSMTKIQKTPLPERKALPIRWITWMSYLEDPRIQFHYDKTLPELQQVPTVTDDIIAKIKHPSEFSMVFYTDGSAIKHPNVNKSHNAGMGIAQVQFKPEFTVINTWSIPLGDHTAQLAEVAAVEFACKKALKIDGPVLIVTDSFYVAESVNKELPYWQSNGFFNNKKKPLKHVSKWKSIADCIQLKPDIIIIHEKGHQPTASTFHTEGNNLADKLATQGSYVVNAGKRTADGSEFEKRTADGSEFESPKKKAKVE

SEQ ID NO: 648 - protein, 2195 aa, synthetic construct
  source 1..2195: note = Description of Artificial Sequence: Synthetic polypeptide
MPAAKRVKLDGGDKKYSIGLDIGTNSVGWAVITDEYKVPSKKFKVLGNTDRHSIKKNLIGALLFDSGETAEATRLKRTARRRYTRRKNRICYLQEIFSNEMAKVDDSFFHRLEESFLVEEDKKHERHPIFGNIVDEVAYHEKYPTIYHLRKKLVDSTDKADLRLIYLALAHMIKFRGHFLIEGDLNPDNSDVDKLFIQLVQTYNQLFEENPINASGVDAKAILSARLSKSRRLENLIAQLPGEKKNGLFGNLIALSLGLTPNFKSNFDLAEDAKLQLSKDTYDDDLDNLLAQIGDQYADLFLAAKNLSDAILLSDILRVNTEITKAPLSASMIKRYDEHHQDLTLLKALVRQQLPEKYKEIFFDQSKNGYAGYIDGGASQEEFYKFIKPILEKMDGTEELLVKLNREDLLRKQRTFDNGSIPHQIHLGELHAILRRQEDFYPFLKDNREKIEKILTFRIPYYVGPLARGNSRFAWMTRKSEETITPWNFEEVVDKGASAQSFIERMTNFDKNLPNEKVLPKHSLLYEYFTVYNELTKVKYVTEGMRKPAFLSGEQKKAIVDLLFKTNRKVTVKQLKEDYFKKIECFDSVEISGVEDRFNASLGTYHDLLKIIKDKDFLDNEENEDILEDIVLTLTLFEDREMIEERLKTYAHLFDDKVMKQLKRRRYTGWGRLSRKLINGIRDKQSGKTILDFLKSDGFANRNFMQLIHDDSLTFKEDIQKAQVSGQGDSLHEHIANLAGSPAIKKGILQTVKVVDELVKVMGRHKPENIVIEMARENQTTQKGQKNSRERMKRIEEGIKELGSQILKEHPVENTQLQNEKLYLYYLQNGRDMYVDQELDINRLSDYDVDHIVPQSFLKDDSIDNKVLTRSDKARGKSDNVPSEEVVKKMKNYWRQLLNAKLITQRKFDNLTKAERGGLSELDKAGFIKRQLVETRQITKHVAQILDSRMNTKYDENDKLIREVKVITLKSKLVSDFRKDFQFYKVREINNYHHAHDAYLNAVVGTALIKKYPKLESEFVYGDYKVYDVRKMIAKSEQEIGKATAKYFFYSNIMNFFKTEITLANGEIRKRPLIETNGETGEIVWDKGRDFATVRKVLSMPQVNIVKKTEVQTGGFSKESILPKRNSDKLIARKKDWDPKKYGGFDSPTVAYSVLVVAKVEKGKSKKLKSVKELLGITIMERSSFEKNPIDFLEAKGYKEVKKDLIIKLPKYSLFELENGRKRMLASAGELQKGNELALPSKYVNFLYLASHYEKLKGSPEDNEQKQLFVEQHKHYLDEIIEQISEFSKRVILADANLDKVLSAYNKHRDKPIREQAENIIHLFTLTNLGAPAAFKYFDTTIDRKRYTSTKEVLDATLIHQSITGLYETRIDLSQLGGDGGGGGGSGGGGSGGGGSGGGGSGGGGSGGGGSGGMDPLQLLQPLEAEIKGTKLKAHWNSGATITCVPQAFLEEEVPIKNIWIKTIHGEKEQPVYYLTFKIQGRKVEAEVISSPYDYILVSPSDIPWLMKKPLQLTTLVPLQEYEERLLKQTMLTGSYKEKLQSLFLKYDALWQHWENQVGHRRIKPHHIATGTVNPRPQKQYPINPKAKASIQTVINDLLKQGVLIQQNSIMNTPVYPVPKPDGKWRMVLDYREVNKTIPLIAAQNQHSAGILSSIFRGKYKTTLDLSNGFWAHSITPESYWLTAFTWLGQQYCWTRLPQGFLNSPALFNADVVDLLKEVPNVQVYVDDIYISHDDPREHLEQLEKVFSLLLNAGYVVSLKKSEIAQHEVEFLGFNITKEGRGLTETFKQKLLNITPPRDLKQLQSILGKLNFARNFIPNFSELVKPLYNIIATAPGKYITWTTDNSQQLQNIISMLNSAENLEERNPEVRLIMKVNTSPSAGYIRFYNEFAKRPIMYLNYVYTKAEVKFTNTEKLLTTIHKGLIKALDLGMGQEILVYSPIVSMTKIQKTPLPERKALPIRWITWMSYLEDPRIQFHYDKTLPELQQVPTVTDDIIAKIKHPSEFSMVFYTDGSAIKHPNVNKSHNAGMGIAQVQFKPEFTVINTWSIPLGDHTAQLAEVAAVEFACKKALKIDGPVLIVTDSFYVAESVNKELPYWQSNGFFNNKKKPLKHVSKWKSIADCIQLKPDIIIIHEKGHQPTASTFHTEGNNLADKLATQGSYVVNAGKRTADGSEFEKRTADGSEFESPKKKAKVE

SEQ ID NO: 649 - protein, 2190 aa, synthetic construct
  source 1..2190: note = Description of Artificial Sequence: Synthetic polypeptide
MPAAKRVKLDGGDKKYSIGLDIGTNSVGWAVITDEYKVPSKKFKVLGNTDRHSIKKNLIGALLFDSGETAEATRLKRTARRRYTRRKNRICYLQEIFSNEMAKVDDSFFHRLEESFLVEEDKKHERHPIFGNIVDEVAYHEKYPTIYHLRKKLVDSTDKADLRLIYLALAHMIKFRGHFLIEGDLNPDNSDVDKLFIQLVQTYNQLFEENPINASGVDAKAILSARLSKSRRLENLIAQLPGEKKNGLFGNLIALSLGLTPNFKSNFDLAEDAKLQLSKDTYDDDLDNLLAQIGDQYADLFLAAKNLSDAILLSDILRVNTEITKAPLSASMIKRYDEHHQDLTLLKALVRQQLPEKYKEIFFDQSKNGYAGYIDGGASQEEFYKFIKPILEKMDGTEELLVKLNREDLLRKQRTFDNGSIPHQIHLGELHAILRRQEDFYPFLKDNREKIEKILTFRIPYYVGPLARGNSRFAWMTRKSEETITPWNFEEVVDKGASAQSFIERMTNFDKNLPNEKVLPKHSLLYEYFTVYNELTKVKYVTEGMRKPAFLSGEQKKAIVDLLFKTNRKVTVKQLKEDYFKKIECFDSVEISGVEDRFNASLGTYHDLLKIIKDKDFLDNEENEDILEDIVLTLTLFEDREMIEERLKTYAHLFDDKVMKQLKRRRYTGWGRLSRKLINGIRDKQSGKTILDFLKSDGFANRNFMQLIHDDSLTFKEDIQKAQVSGQGDSLHEHIANLAGSPAIKKGILQTVKVVDELVKVMGRHKPENIVIEMARENQTTQKGQKNSRERMKRIEEGIKELGSQILKEHPVENTQLQNEKLYLYYLQNGRDMYVDQELDINRLSDYDVDHIVPQSFLKDDSIDNKVLTRSDKARGKSDNVPSEEVVKKMKNYWRQLLNAKLITQRKFDNLTKAERGGLSELDKAGFIKRQLVETRQITKHVAQILDSRMNTKYDENDKLIREVKVITLKSKLVSDFRKDFQFYKVREINNYHHAHDAYLNAVVGTALIKKYPKLESEFVYGDYKVYDVRKMIAKSEQEIGKATAKYFFYSNIMNFFKTEITLANGEIRKRPLIETNGETGEIVWDKGRDFATVRKVLSMPQVNIVKKTEVQTGGFSKESILPKRNSDKLIARKKDWDPKKYGGFDSPTVAYSVLVVAKVEKGKSKKLKSVKELLGITIMERSSFEKNPIDFLEAKGYKEVKKDLIIKLPKYSLFELENGRKRMLASAGELQKGNELALPSKYVNFLYLASHYEKLKGSPEDNEQKQLFVEQHKHYLDEIIEQISEFSKRVILADANLDKVLSAYNKHRDKPIREQAENIIHLFTLTNLGAPAAFKYFDTTIDRKRYTSTKEVLDATLIHQSITGLYETRIDLSQLGGDGGEAAAKEAAAKEAAAKEAAAKEAAAKGGMDPLQLLQPLEAEIKGTKLKAHWNSGATITCVPQAFLEEEVPIKNIWIKTIHGEKEQPVYYLTFKIQGRKVEAEVISSPYDYILVSPSDIPWLMKKPLQLTTLVPLQEYEERLLKQTMLTGSYKEKLQSLFLKYDALWQHWENQVGHRRIKPHHIATGTVNPRPQKQYPINPKAKASIQTVINDLLKQGVLIQQNSIMNTPVYPVPKPDGKWRMVLDYREVNKTIPLIAAQNQHSAGILSSIFRGKYKTTLDLSNGFWAHSITPESYWLTAFTWLGQQYCWTRLPQGFLNSPALFNADVVDLLKEVPNVQVYVDDIYISHDDPREHLEQLEKVFSLLLNAGYVVSLKKSEIAQHEVEFLGFNITKEGRGLTETFKQKLLNITPPRDLKQLQSILGKLNFARNFIPNFSELVKPLYNIIATAPGKYITWTTDNSQQLQNIISMLNSAENLEERNPEVRLIMKVNTSPSAGYIRFYNEFAKRPIMYLNYVYTKAEVKFTNTEKLLTTIHKGLIKALDLGMGQEILVYSPIVSMTKIQKTPLPERKALPIRWITWMSYLEDPRIQFHYDKTLPELQQVPTVTDDIIAKIKHPSEFSMVFYTDGSAIKHPNVNKSHNAGMGIAQVQFKPEFTVINTWSIPLGDHTAQLAEVAAVEFACKKALKIDGPVLIVTDSFYVAESVNKELPYWQSNGFFNNKKKPLKHVSKWKSIADCIQLKPDIIIIHEKGHQPTASTFHTEGNNLADKLATQGSYVVNAGKRTADGSEFEKRTADGSEFESPKKKAKVE

SEQ ID NO: 650 - protein, 2176 aa, synthetic construct
  source 1..2176: note = Description of Artificial Sequence: Synthetic polypeptide
MPAAKRVKLDGGDKKYSIGLDIGTNSVGWAVITDEYKVPSKKFKVLGNTDRHSIKKNLIGALLFDSGETAEATRLKRTARRRYTRRKNRICYLQEIFSNEMAKVDDSFFHRLEESFLVEEDKKHERHPIFGNIVDEVAYHEKYPTIYHLRKKLVDSTDKADLRLIYLALAHMIKFRGHFLIEGDLNPDNSDVDKLFIQLVQTYNQLFEENPINASGVDAKAILSARLSKSRRLENLIAQLPGEKKNGLFGNLIALSLGLTPNFKSNFDLAEDAKLQLSKDTYDDDLDNLLAQIGDQYADLFLAAKNLSDAILLSDILRVNTEITKAPLSASMIKRYDEHHQDLTLLKALVRQQLPEKYKEIFFDQSKNGYAGYIDGGASQEEFYKFIKPILEKMDGTEELLVKLNREDLLRKQRTFDNGSIPHQIHLGELHAILRRQEDFYPFLKDNREKIEKILTFRIPYYVGPLARGNSRFAWMTRKSEETITPWNFEEVVDKGASAQSFIERMTNFDKNLPNEKVLPKHSLLYEYFTVYNELTKVKYVTEGMRKPAFLSGEQKKAIVDLLFKTNRKVTVKQLKEDYFKKIECFDSVEISGVEDRFNASLGTYHDLLKIIKDKDFLDNEENEDILEDIVLTLTLFEDREMIEERLKTYAHLFDDKVMKQLKRRRYTGWGRLSRKLINGIRDKQSGKTILDFLKSDGFANRNFMQLIHDDSLTFKEDIQKAQVSGQGDSLHEHIANLAGSPAIKKGILQTVKVVDELVKVMGRHKPENIVIEMARENQTTQKGQKNSRERMKRIEEGIKELGSQILKEHPVENTQLQNEKLYLYYLQNGRDMYVDQELDINRLSDYDVDHIVPQSFLKDDSIDNKVLTRSDKARGKSDNVPSEEVVKKMKNYWRQLLNAKLITQRKFDNLTKAERGGLSELDKAGFIKRQLVETRQITKHVAQILDSRMNTKYDENDKLIREVKVITLKSKLVSDFRKDFQFYKVREINNYHHAHDAYLNAVVGTALIKKYPKLESEFVYGDYKVYDVRKMIAKSEQEIGKATAKYFFYSNIMNFFKTEITLANGEIRKRPLIETNGETGEIVWDKGRDFATVRKVLSMPQVNIVKKTEVQTGGFSKESILPKRNSDKLIARKKDWDPKKYGGFDSPTVAYSVLVVAKVEKGKSKKLKSVKELLGITIMERSSFEKNPIDFLEAKGYKEVKKDLIIKLPKYSLFELENGRKRMLASAGELQKGNELALPSKYVNFLYLASHYEKLKGSPEDNEQKQLFVEQHKHYLDEIIEQISEFSKRVILADANLDKVLSAYNKHRDKPIREQAENIIHLFTLTNLGAPAAFKYFDTTIDRKRYTSTKEVLDATLIHQSITGLYETRIDLSQLGGDGGPAPGSSEAAAKGGMDPLQLLQPLEAEIKGTKLKAHWNSGATITCVPQAFLEEEVPIKNIWIKTIHGEKEQPVYYLTFKIQGRKVEAEVISSPYDYILVSPSDIPWLMKKPLQLTTLVPLQEYEERLLKQTMLTGSYKEKLQSLFLKYDALWQHWENQVGHRRIKPHHIATGTVNPRPQKQYPINPKAKASIQTVINDLLKQGVLIQQNSIMNTPVYPVPKPDGKWRMVLDYREVNKTIPLIAAQNQHSAGILSSIFRGKYKTTLDLSNGFWAHSITPESYWLTAFTWLGQQYCWTRLPQGFLNSPALFNADVVDLLKEVPNVQVYVDDIYISHDDPREHLEQLEKVFSLLLNAGYVVSLKKSEIAQHEVEFLGFNITKEGRGLTETFKQKLLNITPPRDLKQLQSILGKLNFARNFIPNFSELVKPLYNIIATAPGKYITWTTDNSQQLQNIISMLNSAENLEERNPEVRLIMKVNTSPSAGYIRFYNEFAKRPIMYLNYVYTKAEVKFTNTEKLLTTIHKGLIKALDLGMGQEILVYSPIVSMTKIQKTPLPERKALPIRWITWMSYLEDPRIQFHYDKTLPELQQVPTVTDDIIAKIKHPSEFSMVFYTDGSAIKHPNVNKSHNAGMGIAQVQFKPEFTVINTWSIPLGDHTAQLAEVAAVEFACKKALKIDGPVLIVTDSFYVAESVNKELPYWQSNGFFNNKKKPLKHVSKWKSIADCIQLKPDIIIIHEKGHQPTASTFHTEGNNLADKLATQGSYVVNAGKRTADGSEFEKRTADGSEFESPKKKAKVE

SEQ ID NO: 651 - protein, 2195 aa, synthetic construct
  source 1..2195: note = Description of Artificial Sequence: Synthetic polypeptide
MPAAKRVKLDGGDKKYSIGLDIGTNSVGWAVITDEYKVPSKKFKVLGNTDRHSIKKNLIGALLFDSGETAEATRLKRTARRRYTRRKNRICYLQEIFSNEMAKVDDSFFHRLEESFLVEEDKKHERHPIFGNIVDEVAYHEKYPTIYHLRKKLVDSTDKADLRLIYLALAHMIKFRGHFLIEGDLNPDNSDVDKLFIQLVQTYNQLFEENPINASGVDAKAILSARLSKSRRLENLIAQLPGEKKNGLFGNLIALSLGLTPNFKSNFDLAEDAKLQLSKDTYDDDLDNLLAQIGDQYADLFLAAKNLSDAILLSDILRVNTEITKAPLSASMIKRYDEHHQDLTLLKALVRQQLPEKYKEIFFDQSKNGYAGYIDGGASQEEFYKFIKPILEKMDGTEELLVKLNREDLLRKQRTFDNGSIPHQIHLGELHAILRRQEDFYPFLKDNREKIEKILTFRIPYYVGPLARGNSRFAWMTRKSEETITPWNFEEVVDKGASAQSFIERMTNFDKNLPNEKVLPKHSLLYEYFTVYNELTKVKYVTEGMRKPAFLSGEQKKAIVDLLFKTNRKVTVKQLKEDYFKKIECFDSVEISGVEDRFNASLGTYHDLLKIIKDKDFLDNEENEDILEDIVLTLTLFEDREMIEERLKTYAHLFDDKVMKQLKRRRYTGWGRLSRKLINGIRDKQSGKTILDFLKSDGFANRNFMQLIHDDSLTFKEDIQKAQVSGQGDSLHEHIANLAGSPAIKKGILQTVKVVDELVKVMGRHKPENIVIEMARENQTTQKGQKNSRERMKRIEEGIKELGSQILKEHPVENTQLQNEKLYLYYLQNGRDMYVDQELDINRLSDYDVDHIVPQSFLKDDSIDNKVLTRSDKARGKSDNVPSEEVVKKMKNYWRQLLNAKLITQRKFDNLTKAERGGLSELDKAGFIKRQLVETRQITKHVAQILDSRMNTKYDENDKLIREVKVITLKSKLVSDFRKDFQFYKVREINNYHHAHDAYLNAVVGTALIKKYPKLESEFVYGDYKVYDVRKMIAKSEQEIGKATAKYFFYSNIMNFFKTEITLANGEIRKRPLIETNGETGEIVWDKGRDFATVRKVLSMPQVNIVKKTEVQTGGFSKESILPKRNSDKLIARKKDWDPKKYGGFDSPTVAYSVLVVAKVEKGKSKKLKSVKELLGITIMERSSFEKNPIDFLEAKGYKEVKKDLIIKLPKYSLFELENGRKRMLASAGELQKGNELALPSKYVNFLYLASHYEKLKGSPEDNEQKQLFVEQHKHYLDEIIEQISEFSKRVILADANLDKVLSAYNKHRDKPIREQAENIIHLFTLTNLGAPAAFKYFDTTIDRKRYTSTKEVLDATLIHQSITGLYETRIDLSQLGGDGGEAAAKEAAAKEAAAKEAAAKEAAAKEAAAKGGMDPLQLLQPLEAEIKGTKLKAHWNSGATITCVPQAFLEEEVPIKNIWIKTIHGEKEQPVYYLTFKIQGRKVEAEVISSPYDYILVSPSDIPWLMKKPLQLTTLVPLQEYEERLLKQTMLTGSYKEKLQSLFLKYDALWQHWENQVGHRRIKPHHIATGTVNPRPQKQYPINPKAKASIQTVINDLLKQGVLIQQNSIMNTPVYPVPKPDGKWRMVLDYREVNKTIPLIAAQNQHSAGILSSIFRGKYKTTLDLSNGFWAHSITPESYWLTAFTWLGQQYCWTRLPQGFLNSPALFNADVVDLLKEVPNVQVYVDDIYISHDDPREHLEQLEKVFSLLLNAGYVVSLKKSEIAQHEVEFLGFNITKEGRGLTETFKQKLLNITPPRDLKQLQSILGKLNFARNFIPNFSELVKPLYNIIATAPGKYITWTTDNSQQLQNIISMLNSAENLEERNPEVRLIMKVNTSPSAGYIRFYNEFAKRPIMYLNYVYTKAEVKFTNTEKLLTTIHKGLIKALDLGMGQEILVYSPIVSMTKIQKTPLPERKALPIRWITWMSYLEDPRIQFHYDKTLPELQQVPTVTDDIIAKIKHPSEFSMVFYTDGSAIKHPNVNKSHNAGMGIAQVQFKPEFTVINTWSIPLGDHTAQLAEVAAVEFACKKALKIDGPVLIVTDSFYVAESVNKELPYWQSNGFFNNKKKPLKHVSKWKSIADCIQLKPDIIIIHEKGHQPTASTFHTEGNNLADKLATQGSYVVNAGKRTADGSEFEKRTADGSEFESPKKKAKVE

SEQ ID NO: 652 - protein, 2198 aa, synthetic construct
  source 1..2198: note = Description of Artificial Sequence: Synthetic polypeptide
MPAAKRVKLDGGDKKYSIGLDIGTNSVGWAVITDEYKVPSKKFKVLGNTDRHSIKKNLIGALLFDSGETAEATRLKRTARRRYTRRKNRICYLQEIFSNEMAKVDDSFFHRLEESFLVEEDKKHERHPIFGNIVDEVAYHEKYPTIYHLRKKLVDSTDKADLRLIYLALAHMIKFRGHFLIEGDLNPDNSDVDKLFIQLVQTYNQLFEENPINASGVDAKAILSARLSKSRRLENLIAQLPGEKKNGLFGNLIALSLGLTPNFKSNFDLAEDAKLQLSKDTYDDDLDNLLAQIGDQYADLFLAAKNLSDAILLSDILRVNTEITKAPLSASMIKRYDEHHQDLTLLKALVRQQLPEKYKEIFFDQSKNGYAGYIDGGASQEEFYKFIKPILEKMDGTEELLVKLNREDLLRKQRTFDNGSIPHQIHLGELHAILRRQEDFYPFLKDNREKIEKILTFRIPYYVGPLARGNSRFAWMTRKSEETITPWNFEEVVDKGASAQSFIERMTNFDKNLPNEKVLPKHSLLYEYFTVYNELTKVKYVTEGMRKPAFLSGEQKKAIVDLLFKTNRKVTVKQLKEDYFKKIECFDSVEISGVEDRFNASLGTYHDLLKIIKDKDFLDNEENEDILEDIVLTLTLFEDREMIEERLKTYAHLFDDKVMKQLKRRRYTGWGRLSRKLINGIRDKQSGKTILDFLKSDGFANRNFMQLIHDDSLTFKEDIQKAQVSGQGDSLHEHIANLAGSPAIKKGILQTVKVVDELVKVMGRHKPENIVIEMARENQTTQKGQKNSRERMKRIEEGIKELGSQILKEHPVENTQLQNEKLYLYYLQNGRDMYVDQELDINRLSDYDVDHIVPQSFLKDDSIDNKVLTRSDKARGKSDNVPSEEVVKKMKNYWRQLLNAKLITQRKFDNLTKAERGGLSELDKAGFIKRQLVETRQITKHVAQILDSRMNTKYDENDKLIREVKVITLKSKLVSDFRKDFQFYKVREINNYHHAHDAYLNAVVGTALIKKYPKLESEFVYGDYKVYDVRKMIAKSEQEIGKATAKYFFYSNIMNFFKTEITLANGEIRKRPLIETNGETGEIVWDKGRDFATVRKVLSMPQVNIVKKTEVQTGGFSKESILPKRNSDKLIARKKDWDPKKYGGFDSPTVAYSVLVVAKVEKGKSKKLKSVKELLGITIMERSSFEKNPIDFLEAKGYKEVKKDLIIKLPKYSLFELENGRKRMLASAGELQKGNELALPSKYVNFLYLASHYEKLKGSPEDNEQKQLFVEQHKHYLDEIIEQISEFSKRVILADANLDKVLSAYNKHRDKPIREQAENIIHLFTLTNLGAPAAFKYFDTTIDRKRYTSTKEVLDATLIHQSITGLYETRIDLSQLGGDGGSGGSSGGSSGSETPGTSESATPESSGGSSGGSSGGMDPLQLLQPLEAEIKGTKLKAHWNSGATITCVPQAFLEEEVPIKNIWIKTIHGEKEQPVYYLTFKIQGRKVEAEVISSPYDYILVSPSDIPWLMKKPLQLTTLVPLQEYEERLLKQTMLTGSYKEKLQSLFLKYDALWQHWENQVGHRRIKPHHIATGTVNPRPQKQYPINPKAKASIQTVINDLLKQGVLIQQNSIMNTPVYPVPKPDGKWRMVLDYREVNKTIPLIAAQNQHSAGILSSIFRGKYKTTLDLSNGFWAHSITPESYWLTAFTWLGQQYCWTRLPQGFLNSPALFNADVVDLLKEVPNVQVYVDDIYISHDDPREHLEQLEKVFSLLLNAGYVVSLKKSEIAQHEVEFLGFNITKEGRGLTETFKQKLLNITPPRDLKQLQSILGKLNFARNFIPNFSELVKPLYNIIATAPGKYITWTTDNSQQLQNIISMLNSAENLEERNPEVRLIMKVNTSPSAGYIRFYNEFAKRPIMYLNYVYTKAEVKFTNTEKLLTTIHKGLIKALDLGMGQEILVYSPIVSMTKIQKTPLPERKALPIRWITWMSYLEDPRIQFHYDKTLPELQQVPTVTDDIIAKIKHPSEFSMVFYTDGSAIKHPNVNKSHNAGMGIAQVQFKPEFTVINTWSIPLGDHTAQLAEVAAVEFACKKALKIDGPVLIVTDSFYVAESVNKELPYWQSNGFFNNKKKPLKHVSKWKSIADCIQLKPDIIIIHEKGHQPTASTFHTEGNNLADKLATQGSYVVNAGKRTADGSEFEKRTADGSEFESPKKKAKVE

SEQ ID NO: 653 - protein, 2176 aa, synthetic construct
  source 1..2176: note = Description of Artificial Sequence: Synthetic polypeptide
MPAAKRVKLDGGDKKYSIGLDIGTNSVGWAVITDEYKVPSKKFKVLGNTDRHSIKKNLIGALLFDSGETAEATRLKRTARRRYTRRKNRICYLQEIFSNEMAKVDDSFFHRLEESFLVEEDKKHERHPIFGNIVDEVAYHEKYPTIYHLRKKLVDSTDKADLRLIYLALAHMIKFRGHFLIEGDLNPDNSDVDKLFIQLVQTYNQLFEENPINASGVDAKAILSARLSKSRRLENLIAQLPGEKKNGLFGNLIALSLGLTPNFKSNFDLAEDAKLQLSKDTYDDDLDNLLAQIGDQYADLFLAAKNLSDAILLSDILRVNTEITKAPLSASMIKRYDEHHQDLTLLKALVRQQLPEKYKEIFFDQSKNGYAGYIDGGASQEEFYKFIKPILEKMDGTEELLVKLNREDLLRKQRTFDNGSIPHQIHLGELHAILRRQEDFYPFLKDNREKIEKILTFRIPYYVGPLARGNSRFAWMTRKSEETITPWNFEEVVDKGASAQSFIERMTNFDKNLPNEKVLPKHSLLYEYFTVYNELTKVKYVTEGMRKPAFLSGEQKKAIVDLLFKTNRKVTVKQLKEDYFKKIECFDSVEISGVEDRFNASLGTYHDLLKIIKDKDFLDNEENEDILEDIVLTLTLFEDREMIEERLKTYAHLFDDKVMKQLKRRRYTGWGRLSRKLINGIRDKQSGKTILDFLKSDGFANRNFMQLIHDDSLTFKEDIQKAQVSGQGDSLHEHIANLAGSPAIKKGILQTVKVVDELVKVMGRHKPENIVIEMARENQTTQKGQKNSRERMKRIEEGIKELGSQILKEHPVENTQLQNEKLYLYYLQNGRDMYVDQELDINRLSDYDVDHIVPQSFLKDDSIDNKVLTRSDKARGKSDNVPSEEVVKKMKNYWRQLLNAKLITQRKFDNLTKAERGGLSELDKAGFIKRQLVETRQITKHVAQILDSRMNTKYDENDKLIREVKVITLKSKLVSDFRKDFQFYKVREINNYHHAHDAYLNAVVGTALIKKYPKLESEFVYGDYKVYDVRKMIAKSEQEIGKATAKYFFYSNIMNFFKTEITLANGEIRKRPLIETNGETGEIVWDKGRDFATVRKVLSMPQVNIVKKTEVQTGGFSKESILPKRNSDKLIARKKDWDPKKYGGFDSPTVAYSVLVVAKVEKGKSKKLKSVKELLGITIMERSSFEKNPIDFLEAKGYKEVKKDLIIKLPKYSLFELENGRKRMLASAGELQKGNELALPSKYVNFLYLASHYEKLKGSPEDNEQKQLFVEQHKHYLDEIIEQISEFSKRVILADANLDKVLSAYNKHRDKPIREQAENIIHLFTLTNLGAPAAFKYFDTTIDRKRYTSTKEVLDATLIHQSITGLYETRIDLSQLGGDGGGGGGGSEAAAKGGMDPLQLLQPLEAEIKGTKLKAHWNSGATITCVPQAFLEEEVPIKNIWIKTIHGEKEQPVYYLTFKIQGRKVEAEVISSPYDYILVSPSDIPWLMKKPLQLTTLVPLQEYEERLLKQTMLTGSYKEKLQSLFLKYDALWQHWENQVGHRRIKPHHIATGTVNPRPQKQYPINPKAKASIQTVINDLLKQGVLIQQNSIMNTPVYPVPKPDGKWRMVLDYREVNKTIPLIAAQNQHSAGILSSIFRGKYKTTLDLSNGFWAHSITPESYWLTAFTWLGQQYCWTRLPQGFLNSPALFNADVVDLLKEVPNVQVYVDDIYISHDDPREHLEQLEKVFSLLLNAGYVVSLKKSEIAQHEVEFLGFNITKEGRGLTETFKQKLLNITPPRDLKQLQSILGKLNFARNFIPNFSELVKPLYNIIATAPGKYITWTTDNSQQLQNIISMLNSAENLEERNPEVRLIMKVNTSPSAGYIRFYNEFAKRPIMYLNYVYTKAEVKFTNTEKLLTTIHKGLIKALDLGMGQEILVYSPIVSMTKIQKTPLPERKALPIRWITWMSYLEDPRIQFHYDKTLPELQQVPTVTDDIIAKIKHPSEFSMVFYTDGSAIKHPNVNKSHNAGMGIAQVQFKPEFTVINTWSIPLGDHTAQLAEVAAVEFACKKALKIDGPVLIVTDSFYVAESVNKELPYWQSNGFFNNKKKPLKHVSKWKSIADCIQLKPDIIIIHEKGHQPTASTFHTEGNNLADKLATQGSYVVNAGKRTADGSEFEKRTADGSEFESPKKKAKVE

SEQ ID NO: 654 - protein, 2178 aa, synthetic construct
  source 1..2178: note = Description of Artificial Sequence: Synthetic polypeptide
MPAAKRVKLDGGDKKYSIGLDIGTNSVGWAVITDEYKVPSKKFKVLGNTDRHSIKKNLIGALLFDSGETAEATRLKRTARRRYTRRKNRICYLQEIFSNEMAKVDDSFFHRLEESFLVEEDKKHERHPIFGNIVDEVAYHEKYPTIYHLRKKLVDSTDKADLRLIYLALAHMIKFRGHFLIEGDLNPDNSDVDKLFIQLVQTYNQLFEENPINASGVDAKAILSARLSKSRRLENLIAQLPGEKKNGLFGNLIALSLGLTPNFKSNFDLAEDAKLQLSKDTYDDDLDNLLAQIGDQYADLFLAAKNLSDAILLSDILRVNTEITKAPLSASMIKRYDEHHQDLTLLKALVRQQLPEKYKEIFFDQSKNGYAGYIDGGASQEEFYKFIKPILEKMDGTEELLVKLNREDLLRKQRTFDNGSIPHQIHLGELHAILRRQEDFYPFLKDNREKIEKILTFRIPYYVGPLARGNSRFAWMTRKSEETITPWNFEEVVDKGASAQSFIERMTNFDKNLPNEKVLPKHSLLYEYFTVYNELTKVKYVTEGMRKPAFLSGEQKKAIVDLLFKTNRKVTVKQLKEDYFKKIECFDSVEISGVEDRFNASLGTYHDLLKIIKDKDFLDNEENEDILEDIVLTLTLFEDREMIEERLKTYAHLFDDKVMKQLKRRRYTGWGRLSRKLINGIRDKQSGKTILDFLKSDGFANRNFMQLIHDDSLTFKEDIQKAQVSGQGDSLHEHIANLAGSPAIKKGILQTVKVVDELVKVMGRHKPENIVIEMARENQTTQKGQKNSRERMKRIEEGIKELGSQILKEHPVENTQLQNEKLYLYYLQNGRDMYVDQELDINRLSDYDVDHIVPQSFLKDDSIDNKVLTRSDKARGKSDNVPSEEVVKKMKNYWRQLLNAKLITQRKFDNLTKAERGGLSELDKAGFIKRQLVETRQITKHVAQILDSRMNTKYDENDKLIREVKVITLKSKLVSDFRKDFQFYKVREINNYHHAHDAYLNAVVGTALIKKYPKLESEFVYGDYKVYDVRKMIAKSEQEIGKATAKYFFYSNIMNFFKTEITLANGEIRKRPLIETNGETGEIVWDKGRDFATVRKVLSMPQVNIVKKTEVQTGGFSKESILPKRNSDKLIARKKDWDPKKYGGFDSPTVAYSVLVVAKVEKGKSKKLKSVKELLGITIMERSSFEKNPIDFLEAKGYKEVKKDLIIKLPKYSLFELENGRKRMLASAGELQKGNELALPSKYVNFLYLASHYEKLKGSPEDNEQKQLFVEQHKHYLDEIIEQISEFSKRVILADANLDKVLSAYNKHRDKPIREQAENIIHLFTLTNLGAPAAFKYFDTTIDRKRYTSTKEVLDATLIHQSITGLYETRIDLSQLGGDGGPAPAPAPAPAPAPGGMDPLQLLQPLEAEIKGTKLKAHWNSGATITCVPQAFLEEEVPIKNIWIKTIHGEKEQPVYYLTFKIQGRKVEAEVISSPYDYILVSPSDIPWLMKKPLQLTTLVPLQEYEERLLKQTMLTGSYKEKLQSLFLKYDALWQHWENQVGHRRIKPHHIATGTVNPRPQKQYPINPKAKASIQTVINDLLKQGVLIQQNSIMNTPVYPVPKPDGKWRMVLDYREVNKTIPLIAAQNQHSAGILSSIFRGKYKTTLDLSNGFWAHSITPESYWLTAFTWLGQQYCWTRLPQGFLNSPALFNADVVDLLKEVPNVQVYVDDIYISHDDPREHLEQLEKVFSLLLNAGYVVSLKKSEIAQHEVEFLGFNITKEGRGLTETFKQKLLNITPPRDLKQLQSILGKLNFARNFIPNFSELVKPLYNIIATAPGKYITWTTDNSQQLQNIISMLNSAENLEERNPEVRLIMKVNTSPSAGYIRFYNEFAKRPIMYLNYVYTKAEVKFTNTEKLLTTIHKGLIKALDLGMGQEILVYSPIVSMTKIQKTPLPERKALPIRWITWMSYLEDPRIQFHYDKTLPELQQVPTVTDDIIAKIKHPSEFSMVFYTDGSAIKHPNVNKSHNAGMGIAQVQFKPEFTVINTWSIPLGDHTAQLAEVAAVEFACKKALKIDGPVLIVTDSFYVAESVNKELPYWQSNGFFNNKKKPLKHVSKWKSIADCIQLKPDIIIIHEKGHQPTASTFHTEGNNLADKLATQGSYVVNAGKRTADGSEFEKRTADGSEFESPKKKAKVE

SEQ ID NO: 655 - protein, 2176 aa, synthetic construct
  source 1..2176: note = Description of Artificial Sequence: Synthetic polypeptide
MPAAKRVKLDGGDKKYSIGLDIGTNSVGWAVITDEYKVPSKKFKVLGNTDRHSIKKNLIGALLFDSGETAEATRLKRTARRRYTRRKNRICYLQEIFSNEMAKVDDSFFHRLEESFLVEEDKKHERHPIFGNIVDEVAYHEKYPTIYHLRKKLVDSTDKADLRLIYLALAHMIKFRGHFLIEGDLNPDNSDVDKLFIQLVQTYNQLFEENPINASGVDAKAILSARLSKSRRLENLIAQLPGEKKNGLFGNLIALSLGLTPNFKSNFDLAEDAKLQLSKDTYDDDLDNLLAQIGDQYADLFLAAKNLSDAILLSDILRVNTEITKAPLSASMIKRYDEHHQDLTLLKALVRQQLPEKYKEIFFDQSKNGYAGYIDGGASQEEFYKFIKPILEKMDGTEELLVKLNREDLLRKQRTFDNGSIPHQIHLGELHAILRRQEDFYPFLKDNREKIEKILTFRIPYYVGPLARGNSRFAWMTRKSEETITPWNFEEVVDKGASAQSFIERMTNFDKNLPNEKVLPKHSLLYEYFTVYNELTKVKYVTEGMRKPAFLSGEQKKAIVDLLFKTNRKVTVKQLKEDYFKKIECFDSVEISGVEDRFNASLGTYHDLLKIIKDKDFLDNEENEDILEDIVLTLTLFEDREMIEERLKTYAHLFDDKVMKQLKRRRYTGWGRLSRKLINGIRDKQSGKTILDFLKSDGFANRNFMQLIHDDSLTFKEDIQKAQVSGQGDSLHEHIANLAGSPAIKKGILQTVKVVDELVKVMGRHKPENIVIEMARENQTTQKGQKNSRERMKRIEEGIKELGSQILKEHPVENTQLQNEKLYLYYLQNGRDMYVDQELDINRLSDYDVDHIVPQSFLKDDSIDNKVLTRSDKARGKSDNVPSEEVVKKMKNYWRQLLNAKLITQRKFDNLTKAERGGLSELDKAGFIKRQLVETRQITKHVAQILDSRMNTKYDENDKLIREVKVITLKSKLVSDFRKDFQFYKVREINNYHHAHDAYLNAVVGTALIKKYPKLESEFVYGDYKVYDVRKMIAKSEQEIGKATAKYFFYSNIMNFFKTEITLANGEIRKRPLIETNGETGEIVWDKGRDFATVRKVLSMPQVNIVKKTEVQTGGFSKESILPKRNSDKLIARKKDWDPKKYGGFDSPTVAYSVLVVAKVEKGKSKKLKSVKELLGITIMERSSFEKNPIDFLEAKGYKEVKKDLIIKLPKYSLFELENGRKRMLASAGELQKGNELALPSKYVNFLYLASHYEKLKGSPEDNEQKQLFVEQHKHYLDEIIEQISEFSKRVILADANLDKVLSAYNKHRDKPIREQAENIIHLFTLTNLGAPAAFKYFDTTIDRKRYTSTKEVLDATLIHQSITGLYETRIDLSQLGGDGGGGGGSSEAAAKGGMDPLQLLQPLEAEIKGTKLKAHWNSGATITCVPQAFLEEEVPIKNIWIKTIHGEKEQPVYYLTFKIQGRKVEAEVISSPYDYILVSPSDIPWLMKKPLQLTTLVPLQEYEERLLKQTMLTGSYKEKLQSLFLKYDALWQHWENQVGHRRIKPHHIATGTVNPRPQKQYPINPKAKASIQTVINDLLKQGVLIQQNSIMNTPVYPVPKPDGKWRMVLDYREVNKTIPLIAAQNQHSAGILSSIFRGKYKTTLDLSNGFWAHSITPESYWLTAFTWLGQQYCWTRLPQGFLNSPALFNADVVDLLKEVPNVQVYVDDIYISHDDPREHLEQLEKVFSLLLNAGYVVSLKKSEIAQHEVEFLGFNITKEGRGLTETFKQKLLNITPPRDLKQLQSILGKLNFARNFIPNFSELVKPLYNIIATAPGKYITWTTDNSQQLQNIISMLNSAENLEERNPEVRLIMKVNTSPSAGYIRFYNEFAKRPIMYLNYVYTKAEVKFTNTEKLLTTIHKGLIKALDLGMGQEILVYSPIVSMTKIQKTPLPERKALPIRWITWMSYLEDPRIQFHYDKTLPELQQVPTVTDDIIAKIKHPSEFSMVFYTDGSAIKHPNVNKSHNAGMGIAQVQFKPEFTVINTWSIPLGDHTAQLAEVAAVEFACKKALKIDGPVLIVTDSFYVAESVNKELPYWQSNGFFNNKKKPLKHVSKWKSIADCIQLKPDIIIIHEKGHQPTASTFHTEGNNLADKLATQGSYVVNAGKRTADGSEFEKRTADGSEFESPKKKAKVE

SEQ ID NO: 656 - protein, 2181 aa, synthetic construct
  source 1..2181: note = Description of Artificial Sequence: Synthetic polypeptide
MPAAKRVKLDGGDKKYSIGLDIGTNSVGWAVITDEYKVPSKKFKVLGNTDRHSIKKNLIGALLFDSGETAEATRLKRTARRRYTRRKNRICYLQEIFSNEMAKVDDSFFHRLEESFLVEEDKKHERHPIFGNIVDEVAYHEKYPTIYHLRKKLVDSTDKADLRLIYLALAHMIKFRGHFLIEGDLNPDNSDVDKLFIQLVQTYNQLFEENPINASGVDAKAILSARLSKSRRLENLIAQLPGEKKNGLFGNLIALSLGLTPNFKSNFDLAEDAKLQLSKDTYDDDLDNLLAQIGDQYADLFLAAKNLSDAILLSDILRVNTEITKAPLSASMIKRYDEHHQDLTLLKALVRQQLPEKYKEIFFDQSKNGYAGYIDGGASQEEFYKFIKPILEKMDGTEELLVKLNREDLLRKQRTFDNGSIPHQIHLGELHAILRRQEDFYPFLKDNREKIEKILTFRIPYYVGPLARGNSRFAWMTRKSEETITPWNFEEVVDKGASAQSFIERMTNFDKNLPNEKVLPKHSLLYEYFTVYNELTKVKYVTEGMRKPAFLSGEQKKAIVDLLFKTNRKVTVKQLKEDYFKKIECFDSVEISGVEDRFNASLGTYHDLLKIIKDKDFLDNEENEDILEDIVLTLTLFEDREMIEERLKTYAHLFDDKVMKQLKRRRYTGWGRLSRKLINGIRDKQSGKTILDFLKSDGFANRNFMQLIHDDSLTFKEDIQKAQVSGQGDSLHEHIANLAGSPAIKKGILQTVKVVDELVKVMGRHKPENIVIEMARENQTTQKGQKNSRERMKRIEEGIKELGSQILKEHPVENTQLQNEKLYLYYLQNGRDMYVDQELDINRLSDYDVDHIVPQSFLKDDSIDNKVLTRSDKARGKSDNVPSEEVVKKMKNYWRQLLNAKLITQRKFDNLTKAERGGLSELDKAGFIKRQLVETRQITKHVAQILDSRMNTKYDENDKLIREVKVITLKSKLVSDFRKDFQFYKVREINNYHHAHDAYLNAVVGTALIKKYPKLESEFVYGDYKVYDVRKMIAKSEQEIGKATAKYFFYSNIMNFFKTEITLANGEIRKRPLIETNGETGEIVWDKGRDFATVRKVLSMPQVNIVKKTEVQTGGFSKESILPKRNSDKLIARKKDWDPKKYGGFDSPTVAYSVLVVAKVEKGKSKKLKSVKELLGITIMERSSFEKNPIDFLEAKGYKEVKKDLIIKLPKYSLFELENGRKRMLASAGELQKGNELALPSKYVNFLYLASHYEKLKGSPEDNEQKQLFVEQHKHYLDEIIEQISEFSKRVILADANLDKVLSAYNKHRDKPIREQAENIIHLFTLTNLGAPAAFKYFDTTIDRKRYTSTKEVLDATLIHQSITGLYETRIDLSQLGGDGGSGSETPGTSESATPESGGMDPLQLLQPLEAEIKGTKLKAHWNSGATITCVPQAFLEEEVPIKNIWIKTIHGEKEQPVYYLTFKIQGRKVEAEVISSPYDYILVSPSDIPWLMKKPLQLTTLVPLQEYEERLLKQTMLTGSYKEKLQSLFLKYDALWQHWENQVGHRRIKPHHIATGTVNPRPQKQYPINPKAKASIQTVINDLLKQGVLIQQNSIMNTPVYPVPKPDGKWRMVLDYREVNKTIPLIAAQNQHSAGILSSIFRGKYKTTLDLSNGFWAHSITPESYWLTAFTWLGQQYCWTRLPQGFLNSPALFNADVVDLLKEVPNVQVYVDDIYISHDDPREHLEQLEKVFSLLLNAGYVVSLKKSEIAQHEVEFLGFNITKEGRGLTETFKQKLLNITPPRDLKQLQSILGKLNFARNFIPNFSELVKPLYNIIATAPGKYITWTTDNSQQLQNIISMLNSAENLEERNPEVRLIMKVNTSPSAGYIRFYNEFAKRPIMYLNYVYTKAEVKFTNTEKLLTTIHKGLIKALDLGMGQEILVYSPIVSMTKIQKTPLPERKALPIRWITWMSYLEDPRIQFHYDKTLPELQQVPTVTDDIIAKIKHPSEFSMVFYTDGSAIKHPNVNKSHNAGMGIAQVQFKPEFTVINTWSIPLGDHTAQLAEVAAVEFACKKALKIDGPVLIVTDSFYVAESVNKELPYWQSNGFFNNKKKPLKHVSKWKSIADCIQLKPDIIIIHEKGHQPTASTFHTEGNNLADKLATQGSYVVNAGKRTADGSEFEKRTADGSEFESPKKKAKVE

SEQ ID NO: 657 - protein, 2177 aa, synthetic construct
  source 1..2177: note = Description of Artificial Sequence: Synthetic polypeptide
MPAAKRVKLDGGDKKYSIGLDIGTNSVGWAVITDEYKVPSKKFKVLGNTDRHSIKKNLIGALLFDSGETAEATRLKRTARRRYTRRKNRICYLQEIFSNEMAKVDDSFFHRLEESFLVEEDKKHERHPIFGNIVDEVAYHEKYPTIYHLRKKLVDSTDKADLRLIYLALAHMIKFRGHFLIEGDLNPDNSDVDKLFIQLVQTYNQLFEENPINASGVDAKAILSARLSKSRRLENLIAQLPGEKKNGLFGNLIALSLGLTPNFKSNFDLAEDAKLQLSKDTYDDDLDNLLAQIGDQYADLFLAAKNLSDAILLSDILRVNTEITKAPLSASMIKRYDEHHQDLTLLKALVRQQLPEKYKEIFFDQSKNGYAGYIDGGASQEEFYKFIKPILEKMDGTEELLVKLNREDLLRKQRTFDNGSIPHQIHLGELHAILRRQEDFYPFLKDNREKIEKILTFRIPYYVGPLARGNSRFAWMTRKSEETITPWNFEEVVDKGASAQSFIERMTNFDKNLPNEKVLPKHSLLYEYFTVYNELTKVKYVTEGMRKPAFLSGEQKKAIVDLLFKTNRKVTVKQLKEDYFKKIECFDSVEISGVEDRFNASLGTYHDLLKIIKDKDFLDNEENEDILEDIVLTLTLFEDREMIEERLKTYAHLFDDKVMKQLKRRRYTGWGRLSRKLINGIRDKQSGKTILDFLKSDGFANRNFMQLIHDDSLTFKEDIQKAQVSGQGDSLHEHIANLAGSPAIKKGILQTVKVVDELVKVMGRHKPENIVIEMARENQTTQKGQKNSRERMKRIEEGIKELGSQILKEHPVENTQLQNEKLYLYYLQNGRDMYVDQELDINRLSDYDVDHIVPQSFLKDDSIDNKVLTRSDKARGKSDNVPSEEVVKKMKNYWRQLLNAKLITQRKFDNLTKAERGGLSELDKAGFIKRQLVETRQITKHVAQILDSRMNTKYDENDKLIREVKVITLKSKLVSDFRKDFQFYKVREINNYHHAHDAYLNAVVGTALIKKYPKLESEFVYGDYKVYDVRKMIAKSEQEIGKATAKYFFYSNIMNFFKTEITLANGEIRKRPLIETNGETGEIVWDKGRDFATVRKVLSMPQVNIVKKTEVQTGGFSKESILPKRNSDKLIARKKDWDPKKYGGFDSPTVAYSVLVVAKVEKGKSKKLKSVKELLGITIMERSSFEKNPIDFLEAKGYKEVKKDLIIKLPKYSLFELENGRKRMLASAGELQKGNELALPSKYVNFLYLASHYEKLKGSPEDNEQKQLFVEQHKHYLDEIIEQISEFSKRVILADANLDKVLSAYNKHRDKPIREQAENIIHLFTLTNLGAPAAFKYFDTTIDRKRYTSTKEVLDATLIHQSITGLYETRIDLSQLGGDGGGSAGSAAGSGEFGGMDPLQLLQPLEAEIKGTKLKAHWNSGATITCVPQAFLEEEVPIKNIWIKTIHGEKEQPVYYLTFKIQGRKVEAEVISSPYDYILVSPSDIPWLMKKPLQLTTLVPLQEYEERLLKQTMLTGSYKEKLQSLFLKYDALWQHWENQVGHRRIKPHHIATGTVNPRPQKQYPINPKAKASIQTVINDLLKQGVLIQQNSIMNTPVYPVPKPDGKWRMVLDYREVNKTIPLIAAQNQHSAGILSSIFRGKYKTTLDLSNGFWAHSITPESYWLTAFTWLGQQYCWTRLPQGFLNSPALFNADVVDLLKEVPNVQVYVDDIYISHDDPREHLEQLEKVFSLLLNAGYVVSLKKSEIAQHEVEFLGFNITKEGRGLTETFKQKLLNITPPRDLKQLQSILGKLNFARNFIPNFSELVKPLYNIIATAPGKYITWTTDNSQQLQNIISMLNSAENLEERNPEVRLIMKVNTSPSAGYIRFYNEFAKRPIMYLNYVYTKAEVKFTNTEKLLTTIHKGLIKALDLGMGQEILVYSPIVSMTKIQKTPLPERKALPIRWITWMSYLEDPRIQFHYDKTLPELQQVPTVTDDIIAKIKHPSEFSMVFYTDGSAIKHPNVNKSHNAGMGIAQVQFKPEFTVINTWSIPLGDHTAQLAEVAAVEFACKKALKIDGPVLIVTDSFYVAESVNKELPYWQSNGFFNNKKKPLKHVSKWKSIADCIQLKPDIIIIHEKGHQPTASTFHTEGNNLADKLATQGSYVVNAGKRTADGSEFEKRTADGSEFESPKKKAKVE

SEQ ID NO: 658 - protein, 2168 aa, synthetic construct
  source 1..2168: note = Description of Artificial Sequence: Synthetic polypeptide
MPAAKRVKLDGGDKKYSIGLDIGTNSVGWAVITDEYKVPSKKFKVLGNTDRHSIKKNLIGALLFDSGETAEATRLKRTARRRYTRRKNRICYLQEIFSNEMAKVDDSFFHRLEESFLVEEDKKHERHPIFGNIVDEVAYHEKYPTIYHLRKKLVDSTDKADLRLIYLALAHMIKFRGHFLIEGDLNPDNSDVDKLFIQLVQTYNQLFEENPINASGVDAKAILSARLSKSRRLENLIAQLPGEKKNGLFGNLIALSLGLTPNFKSNFDLAEDAKLQLSKDTYDDDLDNLLAQIGDQYADLFLAAKNLSDAILLSDILRVNTEITKAPLSASMIKRYDEHHQDLTLLKALVRQQLPEKYKEIFFDQSKNGYAGYIDGGASQEEFYKFIKPILEKMDGTEELLVKLNREDLLRKQRTFDNGSIPHQIHLGELHAILRRQEDFYPFLKDNREKIEKILTFRIPYYVGPLARGNSRFAWMTRKSEETITPWNFEEVVDKGASAQSFIERMTNFDKNLPNEKVLPKHSLLYEYFTVYNELTKVKYVTEGMRKPAFLSGEQKKAIVDLLFKTNRKVTVKQLKEDYFKKIECFDSVEISGVEDRFNASLGTYHDLLKIIKDKDFLDNEENEDILEDIVLTLTLFEDREMIEERLKTYAHLFDDKVMKQLKRRRYTGWGRLSRKLINGIRDKQSGKTILDFLKSDGFANRNFMQLIHDDSLTFKEDIQKAQVSGQGDSLHEHIANLAGSPAIKKGILQTVKVVDELVKVMGRHKPENIVIEMARENQTTQKGQKNSRERMKRIEEGIKELGSQILKEHPVENTQLQNEKLYLYYLQNGRDMYVDQELDINRLSDYDVDHIVPQSFLKDDSIDNKVLTRSDKARGKSDNVPSEEVVKKMKNYWRQLLNAKLITQRKFDNLTKAERGGLSELDKAGFIKRQLVETRQITKHVAQILDSRMNTKYDENDKLIREVKVITLKSKLVSDFRKDFQFYKVREINNYHHAHDAYLNAVVGTALIKKYPKLESEFVYGDYKVYDVRKMIAKSEQEIGKATAKYFFYSNIMNFFKTEITLANGEIRKRPLIETNGETGEIVWDKGRDFATVRKVLSMPQVNIVKKTEVQTGGFSKESILPKRNSDKLIARKKDWDPKKYGGFDSPTVAYSVLVVAKVEKGKSKKLKSVKELLGITIMERSSFEKNPIDFLEAKGYKEVKKDLIIKLPKYSLFELENGRKRMLASAGELQKGNELALPSKYVNFLYLASHYEKLKGSPEDNEQKQLFVEQHKHYLDEIIEQISEFSKRVILADANLDKVLSAYNKHRDKPIREQAENIIHLFTLTNLGAPAAFKYFDTTIDRKRYTSTKEVLDATLIHQSITGLYETRIDLSQLGGDGGGGGGGMDPLQLLQPLEAEIKGTKLKAHWNSGATITCVPQAFLEEEVPIKNIWIKTIHGEKEQPVYYLTFKIQGRKVEAEVISSPYDYILVSPSDIPWLMKKPLQLTTLVPLQEYEERLLKQTMLTGSYKEKLQSLFLKYDALWQHWENQVGHRRIKPHHIATGTVNPRPQKQYPINPKAKASIQTVINDLLKQGVLIQQNSIMNTPVYPVPKPDGKWRMVLDYREVNKTIPLIAAQNQHSAGILSSIFRGKYKTTLDLSNGFWAHSITPESYWLTAFTWLGQQYCWTRLPQGFLNSPALFNADVVDLLKEVPNVQVYVDDIYISHDDPREHLEQLEKVFSLLLNAGYVVSLKKSEIAQHEVEFLGFNITKEGRGLTETFKQKLLNITPPRDLKQLQSILGKLNFARNFIPNFSELVKPLYNIIATAPGKYITWTTDNSQQLQNIISMLNSAENLEERNPEVRLIMKVNTSPSAGYIRFYNEFAKRPIMYLNYVYTKAEVKFTNTEKLLTTIHKGLIKALDLGMGQEILVYSPIVSMTKIQKTPLPERKALPIRWITWMSYLEDPRIQFHYDKTLPELQQVPTVTDDIIAKIKHPSEFSMVFYTDGSAIKHPNVNKSHNAGMGIAQVQFKPEFTVINTWSIPLGDHTAQLAEVAAVEFACKKALKIDGPVLIVTDSFYVAESVNKELPYWQSNGFFNNKKKPLKHVSKWKSIADCIQLKPDIIIIHEKGHQPTASTFHTEGNNLADKLATQGSYVVNAGKRTADGSEFEKRTADGSEFESPKKKAKVE

SEQ ID NO: 659 - protein, 2176 aa, synthetic construct
  source 1..2176: note = Description of Artificial Sequence: Synthetic polypeptide
MPAAKRVKLDGGDKKYSIGLDIGTNSVGWAVITDEYKVPSKKFKVLGNTDRHSIKKNLIGALLFDSGETAEATRLKRTARRRYTRRKNRICYLQEIFSNEMAKVDDSFFHRLEESFLVEEDKKHERHPIFGNIVDEVAYHEKYPTIYHLRKKLVDSTDKADLRLIYLALAHMIKFRGHFLIEGDLNPDNSDVDKLFIQLVQTYNQLFEENPINASGVDAKAILSARLSKSRRLENLIAQLPGEKKNGLFGNLIALSLGLTPNFKSNFDLAEDAKLQLSKDTYDDDLDNLLAQIGDQYADLFLAAKNLSDAILLSDILRVNTEITKAPLSASMIKRYDEHHQDLTLLKALVRQQLPEKYKEIFFDQSKNGYAGYIDGGASQEEFYKFIKPILEKMDGTEELLVKLNREDLLRKQRTFDNGSIPHQIHLGELHAILRRQEDFYPFLKDNREKIEKILTFRIPYYVGPLARGNSRFAWMTRKSEETITPWNFEEVVDKGASAQSFIERMTNFDKNLPNEKVLPKHSLLYEYFTVYNELTKVKYVTEGMRKPAFLSGEQKKAIVDLLFKTNRKVTVKQLKEDYFKKIECFDSVEISGVEDRFNASLGTYHDLLKIIKDKDFLDNEENEDILEDIVLTLTLFEDREMIEERLKTYAHLFDDKVMKQLKRRRYTGWGRLSRKLINGIRDKQSGKTILDFLKSDGFANRNFMQLIHDDSLTFKEDIQKAQVSGQGDSLHEHIANLAGSPAIKKGILQTVKVVDELVKVMGRHKPENIVIEMARENQTTQKGQKNSRERMKRIEEGIKELGSQILKEHPVENTQLQNEKLYLYYLQNGRDMYVDQELDINRLSDYDVDHIVPQSFLKDDSIDNKVLTRSDKARGKSDNVPSEEVVKKMKNYWRQLLNAKLITQRKFDNLTKAERGGLSELDKAGFIKRQLVETRQITKHVAQILDSRMNTKYDENDKLIREVKVITLKSKLVSDFRKDFQFYKVREINNYHHAHDAYLNAVVGTALIKKYPKLESEFVYGDYKVYDVRKMIAKSEQEIGKATAKYFFYSNIMNFFKTEITLANGEIRKRPLIETNGETGEIVWDKGRDFATVRKVLSMPQVNIVKKTEVQTGGFSKESILPKRNSDKLIARKKDWDPKKYGGFDSPTVAYSVLVVAKVEKGKSKKLKSVKELLGITIMERSSFEKNPIDFLEAKGYKEVKKDLIIKLPKYSLFELENGRKRMLASAGELQKGNELALPSKYVNFLYLASHYEKLKGSPEDNEQKQLFVEQHKHYLDEIIEQISEFSKRVILADANLDKVLSAYNKHRDKPIREQAENIIHLFTLTNLGAPAAFKYFDTTIDRKRYTSTKEVLDATLIHQSITGLYETRIDLSQLGGDGGGGSGGGEAAAKGGMDPLQLLQPLEAEIKGTKLKAHWNSGATITCVPQAFLEEEVPIKNIWIKTIHGEKEQPVYYLTFKIQGRKVEAEVISSPYDYILVSPSDIPWLMKKPLQLTTLVPLQEYEERLLKQTMLTGSYKEKLQSLFLKYDALWQHWENQVGHRRIKPHHIATGTVNPRPQKQYPINPKAKASIQTVINDLLKQGVLIQQNSIMNTPVYPVPKPDGKWRMVLDYREVNKTIPLIAAQNQHSAGILSSIFRGKYKTTLDLSNGFWAHSITPESYWLTAFTWLGQQYCWTRLPQGFLNSPALFNADVVDLLKEVPNVQVYVDDIYISHDDPREHLEQLEKVFSLLLNAGYVVSLKKSEIAQHEVEFLGFNITKEGRGLTETFKQKLLNITPPRDLKQLQSILGKLNFARNFIPNFSELVKPLYNIIATAPGKYITWTTDNSQQLQNIISMLNSAENLEERNPEVRLIMKVNTSPSAGYIRFYNEFAKRPIMYLNYVYTKAEVKFTNTEKLLTTIHKGLIKALDLGMGQEILVYSPIVSMTKIQKTPLPERKALPIRWITWMSYLEDPRIQFHYDKTLPELQQVPTVTDDIIAKIKHPSEFSMVFYTDGSAIKHPNVNKSHNAGMGIAQVQFKPEFTVINTWSIPLGDHTAQLAEVAAVEFACKKALKIDGPVLIVTDSFYVAESVNKELPYWQSNGFFNNKKKPLKHVSKWKSIADCIQLKPDIIIIHEKGHQPTASTFHTEGNNLADKLATQGSYVVNAGKRTADGSEFEKRTADGSEFESPKKKAKVE

SEQ ID NO: 660 - protein, 2180 aa, synthetic construct
  source 1..2180: note = Description of Artificial Sequence: Synthetic polypeptide
MPAAKRVKLDGGDKKYSIGLDIGTNSVGWAVITDEYKVPSKKFKVLGNTDRHSIKKNLIGALLFDSGETAEATRLKRTARRRYTRRKNRICYLQEIFSNEMAKVDDSFFHRLEESFLVEEDKKHERHPIFGNIVDEVAYHEKYPTIYHLRKKLVDSTDKADLRLIYLALAHMIKFRGHFLIEGDLNPDNSDVDKLFIQLVQTYNQLFEENPINASGVDAKAILSARLSKSRRLENLIAQLPGEKKNGLFGNLIALSLGLTPNFKSNFDLAEDAKLQLSKDTYDDDLDNLLAQIGDQYADLFLAAKNLSDAILLSDILRVNTEITKAPLSASMIKRYDEHHQDLTLLKALVRQQLPEKYKEIFFDQSKNGYAGYIDGGASQEEFYKFIKPILEKMDGTEELLVKLNREDLLRKQRTFDNGSIPHQIHLGELHAILRRQEDFYPFLKDNREKIEKILTFRIPYYVGPLARGNSRFAWMTRKSEETITPWNFEEVVDKGASAQSFIERMTNFDKNLPNEKVLPKHSLLYEYFTVYNELTKVKYVTEGMRKPAFLSGEQKKAIVDLLFKTNRKVTVKQLKEDYFKKIECFDSVEISGVEDRFNASLGTYHDLLKIIKDKDFLDNEENEDILEDIVLTLTLFEDREMIEERLKTYAHLFDDKVMKQLKRRRYTGWGRLSRKLINGIRDKQSGKTILDFLKSDGFANRNFMQLIHDDSLTFKEDIQKAQVSGQGDSLHEHIANLAGSPAIKKGILQTVKVVDELVKVMGRHKPENIVIEMARENQTTQKGQKNSRERMKRIEEGIKELGSQILKEHPVENTQLQNEKLYLYYLQNGRDMYVDQELDINRLSDYDVDHIVPQSFLKDDSIDNKVLTRSDKARGKSDNVPSEEVVKKMKNYWRQLLNAKLITQRKFDNLTKAERGGLSELDKAGFIKRQLVETRQITKHVAQILDSRMNTKYDENDKLIREVKVITLKSKLVSDFRKDFQFYKVREINNYHHAHDAYLNAVVGTALIKKYPKLESEFVYGDYKVYDVRKMIAKSEQEIGKATAKYFFYSNIMNFFKTEITLANGEIRKRPLIETNGETGEIVWDKGRDFATVRKVLSMPQVNIVKKTEVQTGGFSKESILPKRNSDKLIARKKDWDPKKYGGFDSPTVAYSVLVVAKVEKGKSKKLKSVKELLGITIMERSSFEKNPIDFLEAKGYKEVKKDLIIKLPKYSLFELENGRKRMLASAGELQKGNELALPSKYVNFLYLASHYEKLKGSPEDNEQKQLFVEQHKHYLDEIIEQISEFSKRVILADANLDKVLSAYNKHRDKPIREQAENIIHLFTLTNLGAPAAFKYFDTTIDRKRYTSTKEVLDATLIHQSITGLYETRIDLSQLGGDGGEAAAKGGGGSEAAAKGGMDPLQLLQPLEAEIKGTKLKAHWNSGATITCVPQAFLEEEVPIKNIWIKTIHGEKEQPVYYLTFKIQGRKVEAEVISSPYDYILVSPSDIPWLMKKPLQLTTLVPLQEYEERLLKQTMLTGSYKEKLQSLFLKYDALWQHWENQVGHRRIKPHHIATGTVNPRPQKQYPINPKAKASIQTVINDLLKQGVLIQQNSIMNTPVYPVPKPDGKWRMVLDYREVNKTIPLIAAQNQHSAGILSSIFRGKYKTTLDLSNGFWAHSITPESYWLTAFTWLGQQYCWTRLPQGFLNSPALFNADVVDLLKEVPNVQVYVDDIYISHDDPREHLEQLEKVFSLLLNAGYVVSLKKSEIAQHEVEFLGFNITKEGRGLTETFKQKLLNITPPRDLKQLQSILGKLNFARNFIPNFSELVKPLYNIIATAPGKYITWTTDNSQQLQNIISMLNSAENLEERNPEVRLIMKVNTSPSAGYIRFYNEFAKRPIMYLNYVYTKAEVKFTNTEKLLTTIHKGLIKALDLGMGQEILVYSPIVSMTKIQKTPLPERKALPIRWITWMSYLEDPRIQFHYDKTLPELQQVPTVTDDIIAKIKHPSEFSMVFYTDGSAIKHPNVNKSHNAGMGIAQVQFKPEFTVINTWSIPLGDHTAQLAEVAAVEFACKKALKIDGPVLIVTDSFYVAESVNKELPYWQSNGFFNNKKKPLKHVSKWKSIADCIQLKPDIIIIHEKGHQPTASTFHTEGNNLADKLATQGSYVVNAGKRTADGSEFEKRTADGSEFESPKKKAKVE

SEQ ID NO: 661 - protein, 2176 aa, synthetic construct
  source 1..2176: note = Description of Artificial Sequence: Synthetic polypeptide
MPAAKRVKLDGGDKKYSIGLDIGTNSVGWAVITDEYKVPSKKFKVLGNTDRHSIKKNLIGALLFDSGETAEATRLKRTARRRYTRRKNRICYLQEIFSNEMAKVDDSFFHRLEESFLVEEDKKHERHPIFGNIVDEVAYHEKYPTIYHLRKKLVDSTDKADLRLIYLALAHMIKFRGHFLIEGDLNPDNSDVDKLFIQLVQTYNQLFEENPINASGVDAKAILSARLSKSRRLENLIAQLPGEKKNGLFGNLIALSLGLTPNFKSNFDLAEDAKLQLSKDTYDDDLDNLLAQIGDQYADLFLAAKNLSDAILLSDILRVNTEITKAPLSASMIKRYDEHHQDLTLLKALVRQQLPEKYKEIFFDQSKNGYAGYIDGGASQEEFYKFIKPILEKMDGTEELLVKLNREDLLRKQRTFDNGSIPHQIHLGELHAILRRQEDFYPFLKDNREKIEKILTFRIPYYVGPLARGNSRFAWMTRKSEETITPWNFEEVVDKGASAQSFIERMTNFDKNLPNEKVLPKHSLLYEYFTVYNELTKVKYVTEGMRKPAFLSGEQKKAIVDLLFKTNRKVTVKQLKEDYFKKIECFDSVEISGVEDRFNASLGTYHDLLKIIKDKDFLDNEENEDILEDIVLTLTLFEDREMIEERLKTYAHLFDDKVMKQLKRRRYTGWGRLSRKLINGIRDKQSGKTILDFLKSDGFANRNFMQLIHDDSLTFKEDIQKAQVSGQGDSLHEHIANLAGSPAIKKGILQTVKVVDELVKVMGRHKPENIVIEMARENQTTQKGQKNSRERMKRIEEGIKELGSQILKEHPVENTQLQNEKLYLYYLQNGRDMYVDQELDINRLSDYDVDHIVPQSFLKDDSIDNKVLTRSDKARGKSDNVPSEEVVKKMKNYWRQLLNAKLITQRKFDNLTKAERGGLSELDKAGFIKRQLVETRQITKHVAQILDSRMNTKYDENDKLIREVKVITLKSKLVSDFRKDFQFYKVREINNYHHAHDAYLNAVVGTALIKKYPKLESEFVYGDYKVYDVRKMIAKSEQEIGKATAKYFFYSNIMNFFKTEITLANGEIRKRPLIETNGETGEIVWDKGRDFATVRKVLSMPQVNIVKKTEVQTGGFSKESILPKRNSDKLIARKKDWDPKKYGGFDSPTVAYSVLVVAKVEKGKSKKLKSVKELLGITIMERSSFEKNPIDFLEAKGYKEVKKDLIIKLPKYSLFELENGRKRMLASAGELQKGNELALPSKYVNFLYLASHYEKLKGSPEDNEQKQLFVEQHKHYLDEIIEQISEFSKRVILADANLDKVLSAYNKHRDKPIREQAENIIHLFTLTNLGAPAAFKYFDTTIDRKRYTSTKEVLDATLIHQSITGLYETRIDLSQLGGDGGGGSEAAAKGGGGGMDPLQLLQPLEAEIKGTKLKAHWNSGATITCVPQAFLEEEVPIKNIWIKTIHGEKEQPVYYLTFKIQGRKVEAEVISSPYDYILVSPSDIPWLMKKPLQLTTLVPLQEYEERLLKQTMLTGSYKEKLQSLFLKYDALWQHWENQVGHRRIKPHHIATGTVNPRPQKQYPINPKAKASIQTVINDLLKQGVLIQQNSIMNTPVYPVPKPDGKWRMVLDYREVNKTIPLIAAQNQHSAGILSSIFRGKYKTTLDLSNGFWAHSITPESYWLTAFTWLGQQYCWTRLPQGFLNSPALFNADVVDLLKEVPNVQVYVDDIYISHDDPREHLEQLEKVFSLLLNAGYVVSLKKSEIAQHEVEFLGFNITKEGRGLTETFKQKLLNITPPRDLKQLQSILGKLNFARNFIPNFSELVKPLYNIIATAPGKYITWTTDNSQQLQNIISMLNSAENLEERNPEVRLIMKVNTSPSAGYIRFYNEFAKRPIMYLNYVYTKAEVKFTNTEKLLTTIHKGLIKALDLGMGQEILVYSPIVSMTKIQKTPLPERKALPIRWITWMSYLEDPRIQFHYDKTLPELQQVPTVTDDIIAKIKHPSEFSMVFYTDGSAIKHPNVNKSHNAGMGIAQVQFKPEFTVINTWSIPLGDHTAQLAEVAAVEFACKKALKIDGPVLIVTDSFYVAESVNKELPYWQSNGFFNNKKKPLKHVSKWKSIADCIQLKPDIIIIHEKGHQPTASTFHTEGNNLADKLATQGSYVVNAGKRTADGSEFEKRTADGSEFESPKKKAKVE

SEQ ID NO: 662 - protein, 2183 aa, synthetic construct
  source 1..2183: note = Description of Artificial Sequence: Synthetic polypeptide
MPAAKRVKLDGGDKKYSIGLDIGTNSVGWAVITDEYKVPSKKFKVLGNTDRHSIKKNLIGALLFDSGETAEATRLKRTARRRYTRRKNRICYLQEIFSNEMAKVDDSFFHRLEESFLVEEDKKHERHPIFGNIVDEVAYHEKYPTIYHLRKKLVDSTDKADLRLIYLALAHMIKFRGHFLIEGDLNPDNSDVDKLFIQLVQTYNQLFEENPINASGVDAKAILSARLSKSRRLENLIAQLPGEKKNGLFGNLIALSLGLTPNFKSNFDLAEDAKLQLSKDTYDDDLDNLLAQIGDQYADLFLAAKNLSDAILLSDILRVNTEITKAPLSASMIKRYDEHHQDLTLLKALVRQQLPEKYKEIFFDQSKNGYAGYIDGGASQEEFYKFIKPILEKMDGTEELLVKLNREDLLRKQRTFDNGSIPHQIHLGELHAILRRQEDFYPFLKDNREKIEKILTFRIPYYVGPLARGNSRFAWMTRKSEETITPWNFEEVVDKGASAQSFIERMTNFDKNLPNEKVLPKHSLLYEYFTVYNELTKVKYVTEGMRKPAFLSGEQKKAIVDLLFKTNRKVTVKQLKEDYFKKIECFDSVEISGVEDRFNASLGTYHDLLKIIKDKDFLDNEENEDILEDIVLTLTLFEDREMIEERLKTYAHLFDDKVMKQLKRRRYTGWGRLSRKLINGIRDKQSGKTILDFLKSDGFANRNFMQLIHDDSLTFKEDIQKAQVSGQGDSLHEHIANLAGSPAIKKGILQTVKVVDELVKVMGRHKPENIVIEMARENQTTQKGQKNSRERMKRIEEGIKELGSQILKEHPVENTQLQNEKLYLYYLQNGRDMYVDQELDINRLSDYDVDHIVPQSFLKDDSIDNKVLTRSDKARGKSDNVPSEEVVKKMKNYWRQLLNAKLITQRKFDNLTKAERGGLSELDKAGFIKRQLVETRQITKHVAQILDSRMNTKYDENDKLIREVKVITLKSKLVSDFRKDFQFYKVREINNYHHAHDAYLNAVVGTALIKKYPKLESEFVYGDYKVYDVRKMIAKSEQEIGKATAKYFFYSNIMNFFKTEITLANGEIRKRPLIETNGETGEIVWDKGRDFATVRKVLSMPQVNIVKKTEVQTGGFSKESILPKRNSDKLIARKKDWDPKKYGGFDSPTVAYSVLVVAKVEKGKSKKLKSVKELLGITIMERSSFEKNPIDFLEAKGYKEVKKDLIIKLPKYSLFELENGRKRMLASAGELQKGNELALPSKYVNFLYLASHYEKLKGSPEDNEQKQLFVEQHKHYLDEIIEQISEFSKRVILADANLDKVLSAYNKHRDKPIREQAENIIHLFTLTNLGAPAAFKYFDTTIDRKRYTSTKEVLDATLIHQSITGLYETRIDLSQLGGDGGGSSGSSGSSGSSGSSGSSGGMDPLQLLQPLEAEIKGTKLKAHWNSGATITCVPQAFLEEEVPIKNIWIKTIHGEKEQPVYYLTFKIQGRKVEAEVISSPYDYILVSPSDIPWLMKKPLQLTTLVPLQEYEERLLKQTMLTGSYKEKLQSLFLKYDALWQHWENQVGHRRIKPHHIATGTVNPRPQKQYPINPKAKASIQTVINDLLKQGVLIQQNSIMNTPVYPVPKPDGKWRMVLDYREVNKTIPLIAAQNQHSAGILSSIFRGKYKTTLDLSNGFWAHSITPESYWLTAFTWLGQQYCWTRLPQGFLNSPALFNADVVDLLKEVPNVQVYVDDIYISHDDPREHLEQLEKVFSLLLNAGYVVSLKKSEIAQHEVEFLGFNITKEGRGLTETFKQKLLNITPPRDLKQLQSILGKLNFARNFIPNFSELVKPLYNIIATAPGKYITWTTDNSQQLQNIISMLNSAENLEERNPEVRLIMKVNTSPSAGYIRFYNEFAKRPIMYLNYVYTKAEVKFTNTEKLLTTIHKGLIKALDLGMGQEILVYSPIVSMTKIQKTPLPERKALPIRWITWMSYLEDPRIQFHYDKTLPELQQVPTVTDDIIAKIKHPSEFSMVFYTDGSAIKHPNVNKSHNAGMGIAQVQFKPEFTVINTWSIPLGDHTAQLAEVAAVEFACKKALKIDGPVLIVTDSFYVAESVNKELPYWQSNGFFNNKKKPLKHVSKWKSIADCIQLKPDIIIIHEKGHQPTASTFHTEGNNLADKLATQGSYVVNAGKRTADGSEFEKRTADGSEFESPKKKAKVE

SEQ ID NO: 663 - protein, 2176 aa, synthetic construct
  source 1..2176: note = Description of Artificial Sequence: Synthetic polypeptide
MPAAKRVKLDGGDKKYSIGLDIGTNSVGWAVITDEYKVPSKKFKVLGNTDRHSIKKNLIGALLFDSGETAEATRLKRTARRRYTRRKNRICYLQEIFSNEMAKVDDSFFHRLEESFLVEEDKKHERHPIFGNIVDEVAYHEKYPTIYHLRKKLVDSTDKADLRLIYLALAHMIKFRGHFLIEGDLNPDNSDVDKLFIQLVQTYNQLFEENPINASGVDAKAILSARLSKSRRLENLIAQLPGEKKNGLFGNLIALSLGLTPNFKSNFDLAEDAKLQLSKDTYDDDLDNLLAQIGDQYADLFLAAKNLSDAILLSDILRVNTEITKAPLSASMIKRYDEHHQDLTLLKALVRQQLPEKYKEIFFDQSKNGYAGYIDGGASQEEFYKFIKPILEKMDGTEELLVKLNREDLLRKQRTFDNGSIPHQIHLGELHAILRRQEDFYPFLKDNREKIEKILTFRIPYYVGPLARGNSRFAWMTRKSEETITPWNFEEVVDKGASAQSFIERMTNFDKNLPNEKVLPKHSLLYEYFTVYNELTKVKYVTEGMRKPAFLSGEQKKAIVDLLFKTNRKVTVKQLKEDYFKKIECFDSVEISGVEDRFNASLGTYHDLLKIIKDKDFLDNEENEDILEDIVLTLTLFEDREMIEERLKTYAHLFDDKVMKQLKRRRYTGWGRLSRKLINGIRDKQSGKTILDFLKSDGFANRNFMQLIHDDSLTFKEDIQKAQVSGQGDSLHEHIANLAGSPAIKKGILQTVKVVDELVKVMGRHKPENIVIEMARENQTTQKGQKNSRERMKRIEEGIKELGSQILKEHPVENTQLQNEKLYLYYLQNGRDMYVDQELDINRLSDYDVDHIVPQSFLKDDSIDNKVLTRSDKARGKSDNVPSEEVVKKMKNYWRQLLNAKLITQRKFDNLTKAERGGLSELDKAGFIKRQLVETRQITKHVAQILDSRMNTKYDENDKLIREVKVITLKSKLVSDFRKDFQFYKVREINNYHHAHDAYLNAVVGTALIKKYPKLESEFVYGDYKVYDVRKMIAKSEQEIGKATAKYFFYSNIMNFFKTEITLANGEIRKRPLIETNGETGEIVWDKGRDFATVRKVLSMPQVNIVKKTEVQTGGFSKESILPKRNSDKLIARKKDWDPKKYGGFDSPTVAYSVLVVAKVEKGKSKKLKSVKELLGITIMERSSFEKNPIDFLEAKGYKEVKKDLIIKLPKYSLFELENGRKRMLASAGELQKGNELALPSKYVNFLYLASHYEKLKGSPEDNEQKQLFVEQHKHYLDEIIEQISEFSKRVILADANLDKVLSAYNKHRDKPIREQAENIIHLFTLTNLGAPAAFKYFDTTIDRKRYTSTKEVLDATLIHQSITGLYETRIDLSQLGGDGGGGGPAPEAAAKGGMDPLQLLQPLEAEIKGTKLKAHWNSGATITCVPQAFLEEEVPIKNIWIKTIHGEKEQPVYYLTFKIQGRKVEAEVISSPYDYILVSPSDIPWLMKKPLQLTTLVPLQEYEERLLKQTMLTGSYKEKLQSLFLKYDALWQHWENQVGHRRIKPHHIATGTVNPRPQKQYPINPKAKASIQTVINDLLKQGVLIQQNSIMNTPVYPVPKPDGKWRMVLDYREVNKTIPLIAAQNQHSAGILSSIFRGKYKTTLDLSNGFWAHSITPESYWLTAFTWLGQQYCWTRLPQGFLNSPALFNADVVDLLKEVPNVQVYVDDIYISHDDPREHLEQLEKVFSLLLNAGYVVSLKKSEIAQHEVEFLGFNITKEGRGLTETFKQKLLNITPPRDLKQLQSILGKLNFARNFIPNFSELVKPLYNIIATAPGKYITWTTDNSQQLQNIISMLNSAENLEERNPEVRLIMKVNTSPSAGYIRFYNEFAKRPIMYLNYVYTKAEVKFTNTEKLLTTIHKGLIKALDLGMGQEILVYSPIVSMTKIQKTPLPERKALPIRWITWMSYLEDPRIQFHYDKTLPELQQVPTVTDDIIAKIKHPSEFSMVFYTDGSAIKHPNVNKSHNAGMGIAQVQFKPEFTVINTWSIPLGDHTAQLAEVAAVEFACKKALKIDGPVLIVTDSFYVAESVNKELPYWQSNGFFNNKKKPLKHVSKWKSIADCIQLKPDIIIIHEKGHQPTASTFHTEGNNLADKLATQGSYVVNAGKRTADGSEFEKRTADGSEFESPKKKAKVE

SEQ ID NO: 664 - protein, 2176 aa, synthetic construct
  source 1..2176: note = Description of Artificial Sequence: Synthetic polypeptide
MPAAKRVKLDGGDKKYSIGLDIGTNSVGWAVITDEYKVPSKKFKVLGNTDRHSIKKNLIGALLFDSGETAEATRLKRTARRRYTRRKNRICYLQEIFSNEMAKVDDSFFHRLEESFLVEEDKKHERHPIFGNIVDEVAYHEKYPTIYHLRKKLVDSTDKADLRLIYLALAHMIKFRGHFLIEGDLNPDNSDVDKLFIQLVQTYNQLFEENPINASGVDAKAILSARLSKSRRLENLIAQLPGEKKNGLFGNLIALSLGLTPNFKSNFDLAEDAKLQLSKDTYDDDLDNLLAQIGDQYADLFLAAKNLSDAILLSDILRVNTEITKAPLSASMIKRYDEHHQDLTLLKALVRQQLPEKYKEIFFDQSKNGYAGYIDGGASQEEFYKFIKPILEKMDGTEELLVKLNREDLLRKQRTFDNGSIPHQIHLGELHAILRRQEDFYPFLKDNREKIEKILTFRIPYYVGPLARGNSRFAWMTRKSEETITPWNFEEVVDKGASAQSFIERMTNFDKNLPNEKVLPKHSLLYEYFTVYNELTKVKYVTEGMRKPAFLSGEQKKAIVDLLFKTNRKVTVKQLKEDYFKKIECFDSVEISGVEDRFNASLGTYHDLLKIIKDKDFLDNEENEDILEDIVLTLTLFEDREMIEERLKTYAHLFDDKVMKQLKRRRYTGWGRLSRKLINGIRDKQSGKTILDFLKSDGFANRNFMQLIHDDSLTFKEDIQKAQVSGQGDSLHEHIANLAGSPAIKKGILQTVKVVDELVKVMGRHKPENIVIEMARENQTTQKGQKNSRERMKRIEEGIKELGSQILKEHPVENTQLQNEKLYLYYLQNGRDMYVDQELDINRLSDYDVDHIVPQSFLKDDSIDNKVLTRSDKARGKSDNVPSEEVVKKMKNYWRQLLNAKLITQRKFDNLTKAERGGLSELDKAGFIKRQLVETRQITKHVAQILDSRMNTKYDENDKLIREVKVITLKSKLVSDFRKDFQFYKVREINNYHHAHDAYLNAVVGTALIKKYPKLESEFVYGDYKVYDVRKMIAKSEQEIGKATAKYFFYSNIMNFFKTEITLANGEIRKRPLIETNGETGEIVWDKGRDFATVRKVLSMPQVNIVKKTEVQTGGFSKESILPKRNSDKLIARKKDWDPKKYGGFDSPTVAYSVLVVAKVEKGKSKKLKSVKELLGITIMERSSFEKNPIDFLEAKGYKEVKKDLIIKLPKYSLFELENGRKRMLASAGELQKGNELALPSKYVNFLYLASHYEKLKGSPEDNEQKQLFVEQHKHYLDEIIEQISEFSKRVILADANLDKVLSAYNKHRDKPIREQAENIIHLFTLTNLGAPAAFKYFDTTIDRKRYTSTKEVLDATLIHQSITGLYETRIDLSQLGGDGGEAAAKPAPGGGGGMDPLQLLQPLEAEIKGTKLKAHWNSGATITCVPQAFLEEEVPIKNIWIKTIHGEKEQPVYYLTFKIQGRKVEAEVISSPYDYILVSPSDIPWLMKKPLQLTTLVPLQEYEERLLKQTMLTGSYKEKLQSLFLKYDALWQHWENQVGHRRIKPHHIATGTVNPRPQKQYPINPKAKASIQTVINDLLKQGVLIQQNSIMNTPVYPVPKPDGKWRMVLDYREVNKTIPLIAAQNQHSAGILSSIFRGKYKTTLDLSNGFWAHSITPESYWLTAFTWLGQQYCWTRLPQGFLNSPALFNADVVDLLKEVPNVQVYVDDIYISHDDPREHLEQLEKVFSLLLNAGYVVSLKKSEIAQHEVEFLGFNITKEGRGLTETFKQKLLNITPPRDLKQLQSILGKLNFARNFIPNFSELVKPLYNIIATAPGKYITWTTDNSQQLQNIISMLNSAENLEERNPEVRLIMKVNTSPSAGYIRFYNEFAKRPIMYLNYVYTKAEVKFTNTEKLLTTIHKGLIKALDLGMGQEILVYSPIVSMTKIQKTPLPERKALPIRWITWMSYLEDPRIQFHYDKTLPELQQVPTVTDDIIAKIKHPSEFSMVFYTDGSAIKHPNVNKSHNAGMGIAQVQFKPEFTVINTWSIPLGDHTAQLAEVAAVEFACKKALKIDGPVLIVTDSFYVAESVNKELPYWQSNGFFNNKKKPLKHVSKWKSIADCIQLKPDIIIIHEKGHQPTASTFHTEGNNLADKLATQGSYVVNAGKRTADGSEFEKRTADGSEFESPKKKAKVE

SEQ ID NO: 665 - protein, 2176 aa, synthetic construct
  source 1..2176: note = Description of Artificial Sequence: Synthetic polypeptide
MPAAKRVKLDGGDKKYSIGLDIGTNSVGWAVITDEYKVPSKKFKVLGNTDRHSIKKNLIGALLFDSGETAEATRLKRTARRRYTRRKNRICYLQEIFSNEMAKVDDSFFHRLEESFLVEEDKKHERHPIFGNIVDEVAYHEKYPTIYHLRKKLVDSTDKADLRLIYLALAHMIKFRGHFLIEGDLNPDNSDVDKLFIQLVQTYNQLFEENPINASGVDAKAILSARLSKSRRLENLIAQLPGEKKNGLFGNLIALSLGLTPNFKSNFDLAEDAKLQLSKDTYDDDLDNLLAQIGDQYADLFLAAKNLSDAILLSDILRVNTEITKAPLSASMIKRYDEHHQDLTLLKALVRQQLPEKYKEIFFDQSKNGYAGYIDGGASQEEFYKFIKPILEKMDGTEELLVKLNREDLLRKQRTFDNGSIPHQIHLGELHAILRRQEDFYPFLKDNREKIEKILTFRIPYYVGPLARGNSRFAWMTRKSEETITPWNFEEVVDKGASAQSFIERMTNFDKNLPNEKVLPKHSLLYEYFTVYNELTKVKYVTEGMRKPAFLSGEQKKAIVDLLFKTNRKVTVKQLKEDYFKKIECFDSVEISGVEDRFNASLGTYHDLLKIIKDKDFLDNEENEDILEDIVLTLTLFEDREMIEERLKTYAHLFDDKVMKQLKRRRYTGWGRLSRKLINGIRDKQSGKTILDFLKSDGFANRNFMQLIHDDSLTFKEDIQKAQVSGQGDSLHEHIANLAGSPAIKKGILQTVKVVDELVKVMGRHKPENIVIEMARENQTTQKGQKNSRERMKRIEEGIKELGSQILKEHPVENTQLQNEKLYLYYLQNGRDMYVDQELDINRLSDYDVDHIVPQSFLKDDSIDNKVLTRSDKARGKSDNVPSEEVVKKMKNYWRQLLNAKLITQRKFDNLTKAERGGLSELDKAGFIKRQLVETRQITKHVAQILDSRMNTKYDENDKLIREVKVITLKSKLVSDFRKDFQFYKVREINNYHHAHDAYLNAVVGTALIKKYPKLESEFVYGDYKVYDVRKMIAKSEQEIGKATAKYFFYSNIMNFFKTEITLANGEIRKRPLIETNGETGEIVWDKGRDFATVRKVLSMPQVNIVKKTEVQTGGFSKESILPKRNSDKLIARKKDWDPKKYGGFDSPTVAYSVLVVAKVEKGKSKKLKSVKELLGITIMERSSFEKNPIDFLEAKGYKEVKKDLIIKLPKYSLFELENGRKRMLASAGELQKGNELALPSKYVNFLYLASHYEKLKGSPEDNEQKQLFVEQHKHYLDEIIEQISEFSKRVILADANLDKVLSAYNKHRDKPIREQAENIIHLFTLTNLGAPAAFKYFDTTIDRKRYTSTKEVLDATLIHQSITGLYETRIDLSQLGGDGGEAAAKGGSGSSGGMDPLQLLQPLEAEIKGTKLKAHWNSGATITCVPQAFLEEEVPIKNIWIKTIHGEKEQPVYYLTFKIQGRKVEAEVISSPYDYILVSPSDIPWLMKKPLQLTTLVPLQEYEERLLKQTMLTGSYKEKLQSLFLKYDALWQHWENQVGHRRIKPHHIATGTVNPRPQKQYPINPKAKASIQTVINDLLKQGVLIQQNSIMNTPVYPVPKPDGKWRMVLDYREVNKTIPLIAAQNQHSAGILSSIFRGKYKTTLDLSNGFWAHSITPESYWLTAFTWLGQQYCWTRLPQGFLNSPALFNADVVDLLKEVPNVQVYVDDIYISHDDPREHLEQLEKVFSLLLNAGYVVSLKKSEIAQHEVEFLGFNITKEGRGLTETFKQKLLNITPPRDLKQLQSILGKLNFARNFIPNFSELVKPLYNIIATAPGKYITWTTDNSQQLQNIISMLNSAENLEERNPEVRLIMKVNTSPSAGYIRFYNEFAKRPIMYLNYVYTKAEVKFTNTEKLLTTIHKGLIKALDLGMGQEILVYSPIVSMTKIQKTPLPERKALPIRWITWMSYLEDPRIQFHYDKTLPELQQVPTVTDDIIAKIKHPSEFSMVFYTDGSAIKHPNVNKSHNAGMGIAQVQFKPEFTVINTWSIPLGDHTAQLAEVAAVEFACKKALKIDGPVLIVTDSFYVAESVNKELPYWQSNGFFNNKKKPLKHVSKWKSIADCIQLKPDIIIIHEKGHQPTASTFHTEGNNLADKLATQGSYVVNAGKRTADGSEFEKRTADGSEFESPKKKAKVE

SEQ ID NO: 666 - protein, 2174 aa, synthetic construct
  source 1..2174: note = Description of Artificial Sequence: Synthetic polypeptide
MPAAKRVKLDGGDKKYSIGLDIGTNSVGWAVITDEYKVPSKKFKVLGNTDRHSIKKNLIGALLFDSGETAEATRLKRTARRRYTRRKNRICYLQEIFSNEMAKVDDSFFHRLEESFLVEEDKKHERHPIFGNIVDEVAYHEKYPTIYHLRKKLVDSTDKADLRLIYLALAHMIKFRGHFLIEGDLNPDNSDVDKLFIQLVQTYNQLFEENPINASGVDAKAILSARLSKSRRLENLIAQLPGEKKNGLFGNLIALSLGLTPNFKSNFDLAEDAKLQLSKDTYDDDLDNLLAQIGDQYADLFLAAKNLSDAILLSDILRVNTEITKAPLSASMIKRYDEHHQDLTLLKALVRQQLPEKYKEIFFDQSKNGYAGYIDGGASQEEFYKFIKPILEKMDGTEELLVKLNREDLLRKQRTFDNGSIPHQIHLGELHAILRRQEDFYPFLKDNREKIEKILTFRIPYYVGPLARGNSRFAWMTRKSEETITPWNFEEVVDKGASAQSFIERMTNFDKNLPNEKVLPKHSLLYEYFTVYNELTKVKYVTEGMRKPAFLSGEQKKAIVDLLFKTNRKVTVKQLKEDYFKKIECFDSVEISGVEDRFNASLGTYHDLLKIIKDKDFLDNEENEDILEDIVLTLTLFEDREMIEERLKTYAHLFDDKVMKQLKRRRYTGWGRLSRKLINGIRDKQSGKTILDFLKSDGFANRNFMQLIHDDSLTFKEDIQKAQVSGQGDSLHEHIANLAGSPAIKKGILQTVKVVDELVKVMGRHKPENIVIEMARENQTTQKGQKNSRERMKRIEEGIKELGSQILKEHPVENTQLQNEKLYLYYLQNGRDMYVDQELDINRLSDYDVDHIVPQSFLKDDSIDNKVLTRSDKARGKSDNVPSEEVVKKMKNYWRQLLNAKLITQRKFDNLTKAERGGLSELDKAGFIKRQLVETRQITKHVAQILDSRMNTKYDENDKLIREVKVITLKSKLVSDFRKDFQFYKVREINNYHHAHDAYLNAVVGTALIKKYPKLESEFVYGDYKVYDVRKMIAKSEQEIGKATAKYFFYSNIMNFFKTEITLANGEIRKRPLIETNGETGEIVWDKGRDFATVRKVLSMPQVNIVKKTEVQTGGFSKESILPKRNSDKLIARKKDWDPKKYGGFDSPTVAYSVLVVAKVEKGKSKKLKSVKELLGITIMERSSFEKNPIDFLEAKGYKEVKKDLIIKLPKYSLFELENGRKRMLASAGELQKGNELALPSKYVNFLYLASHYEKLKGSPEDNEQKQLFVEQHKHYLDEIIEQISEFSKRVILADANLDKVLSAYNKHRDKPIREQAENIIHLFTLTNLGAPAAFKYFDTTIDRKRYTSTKEVLDATLIHQSITGLYETRIDLSQLGGDGGPAPAPAPAPGGMDPLQLLQPLEAEIKGTKLKAHWNSGATITCVPQAFLEEEVPIKNIWIKTIHGEKEQPVYYLTFKIQGRKVEAEVISSPYDYILVSPSDIPWLMKKPLQLTTLVPLQEYEERLLKQTMLTGSYKEKLQSLFLKYDALWQHWENQVGHRRIKPHHIATGTVNPRPQKQYPINPKAKASIQTVINDLLKQGVLIQQNSIMNTPVYPVPKPDGKWRMVLDYREVNKTIPLIAAQNQHSAGILSSIFRGKYKTTLDLSNGFWAHSITPESYWLTAFTWLGQQYCWTRLPQGFLNSPALFNADVVDLLKEVPNVQVYVDDIYISHDDPREHLEQLEKVFSLLLNAGYVVSLKKSEIAQHEVEFLGFNITKEGRGLTETFKQKLLNITPPRDLKQLQSILGKLNFARNFIPNFSELVKPLYNIIATAPGKYITWTTDNSQQLQNIISMLNSAENLEERNPEVRLIMKVNTSPSAGYIRFYNEFAKRPIMYLNYVYTKAEVKFTNTEKLLTTIHKGLIKALDLGMGQEILVYSPIVSMTKIQKTPLPERKALPIRWITWMSYLEDPRIQFHYDKTLPELQQVPTVTDDIIAKIKHPSEFSMVFYTDGSAIKHPNVNKSHNAGMGIAQVQFKPEFTVINTWSIPLGDHTAQLAEVAAVEFACKKALKIDGPVLIVTDSFYVAESVNKELPYWQSNGFFNNKKKPLKHVSKWKSIADCIQLKPDIIIIHEKGHQPTASTFHTEGNNLADKLATQGSYVVNAGKRTADGSEFEKRTADGSEFESPKKKAKVE

SEQ ID NO: 667 - protein, 2176 aa, synthetic construct
  source 1..2176: note = Description of Artificial Sequence: Synthetic polypeptide
MPAAKRVKLDGGDKKYSIGLDIGTNSVGWAVITDEYKVPSKKFKVLGNTDRHSIKKNLIGALLFDSGETAEATRLKRTARRRYTRRKNRICYLQEIFSNEMAKVDDSFFHRLEESFLVEEDKKHERHPIFGNIVDEVAYHEKYPTIYHLRKKLVDSTDKADLRLIYLALAHMIKFRGHFLIEGDLNPDNSDVDKLFIQLVQTYNQLFEENPINASGVDAKAILSARLSKSRRLENLIAQLPGEKKNGLFGNLIALSLGLTPNFKSNFDLAEDAKLQLSKDTYDDDLDNLLAQIGDQYADLFLAAKNLSDAILLSDILRVNTEITKAPLSASMIKRYDEHHQDLTLLKALVRQQLPEKYKEIFFDQSKNGYAGYIDGGASQEEFYKFIKPILEKMDGTEELLVKLNREDLLRKQRTFDNGSIPHQIHLGELHAILRRQEDFYPFLKDNREKIEKILTFRIPYYVGPLARGNSRFAWMTRKSEETITPWNFEEVVDKGASAQSFIERMTNFDKNLPNEKVLPKHSLLYEYFTVYNELTKVKYVTEGMRKPAFLSGEQKKAIVDLLFKTNRKVTVKQLKEDYFKKIECFDSVEISGVEDRFNASLGTYHDLLKIIKDKDFLDNEENEDILEDIVLTLTLFEDREMIEERLKTYAHLFDDKVMKQLKRRRYTGWGRLSRKLINGIRDKQSGKTILDFLKSDGFANRNFMQLIHDDSLTFKEDIQKAQVSGQGDSLHEHIANLAGSPAIKKGILQTVKVVDELVKVMGRHKPENIVIEMARENQTTQKGQKNSRERMKRIEEGIKELGSQILKEHPVENTQLQNEKLYLYYLQNGRDMYVDQELDINRLSDYDVDHIVPQSFLKDDSIDNKVLTRSDKARGKSDNVPSEEVVKKMKNYWRQLLNAKLITQRKFDNLTKAERGGLSELDKAGFIKRQLVETRQITKHVAQILDSRMNTKYDENDKLIREVKVITLKSKLVSDFRKDFQFYKVREINNYHHAHDAYLNAVVGTALIKKYPKLESEFVYGDYKVYDVRKMIAKSEQEIGKATAKYFFYSNIMNFFKTEITLANGEIRKRPLIETNGETGEIVWDKGRDFATVRKVLSMPQVNIVKKTEVQTGGFSKESILPKRNSDKLIARKKDWDPKKYGGFDSPTVAYSVLVVAKVEKGKSKKLKSVKELLGITIMERSSFEKNPIDFLEAKGYKEVKKDLIIKLPKYSLFELENGRKRMLASAGELQKGNELALPSKYVNFLYLASHYEKLKGSPEDNEQKQLFVEQHKHYLDEIIEQISEFSKRVILADANLDKVLSAYNKHRDKPIREQAENIIHLFTLTNLGAPAAFKYFDTTIDRKRYTSTKEVLDATLIHQSITGLYETRIDLSQLGGDGGGSSGGGEAAAKGGMDPLQLLQPLEAEIKGTKLKAHWNSGATITCVPQAFLEEEVPIKNIWIKTIHGEKEQPVYYLTFKIQGRKVEAEVISSPYDYILVSPSDIPWLMKKPLQLTTLVPLQEYEERLLKQTMLTGSYKEKLQSLFLKYDALWQHWENQVGHRRIKPHHIATGTVNPRPQKQYPINPKAKASIQTVINDLLKQGVLIQQNSIMNTPVYPVPKPDGKWRMVLDYREVNKTIPLIAAQNQHSAGILSSIFRGKYKTTLDLSNGFWAHSITPESYWLTAFTWLGQQYCWTRLPQGFLNSPALFNADVVDLLKEVPNVQVYVDDIYISHDDPREHLEQLEKVFSLLLNAGYVVSLKKSEIAQHEVEFLGFNITKEGRGLTETFKQKLLNITPPRDLKQLQSILGKLNFARNFIPNFSELVKPLYNIIATAPGKYITWTTDNSQQLQNIISMLNSAENLEERNPEVRLIMKVNTSPSAGYIRFYNEFAKRPIMYLNYVYTKAEVKFTNTEKLLTTIHKGLIKALDLGMGQEILVYSPIVSMTKIQKTPLPERKALPIRWITWMSYLEDPRIQFHYDKTLPELQQVPTVTDDIIAKIKHPSEFSMVFYTDGSAIKHPNVNKSHNAGMGIAQVQFKPEFTVINTWSIPLGDHTAQLAEVAAVEFACKKALKIDGPVLIVTDSFYVAESVNKELPYWQSNGFFNNKKKPLKHVSKWKSIADCIQLKPDIIIIHEKGHQPTASTFHTEGNNLADKLATQGSYVVNAGKRTADGSEFEKRTADGSEFESPKKKAKVE

SEQ ID NO: 668 - protein, 2176 aa, synthetic construct
  source 1..2176: note = Description of Artificial Sequence: Synthetic polypeptide
MPAAKRVKLDGGDKKYSIGLDIGTNSVGWAVITDEYKVPSKKFKVLGNTDRHSIKKNLIGALLFDSGETAEATRLKRTARRRYTRRKNRICYLQEIFSNEMAKVDDSFFHRLEESFLVEEDKKHERHPIFGNIVDEVAYHEKYPTIYHLRKKLVDSTDKADLRLIYLALAHMIKFRGHFLIEGDLNPDNSDVDKLFIQLVQTYNQLFEENPINASGVDAKAILSARLSKSRRLENLIAQLPGEKKNGLFGNLIALSLGLTPNFKSNFDLAEDAKLQLSKDTYDDDLDNLLAQIGDQYADLFLAAKNLSDAILLSDILRVNTEITKAPLSASMIKRYDEHHQDLTLLKALVRQQLPEKYKEIFFDQSKNGYAGYIDGGASQEEFYKFIKPILEKMDGTEELLVKLNREDLLRKQRTFDNGSIPHQIHLGELHAILRRQEDFYPFLKDNREKIEKILTFRIPYYVGPLARGNSRFAWMTRKSEETITPWNFEEVVDKGASAQSFIERMTNFDKNLPNEKVLPKHSLLYEYFTVYNELTKVKYVTEGMRKPAFLSGEQKKAIVDLLFKTNRKVTVKQLKEDYFKKIECFDSVEISGVEDRFNASLGTYHDLLKIIKDKDFLDNEENEDILEDIVLTLTLFEDREMIEERLKTYAHLFDDKVMKQLKRRRYTGWGRLSRKLINGIRDKQSGKTILDFLKSDGFANRNFMQLIHDDSLTFKEDIQKAQVSGQGDSLHEHIANLAGSPAIKKGILQTVKVVDELVKVMGRHKPENIVIEMARENQTTQKGQKNSRERMKRIEEGIKELGSQILKEHPVENTQLQNEKLYLYYLQNGRDMYVDQELDINRLSDYDVDHIVPQSFLKDDSIDNKVLTRSDKARGKSDNVPSEEVVKKMKNYWRQLLNAKLITQRKFDNLTKAERGGLSELDKAGFIKRQLVETRQITKHVAQILDSRMNTKYDENDKLIREVKVITLKSKLVSDFRKDFQFYKVREINNYHHAHDAYLNAVVGTALIKKYPKLESEFVYGDYKVYDVRKMIAKSEQEIGKATAKYFFYSNIMNFFKTEITLANGEIRKRPLIETNGETGEIVWDKGRDFATVRKVLSMPQVNIVKKTEVQTGGFSKESILPKRNSDKLIARKKDWDPKKYGGFDSPTVAYSVLVVAKVEKGKSKKLKSVKELLGITIMERSSFEKNPIDFLEAKGYKEVKKDLIIKLPKYSLFELENGRKRMLASAGELQKGNELALPSKYVNFLYLASHYEKLKGSPEDNEQKQLFVEQHKHYLDEIIEQISEFSKRVILADANLDKVLSAYNKHRDKPIREQAENIIHLFTLTNLGAPAAFKYFDTTIDRKRYTSTKEVLDATLIHQSITGLYETRIDLSQLGGDGGGGSEAAAKPAPGGMDPLQLLQPLEAEIKGTKLKAHWNSGATITCVPQAFLEEEVPIKNIWIKTIHGEKEQPVYYLTFKIQGRKVEAEVISSPYDYILVSPSDIPWLMKKPLQLTTLVPLQEYEERLLKQTMLTGSYKEKLQSLFLKYDALWQHWENQVGHRRIKPHHIATGTVNPRPQKQYPINPKAKASIQTVINDLLKQGVLIQQNSIMNTPVYPVPKPDGKWRMVLDYREVNKTIPLIAAQNQHSAGILSSIFRGKYKTTLDLSNGFWAHSITPESYWLTAFTWLGQQYCWTRLPQGFLNSPALFNADVVDLLKEVPNVQVYVDDIYISHDDPREHLEQLEKVFSLLLNAGYVVSLKKSEIAQHEVEFLGFNITKEGRGLTETFKQKLLNITPPRDLKQLQSILGKLNFARNFIPNFSELVKPLYNIIATAPGKYITWTTDNSQQLQNIISMLNSAENLEERNPEVRLIMKVNTSPSAGYIRFYNEFAKRPIMYLNYVYTKAEVKFTNTEKLLTTIHKGLIKALDLGMGQEILVYSPIVSMTKIQKTPLPERKALPIRWITWMSYLEDPRIQFHYDKTLPELQQVPTVTDDIIAKIKHPSEFSMVFYTDGSAIKHPNVNKSHNAGMGIAQVQFKPEFTVINTWSIPLGDHTAQLAEVAAVEFACKKALKIDGPVLIVTDSFYVAESVNKELPYWQSNGFFNNKKKPLKHVSKWKSIADCIQLKPDIIIIHEKGHQPTASTFHTEGNNLADKLATQGSYVVNAGKRTADGSEFEKRTADGSEFESPKKKAKVE

SEQ ID NO: 669 - protein, 2174 aa, synthetic construct
  source 1..2174: note = Description of Artificial Sequence: Synthetic polypeptide
MPAAKRVKLDGGDKKYSIGLDIGTNSVGWAVITDEYKVPSKKFKVLGNTDRHSIKKNLIGALLFDSGETAEATRLKRTARRRYTRRKNRICYLQEIFSNEMAKVDDSFFHRLEESFLVEEDKKHERHPIFGNIVDEVAYHEKYPTIYHLRKKLVDSTDKADLRLIYLALAHMIKFRGHFLIEGDLNPDNSDVDKLFIQLVQTYNQLFEENPINASGVDAKAILSARLSKSRRLENLIAQLPGEKKNGLFGNLIALSLGLTPNFKSNFDLAEDAKLQLSKDTYDDDLDNLLAQIGDQYADLFLAAKNLSDAILLSDILRVNTEITKAPLSASMIKRYDEHHQDLTLLKALVRQQLPEKYKEIFFDQSKNGYAGYIDGGASQEEFYKFIKPILEKMDGTEELLVKLNREDLLRKQRTFDNGSIPHQIHLGELHAILRRQEDFYPFLKDNREKIEKILTFRIPYYVGPLARGNSRFAWMTRKSEETITPWNFEEVVDKGASAQSFIERMTNFDKNLPNEKVLPKHSLLYEYFTVYNELTKVKYVTEGMRKPAFLSGEQKKAIVDLLFKTNRKVTVKQLKEDYFKKIECFDSVEISGVEDRFNASLGTYHDLLKIIKDKDFLDNEENEDILEDIVLTLTLFEDREMIEERLKTYAHLFDDKVMKQLKRRRYTGWGRLSRKLINGIRDKQSGKTILDFLKSDGFANRNFMQLIHDDSLTFKEDIQKAQVSGQGDSLHEHIANLAGSPAIKKGILQTVKVVDELVKVMGRHKPENIVIEMARENQTTQKGQKNSRERMKRIEEGIKELGSQILKEHPVENTQLQNEKLYLYYLQNGRDMYVDQELDINRLSDYDVDHIVPQSFLKDDSIDNKVLTRSDKARGKSDNVPSEEVVKKMKNYWRQLLNAKLITQRKFDNLTKAERGGLSELDKAGFIKRQLVETRQITKHVAQILDSRMNTKYDENDKLIREVKVITLKSKLVSDFRKDFQFYKVREINNYHHAHDAYLNAVVGTALIKKYPKLESEFVYGDYKVYDVRKMIAKSEQEIGKATAKYFFYSNIMNFFKTEITLANGEIRKRPLIETNGETGEIVWDKGRDFATVRKVLSMPQVNIVKKTEVQTGGFSKESILPKRNSDKLIARKKDWDPKKYGGFDSPTVAYSVLVVAKVEKGKSKKLKSVKELLGITIMERSSFEKNPIDFLEAKGYKEVKKDLIIKLPKYSLFELENGRKRMLASAGELQKGNELALPSKYVNFLYLASHYEKLKGSPEDNEQKQLFVEQHKHYLDEIIEQISEFSKRVILADANLDKVLSAYNKHRDKPIREQAENIIHLFTLTNLGAPAAFKYFDTTIDRKRYTSTKEVLDATLIHQSITGLYETRIDLSQLGGDGGGGGGSSPAPGGMDPLQLLQPLEAEIKGTKLKAHWNSGATITCVPQAFLEEEVPIKNIWIKTIHGEKEQPVYYLTFKIQGRKVEAEVISSPYDYILVSPSDIPWLMKKPLQLTTLVPLQEYEERLLKQTMLTGSYKEKLQSLFLKYDALWQHWENQVGHRRIKPHHIATGTVNPRPQKQYPINPKAKASIQTVINDLLKQGVLIQQNSIMNTPVYPVPKPDGKWRMVLDYREVNKTIPLIAAQNQHSAGILSSIFRGKYKTTLDLSNGFWAHSITPESYWLTAFTWLGQQYCWTRLPQGFLNSPALFNADVVDLLKEVPNVQVYVDDIYISHDDPREHLEQLEKVFSLLLNAGYVVSLKKSEIAQHEVEFLGFNITKEGRGLTETFKQKLLNITPPRDLKQLQSILGKLNFARNFIPNFSELVKPLYNIIATAPGKYITWTTDNSQQLQNIISMLNSAENLEERNPEVRLIMKVNTSPSAGYIRFYNEFAKRPIMYLNYVYTKAEVKFTNTEKLLTTIHKGLIKALDLGMGQEILVYSPIVSMTKIQKTPLPERKALPIRWITWMSYLEDPRIQFHYDKTLPELQQVPTVTDDIIAKIKHPSEFSMVFYTDGSAIKHPNVNKSHNAGMGIAQVQFKPEFTVINTWSIPLGDHTAQLAEVAAVEFACKKALKIDGPVLIVTDSFYVAESVNKELPYWQSNGFFNNKKKPLKHVSKWKSIADCIQLKPDIIIIHEKGHQPTASTFHTEGNNLADKLATQGSYVVNAGKRTADGSEFEKRTADGSEFESPKKKAKVE

SEQ ID NO: 670 - protein, 2176 aa, synthetic construct
  source 1..2176: note = Description of Artificial Sequence: Synthetic polypeptide
MPAAKRVKLDGGDKKYSIGLDIGTNSVGWAVITDEYKVPSKKFKVLGNTDRHSIKKNLIGALLFDSGETAEATRLKRTARRRYTRRKNRICYLQEIFSNEMAKVDDSFFHRLEESFLVEEDKKHERHPIFGNIVDEVAYHEKYPTIYHLRKKLVDSTDKADLRLIYLALAHMIKFRGHFLIEGDLNPDNSDVDKLFIQLVQTYNQLFEENPINASGVDAKAILSARLSKSRRLENLIAQLPGEKKNGLFGNLIALSLGLTPNFKSNFDLAEDAKLQLSKDTYDDDLDNLLAQIGDQYADLFLAAKNLSDAILLSDILRVNTEITKAPLSASMIKRYDEHHQDLTLLKALVRQQLPEKYKEIFFDQSKNGYAGYIDGGASQEEFYKFIKPILEKMDGTEELLVKLNREDLLRKQRTFDNGSIPHQIHLGELHAILRRQEDFYPFLKDNREKIEKILTFRIPYYVGPLARGNSRFAWMTRKSEETITPWNFEEVVDKGASAQSFIERMTNFDKNLPNEKVLPKHSLLYEYFTVYNELTKVKYVTEGMRKPAFLSGEQKKAIVDLLFKTNRKVTVKQLKEDYFKKIECFDSVEISGVEDRFNASLGTYHDLLKIIKDKDFLDNEENEDILEDIVLTLTLFEDREMIEERLKTYAHLFDDKVMKQLKRRRYTGWGRLSRKLINGIRDKQSGKTILDFLKSDGFANRNFMQLIHDDSLTFKEDIQKAQVSGQGDSLHEHIANLAGSPAIKKGILQTVKVVDELVKVMGRHKPENIVIEMARENQTTQKGQKNSRERMKRIEEGIKELGSQILKEHPVENTQLQNEKLYLYYLQNGRDMYVDQELDINRLSDYDVDHIVPQSFLKDDSIDNKVLTRSDKARGKSDNVPSEEVVKKMKNYWRQLLNAKLITQRKFDNLTKAERGGLSELDKAGFIKRQLVETRQITKHVAQILDSRMNTKYDENDKLIREVKVITLKSKLVSDFRKDFQFYKVREINNYHHAHDAYLNAVVGTALIKKYPKLESEFVYGDYKVYDVRKMIAKSEQEIGKATAKYFFYSNIMNFFKTEITLANGEIRKRPLIETNGETGEIVWDKGRDFATVRKVLSMPQVNIVKKTEVQTGGFSKESILPKRNSDKLIARKKDWDPKKYGGFDSPTVAYSVLVVAKVEKGKSKKLKSVKELLGITIMERSSFEKNPIDFLEAKGYKEVKKDLIIKLPKYSLFELENGRKRMLASAGELQKGNELALPSKYVNFLYLASHYEKLKGSPEDNEQKQLFVEQHKHYLDEIIEQISEFSKRVILADANLDKVLSAYNKHRDKPIREQAENIIHLFTLTNLGAPAAFKYFDTTIDRKRYTSTKEVLDATLIHQSITGLYETRIDLSQLGGDGGGSSGGSEAAAKGGMDPLQLLQPLEAEIKGTKLKAHWNSGATITCVPQAFLEEEVPIKNIWIKTIHGEKEQPVYYLTFKIQGRKVEAEVISSPYDYILVSPSDIPWLMKKPLQLTTLVPLQEYEERLLKQTMLTGSYKEKLQSLFLKYDALWQHWENQVGHRRIKPHHIATGTVNPRPQKQYPINPKAKASIQTVINDLLKQGVLIQQNSIMNTPVYPVPKPDGKWRMVLDYREVNKTIPLIAAQNQHSAGILSSIFRGKYKTTLDLSNGFWAHSITPESYWLTAFTWLGQQYCWTRLPQGFLNSPALFNADVVDLLKEVPNVQVYVDDIYISHDDPREHLEQLEKVFSLLLNAGYVVSLKKSEIAQHEVEFLGFNITKEGRGLTETFKQKLLNITPPRDLKQLQSILGKLNFARNFIPNFSELVKPLYNIIATAPGKYITWTTDNSQQLQNIISMLNSAENLEERNPEVRLIMKVNTSPSAGYIRFYNEFAKRPIMYLNYVYTKAEVKFTNTEKLLTTIHKGLIKALDLGMGQEILVYSPIVSMTKIQKTPLPERKALPIRWITWMSYLEDPRIQFHYDKTLPELQQVPTVTDDIIAKIKHPSEFSMVFYTDGSAIKHPNVNKSHNAGMGIAQVQFKPEFTVINTWSIPLGDHTAQLAEVAAVEFACKKALKIDGPVLIVTDSFYVAESVNKELPYWQSNGFFNNKKKPLKHVSKWKSIADCIQLKPDIIIIHEKGHQPTASTFHTEGNNLADKLATQGSYVVNAGKRTADGSEFEKRTADGSEFESPKKKAKVE

SEQ ID NO: 671 - protein, 2176 aa, synthetic construct
  source 1..2176: note = Description of Artificial Sequence: Synthetic polypeptide
MPAAKRVKLDGGDKKYSIGLDIGTNSVGWAVITDEYKVPSKKFKVLGNTDRHSIKKNLIGALLFDSGETAEATRLKRTARRRYTRRKNRICYLQEIFSNEMAKVDDSFFHRLEESFLVEEDKKHERHPIFGNIVDEVAYHEKYPTIYHLRKKLVDSTDKADLRLIYLALAHMIKFRGHFLIEGDLNPDNSDVDKLFIQLVQTYNQLFEENPINASGVDAKAILSARLSKSRRLENLIAQLPGEKKNGLFGNLIALSLGLTPNFKSNFDLAEDAKLQLSKDTYDDDLDNLLAQIGDQYADLFLAAKNLSDAILLSDILRVNTEITKAPLSASMIKRYDEHHQDLTLLKALVRQQLPEKYKEIFFDQSKNGYAGYIDGGASQEEFYKFIKPILEKMDGTEELLVKLNREDLLRKQRTFDNGSIPHQIHLGELHAILRRQEDFYPFLKDNREKIEKILTFRIPYYVGPLARGNSRFAWMTRKSEETITPWNFEEVVDKGASAQSFIERMTNFDKNLPNEKVLPKHSLLYEYFTVYNELTKVKYVTEGMRKPAFLSGEQKKAIVDLLFKTNRKVTVKQLKEDYFKKIECFDSVEISGVEDRFNASLGTYHDLLKIIKDKDFLDNEENEDILEDIVLTLTLFEDREMIEERLKTYAHLFDDKVMKQLKRRRYTGWGRLSRKLINGIRDKQSGKTILDFLKSDGFANRNFMQLIHDDSLTFKEDIQKAQVSGQGDSLHEHIANLAGSPAIKKGILQTVKVVDELVKVMGRHKPENIVIEMARENQTTQKGQKNSRERMKRIEEGIKELGSQILKEHPVENTQLQNEKLYLYYLQNGRDMYVDQELDINRLSDYDVDHIVPQSFLKDDSIDNKVLTRSDKARGKSDNVPSEEVVKKMKNYWRQLLNAKLITQRKFDNLTKAERGGLSELDKAGFIKRQLVETRQITKHVAQILDSRMNTKYDENDKLIREVKVITLKSKLVSDFRKDFQFYKVREINNYHHAHDAYLNAVVGTALIKKYPKLESEFVYGDYKVYDVRKMIAKSEQEIGKATAKYFFYSNIMNFFKTEITLANGEIRKRPLIETNGETGEIVWDKGRDFATVRKVLSMPQVNIVKKTEVQTGGFSKESILPKRNSDKLIARKKDWDPKKYGGFDSPTVAYSVLVVAKVEKGKSKKLKSVKELLGITIMERSSFEKNPIDFLEAKGYKEVKKDLIIKLPKYSLFELENGRKRMLASAGELQKGNELALPSKYVNFLYLASHYEKLKGSPEDNEQKQLFVEQHKHYLDEIIEQISEFSKRVILADANLDKVLSAYNKHRDKPIREQAENIIHLFTLTNLGAPAAFKYFDTTIDRKRYTSTKEVLDATLIHQSITGLYETRIDLSQLGGDGGEAAAKGSSGGGGGMDPLQLLQPLEAEIKGTKLKAHWNSGATITCVPQAFLEEEVPIKNIWIKTIHGEKEQPVYYLTFKIQGRKVEAEVISSPYDYILVSPSDIPWLMKKPLQLTTLVPLQEYEERLLKQTMLTGSYKEKLQSLFLKYDALWQHWENQVGHRRIKPHHIATGTVNPRPQKQYPINPKAKASIQTVINDLLKQGVLIQQNSIMNTPVYPVPKPDGKWRMVLDYREVNKTIPLIAAQNQHSAGILSSIFRGKYKTTLDLSNGFWAHSITPESYWLTAFTWLGQQYCWTRLPQGFLNSPALFNADVVDLLKEVPNVQVYVDDIYISHDDPREHLEQLEKVFSLLLNAGYVVSLKKSEIAQHEVEFLGFNITKEGRGLTETFKQKLLNITPPRDLKQLQSILGKLNFARNFIPNFSELVKPLYNIIATAPGKYITWTTDNSQQLQNIISMLNSAENLEERNPEVRLIMKVNTSPSAGYIRFYNEFAKRPIMYLNYVYTKAEVKFTNTEKLLTTIHKGLIKALDLGMGQEILVYSPIVSMTKIQKTPLPERKALPIRWITWMSYLEDPRIQFHYDKTLPELQQVPTVTDDIIAKIKHPSEFSMVFYTDGSAIKHPNVNKSHNAGMGIAQVQFKPEFTVINTWSIPLGDHTAQLAEVAAVEFACKKALKIDGPVLIVTDSFYVAESVNKELPYWQSNGFFNNKKKPLKHVSKWKSIADCIQLKPDIIIIHEKGHQPTASTFHTEGNNLADKLATQGSYVVNAGKRTADGSEFEKRTADGSEFESPKKKAKVE

SEQ ID NO: 672 - protein, 2171 aa, synthetic construct
  source 1..2171: note = Description of Artificial Sequence: Synthetic polypeptide
MPAAKRVKLDGGDKKYSIGLDIGTNSVGWAVITDEYKVPSKKFKVLGNTDRHSIKKNLIGALLFDSGETAEATRLKRTARRRYTRRKNRICYLQEIFSNEMAKVDDSFFHRLEESFLVEEDKKHERHPIFGNIVDEVAYHEKYPTIYHLRKKLVDSTDKADLRLIYLALAHMIKFRGHFLIEGDLNPDNSDVDKLFIQLVQTYNQLFEENPINASGVDAKAILSARLSKSRRLENLIAQLPGEKKNGLFGNLIALSLGLTPNFKSNFDLAEDAKLQLSKDTYDDDLDNLLAQIGDQYADLFLAAKNLSDAILLSDILRVNTEITKAPLSASMIKRYDEHHQDLTLLKALVRQQLPEKYKEIFFDQSKNGYAGYIDGGASQEEFYKFIKPILEKMDGTEELLVKLNREDLLRKQRTFDNGSIPHQIHLGELHAILRRQEDFYPFLKDNREKIEKILTFRIPYYVGPLARGNSRFAWMTRKSEETITPWNFEEVVDKGASAQSFIERMTNFDKNLPNEKVLPKHSLLYEYFTVYNELTKVKYVTEGMRKPAFLSGEQKKAIVDLLFKTNRKVTVKQLKEDYFKKIECFDSVEISGVEDRFNASLGTYHDLLKIIKDKDFLDNEENEDILEDIVLTLTLFEDREMIEERLKTYAHLFDDKVMKQLKRRRYTGWGRLSRKLINGIRDKQSGKTILDFLKSDGFANRNFMQLIHDDSLTFKEDIQKAQVSGQGDSLHEHIANLAGSPAIKKGILQTVKVVDELVKVMGRHKPENIVIEMARENQTTQKGQKNSRERMKRIEEGIKELGSQILKEHPVENTQLQNEKLYLYYLQNGRDMYVDQELDINRLSDYDVDHIVPQSFLKDDSIDNKVLTRSDKARGKSDNVPSEEVVKKMKNYWRQLLNAKLITQRKFDNLTKAERGGLSELDKAGFIKRQLVETRQITKHVAQILDSRMNTKYDENDKLIREVKVITLKSKLVSDFRKDFQFYKVREINNYHHAHDAYLNAVVGTALIKKYPKLESEFVYGDYKVYDVRKMIAKSEQEIGKATAKYFFYSNIMNFFKTEITLANGEIRKRPLIETNGETGEIVWDKGRDFATVRKVLSMPQVNIVKKTEVQTGGFSKESILPKRNSDKLIARKKDWDPKKYGGFDSPTVAYSVLVVAKVEKGKSKKLKSVKELLGITIMERSSFEKNPIDFLEAKGYKEVKKDLIIKLPKYSLFELENGRKRMLASAGELQKGNELALPSKYVNFLYLASHYEKLKGSPEDNEQKQLFVEQHKHYLDEIIEQISEFSKRVILADANLDKVLSAYNKHRDKPIREQAENIIHLFTLTNLGAPAAFKYFDTTIDRKRYTSTKEVLDATLIHQSITGLYETRIDLSQLGGDGGGGSPAPGGMDPLQLLQPLEAEIKGTKLKAHWNSGATITCVPQAFLEEEVPIKNIWIKTIHGEKEQPVYYLTFKIQGRKVEAEVISSPYDYILVSPSDIPWLMKKPLQLTTLVPLQEYEERLLKQTMLTGSYKEKLQSLFLKYDALWQHWENQVGHRRIKPHHIATGTVNPRPQKQYPINPKAKASIQTVINDLLKQGVLIQQNSIMNTPVYPVPKPDGKWRMVLDYREVNKTIPLIAAQNQHSAGILSSIFRGKYKTTLDLSNGFWAHSITPESYWLTAFTWLGQQYCWTRLPQGFLNSPALFNADVVDLLKEVPNVQVYVDDIYISHDDPREHLEQLEKVFSLLLNAGYVVSLKKSEIAQHEVEFLGFNITKEGRGLTETFKQKLLNITPPRDLKQLQSILGKLNFARNFIPNFSELVKPLYNIIATAPGKYITWTTDNSQQLQNIISMLNSAENLEERNPEVRLIMKVNTSPSAGYIRFYNEFAKRPIMYLNYVYTKAEVKFTNTEKLLTTIHKGLIKALDLGMGQEILVYSPIVSMTKIQKTPLPERKALPIRWITWMSYLEDPRIQFHYDKTLPELQQVPTVTDDIIAKIKHPSEFSMVFYTDGSAIKHPNVNKSHNAGMGIAQVQFKPEFTVINTWSIPLGDHTAQLAEVAAVEFACKKALKIDGPVLIVTDSFYVAESVNKELPYWQSNGFFNNKKKPLKHVSKWKSIADCIQLKPDIIIIHEKGHQPTASTFHTEGNNLADKLATQGSYVVNAGKRTADGSEFEKRTADGSEFESPKKKAKVE

SEQ ID NO: 673 - protein, 2185 aa, synthetic construct
  source 1..2185: note = Description of Artificial Sequence: Synthetic polypeptide
MPAAKRVKLDGGDKKYSIGLDIGTNSVGWAVITDEYKVPSKKFKVLGNTDRHSIKKNLIGALLFDSGETAEATRLKRTARRRYTRRKNRICYLQEIFSNEMAKVDDSFFHRLEESFLVEEDKKHERHPIFGNIVDEVAYHEKYPTIYHLRKKLVDSTDKADLRLIYLALAHMIKFRGHFLIEGDLNPDNSDVDKLFIQLVQTYNQLFEENPINASGVDAKAILSARLSKSRRLENLIAQLPGEKKNGLFGNLIALSLGLTPNFKSNFDLAEDAKLQLSKDTYDDDLDNLLAQIGDQYADLFLAAKNLSDAILLSDILRVNTEITKAPLSASMIKRYDEHHQDLTLLKALVRQQLPEKYKEIFFDQSKNGYAGYIDGGASQEEFYKFIKPILEKMDGTEELLVKLNREDLLRKQRTFDNGSIPHQIHLGELHAILRRQEDFYPFLKDNREKIEKILTFRIPYYVGPLARGNSRFAWMTRKSEETITPWNFEEVVDKGASAQSFIERMTNFDKNLPNEKVLPKHSLLYEYFTVYNELTKVKYVTEGMRKPAFLSGEQKKAIVDLLFKTNRKVTVKQLKEDYFKKIECFDSVEISGVEDRFNASLGTYHDLLKIIKDKDFLDNEENEDILEDIVLTLTLFEDREMIEERLKTYAHLFDDKVMKQLKRRRYTGWGRLSRKLINGIRDKQSGKTILDFLKSDGFANRNFMQLIHDDSLTFKEDIQKAQVSGQGDSLHEHIANLAGSPAIKKGILQTVKVVDELVKVMGRHKPENIVIEMARENQTTQKGQKNSRERMKRIEEGIKELGSQILKEHPVENTQLQNEKLYLYYLQNGRDMYVDQELDINRLSDYDVDHIVPQSFLKDDSIDNKVLTRSDKARGKSDNVPSEEVVKKMKNYWRQLLNAKLITQRKFDNLTKAERGGLSELDKAGFIKRQLVETRQITKHVAQILDSRMNTKYDENDKLIREVKVITLKSKLVSDFRKDFQFYKVREINNYHHAHDAYLNAVVGTALIKKYPKLESEFVYGDYKVYDVRKMIAKSEQEIGKATAKYFFYSNIMNFFKTEITLANGEIRKRPLIETNGETGEIVWDKGRDFATVRKVLSMPQVNIVKKTEVQTGGFSKESILPKRNSDKLIARKKDWDPKKYGGFDSPTVAYSVLVVAKVEKGKSKKLKSVKELLGITIMERSSFEKNPIDFLEAKGYKEVKKDLIIKLPKYSLFELENGRKRMLASAGELQKGNELALPSKYVNFLYLASHYEKLKGSPEDNEQKQLFVEQHKHYLDEIIEQISEFSKRVILADANLDKVLSAYNKHRDKPIREQAENIIHLFTLTNLGAPAAFKYFDTTIDRKRYTSTKEVLDATLIHQSITGLYETRIDLSQLGGDGGGGGGSGGGGSGGGGSGGGGSGGMDPLQLLQPLEAEIKGTKLKAHWNSGATITCVPQAFLEEEVPIKNIWIKTIHGEKEQPVYYLTFKIQGRKVEAEVISSPYDYILVSPSDIPWLMKKPLQLTTLVPLQEYEERLLKQTMLTGSYKEKLQSLFLKYDALWQHWENQVGHRRIKPHHIATGTVNPRPQKQYPINPKAKASIQTVINDLLKQGVLIQQNSIMNTPVYPVPKPDGKWRMVLDYREVNKTIPLIAAQNQHSAGILSSIFRGKYKTTLDLSNGFWAHSITPESYWLTAFTWLGQQYCWTRLPQGFLNSPALFNADVVDLLKEVPNVQVYVDDIYISHDDPREHLEQLEKVFSLLLNAGYVVSLKKSEIAQHEVEFLGFNITKEGRGLTETFKQKLLNITPPRDLKQLQSILGKLNFARNFIPNFSELVKPLYNIIATAPGKYITWTTDNSQQLQNIISMLNSAENLEERNPEVRLIMKVNTSPSAGYIRFYNEFAKRPIMYLNYVYTKAEVKFTNTEKLLTTIHKGLIKALDLGMGQEILVYSPIVSMTKIQKTPLPERKALPIRWITWMSYLEDPRIQFHYDKTLPELQQVPTVTDDIIAKIKHPSEFSMVFYTDGSAIKHPNVNKSHNAGMGIAQVQFKPEFTVINTWSIPLGDHTAQLAEVAAVEFACKKALKIDGPVLIVTDSFYVAESVNKELPYWQSNGFFNNKKKPLKHVSKWKSIADCIQLKPDIIIIHEKGHQPTASTFHTEGNNLADKLATQGSYVVNAGKRTADGSEFEKRTADGSEFESPKKKAKVE

SEQ ID NO: 674 - protein, 2176 aa, synthetic construct
  source 1..2176: note = Description of Artificial Sequence: Synthetic polypeptide
MPAAKRVKLDGGDKKYSIGLDIGTNSVGWAVITDEYKVPSKKFKVLGNTDRHSIKKNLIGALLFDSGETAEATRLKRTARRRYTRRKNRICYLQEIFSNEMAKVDDSFFHRLEESFLVEEDKKHERHPIFGNIVDEVAYHEKYPTIYHLRKKLVDSTDKADLRLIYLALAHMIKFRGHFLIEGDLNPDNSDVDKLFIQLVQTYNQLFEENPINASGVDAKAILSARLSKSRRLENLIAQLPGEKKNGLFGNLIALSLGLTPNFKSNFDLAEDAKLQLSKDTYDDDLDNLLAQIGDQYADLFLAAKNLSDAILLSDILRVNTEITKAPLSASMIKRYDEHHQDLTLLKALVRQQLPEKYKEIFFDQSKNGYAGYIDGGASQEEFYKFIKPILEKMDGTEELLVKLNREDLLRKQRTFDNGSIPHQIHLGELHAILRRQEDFYPFLKDNREKIEKILTFRIPYYVGPLARGNSRFAWMTRKSEETITPWNFEEVVDKGASAQSFIERMTNFDKNLPNEKVLPKHSLLYEYFTVYNELTKVKYVTEGMRKPAFLSGEQKKAIVDLLFKTNRKVTVKQLKEDYFKKIECFDSVEISGVEDRFNASLGTYHDLLKIIKDKDFLDNEENEDILEDIVLTLTLFEDREMIEERLKTYAHLFDDKVMKQLKRRRYTGWGRLSRKLINGIRDKQSGKTILDFLKSDGFANRNFMQLIHDDSLTFKEDIQKAQVSGQGDSLHEHIANLAGSPAIKKGILQTVKVVDELVKVMGRHKPENIVIEMARENQTTQKGQKNSRERMKRIEEGIKELGSQILKEHPVENTQLQNEKLYLYYLQNGRDMYVDQELDINRLSDYDVDHIVPQSFLKDDSIDNKVLTRSDKARGKSDNVPSEEVVKKMKNYWRQLLNAKLITQRKFDNLTKAERGGLSELDKAGFIKRQLVETRQITKHVAQILDSRMNTKYDENDKLIREVKVITLKSKLVSDFRKDFQFYKVREINNYHHAHDAYLNAVVGTALIKKYPKLESEFVYGDYKVYDVRKMIAKSEQEIGKATAKYFFYSNIMNFFKTEITLANGEIRKRPLIETNGETGEIVWDKGRDFATVRKVLSMPQVNIVKKTEVQTGGFSKESILPKRNSDKLIARKKDWDPKKYGGFDSPTVAYSVLVVAKVEKGKSKKLKSVKELLGITIMERSSFEKNPIDFLEAKGYKEVKKDLIIKLPKYSLFELENGRKRMLASAGELQKGNELALPSKYVNFLYLASHYEKLKGSPEDNEQKQLFVEQHKHYLDEIIEQISEFSKRVILADANLDKVLSAYNKHRDKPIREQAENIIHLFTLTNLGAPAAFKYFDTTIDRKRYTSTKEVLDATLIHQSITGLYETRIDLSQLGGDGGGSSEAAAKGGGGGMDPLQLLQPLEAEIKGTKLKAHWNSGATITCVPQAFLEEEVPIKNIWIKTIHGEKEQPVYYLTFKIQGRKVEAEVISSPYDYILVSPSDIPWLMKKPLQLTTLVPLQEYEERLLKQTMLTGSYKEKLQSLFLKYDALWQHWENQVGHRRIKPHHIATGTVNPRPQKQYPINPKAKASIQTVINDLLKQGVLIQQNSIMNTPVYPVPKPDGKWRMVLDYREVNKTIPLIAAQNQHSAGILSSIFRGKYKTTLDLSNGFWAHSITPESYWLTAFTWLGQQYCWTRLPQGFLNSPALFNADVVDLLKEVPNVQVYVDDIYISHDDPREHLEQLEKVFSLLLNAGYVVSLKKSEIAQHEVEFLGFNITKEGRGLTETFKQKLLNITPPRDLKQLQSILGKLNFARNFIPNFSELVKPLYNIIATAPGKYITWTTDNSQQLQNIISMLNSAENLEERNPEVRLIMKVNTSPSAGYIRFYNEFAKRPIMYLNYVYTKAEVKFTNTEKLLTTIHKGLIKALDLGMGQEILVYSPIVSMTKIQKTPLPERKALPIRWITWMSYLEDPRIQFHYDKTLPELQQVPTVTDDIIAKIKHPSEFSMVFYTDGSAIKHPNVNKSHNAGMGIAQVQFKPEFTVINTWSIPLGDHTAQLAEVAAVEFACKKALKIDGPVLIVTDSFYVAESVNKELPYWQSNGFFNNKKKPLKHVSKWKSIADCIQLKPDIIIIHEKGHQPTASTFHTEGNNLADKLATQGSYVVNAGKRTADGSEFEKRTADGSEFESPKKKAKVE

SEQ ID NO: 675 - protein, 2176 aa, synthetic construct
  source 1..2176: note = Description of Artificial Sequence: Synthetic polypeptide
MPAAKRVKLDGGDKKYSIGLDIGTNSVGWAVITDEYKVPSKKFKVLGNTDRHSIKKNLIGALLFDSGETAEATRLKRTARRRYTRRKNRICYLQEIFSNEMAKVDDSFFHRLEESFLVEEDKKHERHPIFGNIVDEVAYHEKYPTIYHLRKKLVDSTDKADLRLIYLALAHMIKFRGHFLIEGDLNPDNSDVDKLFIQLVQTYNQLFEENPINASGVDAKAILSARLSKSRRLENLIAQLPGEKKNGLFGNLIALSLGLTPNFKSNFDLAEDAKLQLSKDTYDDDLDNLLAQIGDQYADLFLAAKNLSDAILLSDILRVNTEITKAPLSASMIKRYDEHHQDLTLLKALVRQQLPEKYKEIFFDQSKNGYAGYIDGGASQEEFYKFIKPILEKMDGTEELLVKLNREDLLRKQRTFDNGSIPHQIHLGELHAILRRQEDFYPFLKDNREKIEKILTFRIPYYVGPLARGNSRFAWMTRKSEETITPWNFEEVVDKGASAQSFIERMTNFDKNLPNEKVLPKHSLLYEYFTVYNELTKVKYVTEGMRKPAFLSGEQKKAIVDLLFKTNRKVTVKQLKEDYFKKIECFDSVEISGVEDRFNASLGTYHDLLKIIKDKDFLDNEENEDILEDIVLTLTLFEDREMIEERLKTYAHLFDDKVMKQLKRRRYTGWGRLSRKLINGIRDKQSGKTILDFLKSDGFANRNFMQLIHDDSLTFKEDIQKAQVSGQGDSLHEHIANLAGSPAIKKGILQTVKVVDELVKVMGRHKPENIVIEMARENQTTQKGQKNSRERMKRIEEGIKELGSQILKEHPVENTQLQNEKLYLYYLQNGRDMYVDQELDINRLSDYDVDHIVPQSFLKDDSIDNKVLTRSDKARGKSDNVPSEEVVKKMKNYWRQLLNAKLITQRKFDNLTKAERGGLSELDKAGFIKRQLVETRQITKHVAQILDSRMNTKYDENDKLIREVKVITLKSKLVSDFRKDFQFYKVREINNYHHAHDAYLNAVVGTALIKKYPKLESEFVYGDYKVYDVRKMIAKSEQEIGKATAKYFFYSNIMNFFKTEITLANGEIRKRPLIETNGETGEIVWDKGRDFATVRKVLSMPQVNIVKKTEVQTGGFSKESILPKRNSDKLIARKKDWDPKKYGGFDSPTVAYSVLVVAKVEKGKSKKLKSVKELLGITIMERSSFEKNPIDFLEAKGYKEVKKDLIIKLPKYSLFELENGRKRMLASAGELQKGNELALPSKYVNFLYLASHYEKLKGSPEDNEQKQLFVEQHKHYLDEIIEQISEFSKRVILADANLDKVLSAYNKHRDKPIREQAENIIHLFTLTNLGAPAAFKYFDTTIDRKRYTSTKEVLDATLIHQSITGLYETRIDLSQLGGDGGGSSPAPEAAAKGGMDPLQLLQPLEAEIKGTKLKAHWNSGATITCVPQAFLEEEVPIKNIWIKTIHGEKEQPVYYLTFKIQGRKVEAEVISSPYDYILVSPSDIPWLMKKPLQLTTLVPLQEYEERLLKQTMLTGSYKEKLQSLFLKYDALWQHWENQVGHRRIKPHHIATGTVNPRPQKQYPINPKAKASIQTVINDLLKQGVLIQQNSIMNTPVYPVPKPDGKWRMVLDYREVNKTIPLIAAQNQHSAGILSSIFRGKYKTTLDLSNGFWAHSITPESYWLTAFTWLGQQYCWTRLPQGFLNSPALFNADVVDLLKEVPNVQVYVDDIYISHDDPREHLEQLEKVFSLLLNAGYVVSLKKSEIAQHEVEFLGFNITKEGRGLTETFKQKLLNITPPRDLKQLQSILGKLNFARNFIPNFSELVKPLYNIIATAPGKYITWTTDNSQQLQNIISMLNSAENLEERNPEVRLIMKVNTSPSAGYIRFYNEFAKRPIMYLNYVYTKAEVKFTNTEKLLTTIHKGLIKALDLGMGQEILVYSPIVSMTKIQKTPLPERKALPIRWITWMSYLEDPRIQFHYDKTLPELQQVPTVTDDIIAKIKHPSEFSMVFYTDGSAIKHPNVNKSHNAGMGIAQVQFKPEFTVINTWSIPLGDHTAQLAEVAAVEFACKKALKIDGPVLIVTDSFYVAESVNKELPYWQSNGFFNNKKKPLKHVSKWKSIADCIQLKPDIIIIHEKGHQPTASTFHTEGNNLADKLATQGSYVVNAGKRTADGSEFEKRTADGSEFESPKKKAKVE

SEQ ID NO: 676 - protein, 2171 aa, synthetic construct
  source 1..2171: note = Description of Artificial Sequence: Synthetic polypeptide
MPAAKRVKLDGGDKKYSIGLDIGTNSVGWAVITDEYKVPSKKFKVLGNTDRHSIKKNLIGALLFDSGETAEATRLKRTARRRYTRRKNRICYLQEIFSNEMAKVDDSFFHRLEESFLVEEDKKHERHPIFGNIVDEVAYHEKYPTIYHLRKKLVDSTDKADLRLIYLALAHMIKFRGHFLIEGDLNPDNSDVDKLFIQLVQTYNQLFEENPINASGVDAKAILSARLSKSRRLENLIAQLPGEKKNGLFGNLIALSLGLTPNFKSNFDLAEDAKLQLSKDTYDDDLDNLLAQIGDQYADLFLAAKNLSDAILLSDILRVNTEITKAPLSASMIKRYDEHHQDLTLLKALVRQQLPEKYKEIFFDQSKNGYAGYIDGGASQEEFYKFIKPILEKMDGTEELLVKLNREDLLRKQRTFDNGSIPHQIHLGELHAILRRQEDFYPFLKDNREKIEKILTFRIPYYVGPLARGNSRFAWMTRKSEETITPWNFEEVVDKGASAQSFIERMTNFDKNLPNEKVLPKHSLLYEYFTVYNELTKVKYVTEGMRKPAFLSGEQKKAIVDLLFKTNRKVTVKQLKEDYFKKIECFDSVEISGVEDRFNASLGTYHDLLKIIKDKDFLDNEENEDILEDIVLTLTLFEDREMIEERLKTYAHLFDDKVMKQLKRRRYTGWGRLSRKLINGIRDKQSGKTILDFLKSDGFANRNFMQLIHDDSLTFKEDIQKAQVSGQGDSLHEHIANLAGSPAIKKGILQTVKVVDELVKVMGRHKPENIVIEMARENQTTQKGQKNSRERMKRIEEGIKELGSQILKEHPVENTQLQNEKLYLYYLQNGRDMYVDQELDINRLSDYDVDHIVPQSFLKDDSIDNKVLTRSDKARGKSDNVPSEEVVKKMKNYWRQLLNAKLITQRKFDNLTKAERGGLSELDKAGFIKRQLVETRQITKHVAQILDSRMNTKYDENDKLIREVKVITLKSKLVSDFRKDFQFYKVREINNYHHAHDAYLNAVVGTALIKKYPKLESEFVYGDYKVYDVRKMIAKSEQEIGKATAKYFFYSNIMNFFKTEITLANGEIRKRPLIETNGETGEIVWDKGRDFATVRKVLSMPQVNIVKKTEVQTGGFSKESILPKRNSDKLIARKKDWDPKKYGGFDSPTVAYSVLVVAKVEKGKSKKLKSVKELLGITIMERSSFEKNPIDFLEAKGYKEVKKDLIIKLPKYSLFELENGRKRMLASAGELQKGNELALPSKYVNFLYLASHYEKLKGSPEDNEQKQLFVEQHKHYLDEIIEQISEFSKRVILADANLDKVLSAYNKHRDKPIREQAENIIHLFTLTNLGAPAAFKYFDTTIDRKRYTSTKEVLDATLIHQSITGLYETRIDLSQLGGDGGPAPGGGGGMDPLQLLQPLEAEIKGTKLKAHWNSGATITCVPQAFLEEEVPIKNIWIKTIHGEKEQPVYYLTFKIQGRKVEAEVISSPYDYILVSPSDIPWLMKKPLQLTTLVPLQEYEERLLKQTMLTGSYKEKLQSLFLKYDALWQHWENQVGHRRIKPHHIATGTVNPRPQKQYPINPKAKASIQTVINDLLKQGVLIQQNSIMNTPVYPVPKPDGKWRMVLDYREVNKTIPLIAAQNQHSAGILSSIFRGKYKTTLDLSNGFWAHSITPESYWLTAFTWLGQQYCWTRLPQGFLNSPALFNADVVDLLKEVPNVQVYVDDIYISHDDPREHLEQLEKVFSLLLNAGYVVSLKKSEIAQHEVEFLGFNITKEGRGLTETFKQKLLNITPPRDLKQLQSILGKLNFARNFIPNFSELVKPLYNIIATAPGKYITWTTDNSQQLQNIISMLNSAENLEERNPEVRLIMKVNTSPSAGYIRFYNEFAKRPIMYLNYVYTKAEVKFTNTEKLLTTIHKGLIKALDLGMGQEILVYSPIVSMTKIQKTPLPERKALPIRWITWMSYLEDPRIQFHYDKTLPELQQVPTVTDDIIAKIKHPSEFSMVFYTDGSAIKHPNVNKSHNAGMGIAQVQFKPEFTVINTWSIPLGDHTAQLAEVAAVEFACKKALKIDGPVLIVTDSFYVAESVNKELPYWQSNGFFNNKKKPLKHVSKWKSIADCIQLKPDIIIIHEKGHQPTASTFHTEGNNLADKLATQGSYVVNAGKRTADGSEFEKRTADGSEFESPKKKAKVE

SEQ ID NO: 677 - protein, 2180 aa, synthetic construct
  source 1..2180: note = Description of Artificial Sequence: Synthetic polypeptide
MPAAKRVKLDGGDKKYSIGLDIGTNSVGWAVITDEYKVPSKKFKVLGNTDRHSIKKNLIGALLFDSGETAEATRLKRTARRRYTRRKNRICYLQEIFSNEMAKVDDSFFHRLEESFLVEEDKKHERHPIFGNIVDEVAYHEKYPTIYHLRKKLVDSTDKADLRLIYLALAHMIKFRGHFLIEGDLNPDNSDVDKLFIQLVQTYNQLFEENPINASGVDAKAILSARLSKSRRLENLIAQLPGEKKNGLFGNLIALSLGLTPNFKSNFDLAEDAKLQLSKDTYDDDLDNLLAQIGDQYADLFLAAKNLSDAILLSDILRVNTEITKAPLSASMIKRYDEHHQDLTLLKALVRQQLPEKYKEIFFDQSKNGYAGYIDGGASQEEFYKFIKPILEKMDGTEELLVKLNREDLLRKQRTFDNGSIPHQIHLGELHAILRRQEDFYPFLKDNREKIEKILTFRIPYYVGPLARGNSRFAWMTRKSEETITPWNFEEVVDKGASAQSFIERMTNFDKNLPNEKVLPKHSLLYEYFTVYNELTKVKYVTEGMRKPAFLSGEQKKAIVDLLFKTNRKVTVKQLKEDYFKKIECFDSVEISGVEDRFNASLGTYHDLLKIIKDKDFLDNEENEDILEDIVLTLTLFEDREMIEERLKTYAHLFDDKVMKQLKRRRYTGWGRLSRKLINGIRDKQSGKTILDFLKSDGFANRNFMQLIHDDSLTFKEDIQKAQVSGQGDSLHEHIANLAGSPAIKKGILQTVKVVDELVKVMGRHKPENIVIEMARENQTTQKGQKNSRERMKRIEEGIKELGSQILKEHPVENTQLQNEKLYLYYLQNGRDMYVDQELDINRLSDYDVDHIVPQSFLKDDSIDNKVLTRSDKARGKSDNVPSEEVVKKMKNYWRQLLNAKLITQRKFDNLTKAERGGLSELDKAGFIKRQLVETRQITKHVAQILDSRMNTKYDENDKLIREVKVITLKSKLVSDFRKDFQFYKVREINNYHHAHDAYLNAVVGTALIKKYPKLESEFVYGDYKVYDVRKMIAKSEQEIGKATAKYFFYSNIMNFFKTEITLANGEIRKRPLIETNGETGEIVWDKGRDFATVRKVLSMPQVNIVKKTEVQTGGFSKESILPKRNSDKLIARKKDWDPKKYGGFDSPTVAYSVLVVAKVEKGKSKKLKSVKELLGITIMERSSFEKNPIDFLEAKGYKEVKKDLIIKLPKYSLFELENGRKRMLASAGELQKGNELALPSKYVNFLYLASHYEKLKGSPEDNEQKQLFVEQHKHYLDEIIEQISEFSKRVILADANLDKVLSAYNKHRDKPIREQAENIIHLFTLTNLGAPAAFKYFDTTIDRKRYTSTKEVLDATLIHQSITGLYETRIDLSQLGGDGGGSSGSSGSSGSSGSSGGMDPLQLLQPLEAEIKGTKLKAHWNSGATITCVPQAFLEEEVPIKNIWIKTIHGEKEQPVYYLTFKIQGRKVEAEVISSPYDYILVSPSDIPWLMKKPLQLTTLVPLQEYEERLLKQTMLTGSYKEKLQSLFLKYDALWQHWENQVGHRRIKPHHIATGTVNPRPQKQYPINPKAKASIQTVINDLLKQGVLIQQNSIMNTPVYPVPKPDGKWRMVLDYREVNKTIPLIAAQNQHSAGILSSIFRGKYKTTLDLSNGFWAHSITPESYWLTAFTWLGQQYCWTRLPQGFLNSPALFNADVVDLLKEVPNVQVYVDDIYISHDDPREHLEQLEKVFSLLLNAGYVVSLKKSEIAQHEVEFLGFNITKEGRGLTETFKQKLLNITPPRDLKQLQSILGKLNFARNFIPNFSELVKPLYNIIATAPGKYITWTTDNSQQLQNIISMLNSAENLEERNPEVRLIMKVNTSPSAGYIRFYNEFAKRPIMYLNYVYTKAEVKFTNTEKLLTTIHKGLIKALDLGMGQEILVYSPIVSMTKIQKTPLPERKALPIRWITWMSYLEDPRIQFHYDKTLPELQQVPTVTDDIIAKIKHPSEFSMVFYTDGSAIKHPNVNKSHNAGMGIAQVQFKPEFTVINTWSIPLGDHTAQLAEVAAVEFACKKALKIDGPVLIVTDSFYVAESVNKELPYWQSNGFFNNKKKPLKHVSKWKSIADCIQLKPDIIIIHEKGHQPTASTFHTEGNNLADKLATQGSYVVNAGKRTADGSEFEKRTADGSEFESPKKKAKVE

SEQ ID NO: 678 - protein, 2174 aa, synthetic construct
  source 1..2174: note = Description of Artificial Sequence: Synthetic polypeptide
MPAAKRVKLDGGDKKYSIGLDIGTNSVGWAVITDEYKVPSKKFKVLGNTDRHSIKKNLIGALLFDSGETAEATRLKRTARRRYTRRKNRICYLQEIFSNEMAKVDDSFFHRLEESFLVEEDKKHERHPIFGNIVDEVAYHEKYPTIYHLRKKLVDSTDKADLRLIYLALAHMIKFRGHFLIEGDLNPDNSDVDKLFIQLVQTYNQLFEENPINASGVDAKAILSARLSKSRRLENLIAQLPGEKKNGLFGNLIALSLGLTPNFKSNFDLAEDAKLQLSKDTYDDDLDNLLAQIGDQYADLFLAAKNLSDAILLSDILRVNTEITKAPLSASMIKRYDEHHQDLTLLKALVRQQLPEKYKEIFFDQSKNGYAGYIDGGASQEEFYKFIKPILEKMDGTEELLVKLNREDLLRKQRTFDNGSIPHQIHLGELHAILRRQEDFYPFLKDNREKIEKILTFRIPYYVGPLARGNSRFAWMTRKSEETITPWNFEEVVDKGASAQSFIERMTNFDKNLPNEKVLPKHSLLYEYFTVYNELTKVKYVTEGMRKPAFLSGEQKKAIVDLLFKTNRKVTVKQLKEDYFKKIECFDSVEISGVEDRFNASLGTYHDLLKIIKDKDFLDNEENEDILEDIVLTLTLFEDREMIEERLKTYAHLFDDKVMKQLKRRRYTGWGRLSRKLINGIRDKQSGKTILDFLKSDGFANRNFMQLIHDDSLTFKEDIQKAQVSGQGDSLHEHIANLAGSPAIKKGILQTVKVVDELVKVMGRHKPENIVIEMARENQTTQKGQKNSRERMKRIEEGIKELGSQILKEHPVENTQLQNEKLYLYYLQNGRDMYVDQELDINRLSDYDVDHIVPQSFLKDDSIDNKVLTRSDKARGKSDNVPSEEVVKKMKNYWRQLLNAKLITQRKFDNLTKAERGGLSELDKAGFIKRQLVETRQITKHVAQILDSRMNTKYDENDKLIREVKVITLKSKLVSDFRKDFQFYKVREINNYHHAHDAYLNAVVGTALIKKYPKLESEFVYGDYKVYDVRKMIAKSEQEIGKATAKYFFYSNIMNFFKTEITLANGEIRKRPLIETNGETGEIVWDKGRDFATVRKVLSMPQVNIVKKTEVQTGGFSKESILPKRNSDKLIARKKDWDPKKYGGFDSPTVAYSVLVVAKVEKGKSKKLKSVKELLGITIMERSSFEKNPIDFLEAKGYKEVKKDLIIKLPKYSLFELENGRKRMLASAGELQKGNELALPSKYVNFLYLASHYEKLKGSPEDNEQKQLFVEQHKHYLDEIIEQISEFSKRVILADANLDKVLSAYNKHRDKPIREQAENIIHLFTLTNLGAPAAFKYFDTTIDRKRYTSTKEVLDATLIHQSITGLYETRIDLSQLGGDGGGGGPAPGGSGGMDPLQLLQPLEAEIKGTKLKAHWNSGATITCVPQAFLEEEVPIKNIWIKTIHGEKEQPVYYLTFKIQGRKVEAEVISSPYDYILVSPSDIPWLMKKPLQLTTLVPLQEYEERLLKQTMLTGSYKEKLQSLFLKYDALWQHWENQVGHRRIKPHHIATGTVNPRPQKQYPINPKAKASIQTVINDLLKQGVLIQQNSIMNTPVYPVPKPDGKWRMVLDYREVNKTIPLIAAQNQHSAGILSSIFRGKYKTTLDLSNGFWAHSITPESYWLTAFTWLGQQYCWTRLPQGFLNSPALFNADVVDLLKEVPNVQVYVDDIYISHDDPREHLEQLEKVFSLLLNAGYVVSLKKSEIAQHEVEFLGFNITKEGRGLTETFKQKLLNITPPRDLKQLQSILGKLNFARNFIPNFSELVKPLYNIIATAPGKYITWTTDNSQQLQNIISMLNSAENLEERNPEVRLIMKVNTSPSAGYIRFYNEFAKRPIMYLNYVYTKAEVKFTNTEKLLTTIHKGLIKALDLGMGQEILVYSPIVSMTKIQKTPLPERKALPIRWITWMSYLEDPRIQFHYDKTLPELQQVPTVTDDIIAKIKHPSEFSMVFYTDGSAIKHPNVNKSHNAGMGIAQVQFKPEFTVINTWSIPLGDHTAQLAEVAAVEFACKKALKIDGPVLIVTDSFYVAESVNKELPYWQSNGFFNNKKKPLKHVSKWKSIADCIQLKPDIIIIHEKGHQPTASTFHTEGNNLADKLATQGSYVVNAGKRTADGSEFEKRTADGSEFESPKKKAKVE

SEQ ID NO: 679 - protein, 2176 aa, synthetic construct
  source 1..2176: note = Description of Artificial Sequence: Synthetic polypeptide
MPAAKRVKLDGGDKKYSIGLDIGTNSVGWAVITDEYKVPSKKFKVLGNTDRHSIKKNLIGALLFDSGETAEATRLKRTARRRYTRRKNRICYLQEIFSNEMAKVDDSFFHRLEESFLVEEDKKHERHPIFGNIVDEVAYHEKYPTIYHLRKKLVDSTDKADLRLIYLALAHMIKFRGHFLIEGDLNPDNSDVDKLFIQLVQTYNQLFEENPINASGVDAKAILSARLSKSRRLENLIAQLPGEKKNGLFGNLIALSLGLTPNFKSNFDLAEDAKLQLSKDTYDDDLDNLLAQIGDQYADLFLAAKNLSDAILLSDILRVNTEITKAPLSASMIKRYDEHHQDLTLLKALVRQQLPEKYKEIFFDQSKNGYAGYIDGGASQEEFYKFIKPILEKMDGTEELLVKLNREDLLRKQRTFDNGSIPHQIHLGELHAILRRQEDFYPFLKDNREKIEKILTFRIPYYVGPLARGNSRFAWMTRKSEETITPWNFEEVVDKGASAQSFIERMTNFDKNLPNEKVLPKHSLLYEYFTVYNELTKVKYVTEGMRKPAFLSGEQKKAIVDLLFKTNRKVTVKQLKEDYFKKIECFDSVEISGVEDRFNASLGTYHDLLKIIKDKDFLDNEENEDILEDIVLTLTLFEDREMIEERLKTYAHLFDDKVMKQLKRRRYTGWGRLSRKLINGIRDKQSGKTILDFLKSDGFANRNFMQLIHDDSLTFKEDIQKAQVSGQGDSLHEHIANLAGSPAIKKGILQTVKVVDELVKVMGRHKPENIVIEMARENQTTQKGQKNSRERMKRIEEGIKELGSQILKEHPVENTQLQNEKLYLYYLQNGRDMYVDQELDINRLSDYDVDHIVPQSFLKDDSIDNKVLTRSDKARGKSDNVPSEEVVKKMKNYWRQLLNAKLITQRKFDNLTKAERGGLSELDKAGFIKRQLVETRQITKHVAQILDSRMNTKYDENDKLIREVKVITLKSKLVSDFRKDFQFYKVREINNYHHAHDAYLNAVVGTALIKKYPKLESEFVYGDYKVYDVRKMIAKSEQEIGKATAKYFFYSNIMNFFKTEITLANGEIRKRPLIETNGETGEIVWDKGRDFATVRKVLSMPQVNIVKKTEVQTGGFSKESILPKRNSDKLIARKKDWDPKKYGGFDSPTVAYSVLVVAKVEKGKSKKLKSVKELLGITIMERSSFEKNPIDFLEAKGYKEVKKDLIIKLPKYSLFELENGRKRMLASAGELQKGNELALPSKYVNFLYLASHYEKLKGSPEDNEQKQLFVEQHKHYLDEIIEQISEFSKRVILADANLDKVLSAYNKHRDKPIREQAENIIHLFTLTNLGAPAAFKYFDTTIDRKRYTSTKEVLDATLIHQSITGLYETRIDLSQLGGDGGGGSGSSEAAAKGGMDPLQLLQPLEAEIKGTKLKAHWNSGATITCVPQAFLEEEVPIKNIWIKTIHGEKEQPVYYLTFKIQGRKVEAEVISSPYDYILVSPSDIPWLMKKPLQLTTLVPLQEYEERLLKQTMLTGSYKEKLQSLFLKYDALWQHWENQVGHRRIKPHHIATGTVNPRPQKQYPINPKAKASIQTVINDLLKQGVLIQQNSIMNTPVYPVPKPDGKWRMVLDYREVNKTIPLIAAQNQHSAGILSSIFRGKYKTTLDLSNGFWAHSITPESYWLTAFTWLGQQYCWTRLPQGFLNSPALFNADVVDLLKEVPNVQVYVDDIYISHDDPREHLEQLEKVFSLLLNAGYVVSLKKSEIAQHEVEFLGFNITKEGRGLTETFKQKLLNITPPRDLKQLQSILGKLNFARNFIPNFSELVKPLYNIIATAPGKYITWTTDNSQQLQNIISMLNSAENLEERNPEVRLIMKVNTSPSAGYIRFYNEFAKRPIMYLNYVYTKAEVKFTNTEKLLTTIHKGLIKALDLGMGQEILVYSPIVSMTKIQKTPLPERKALPIRWITWMSYLEDPRIQFHYDKTLPELQQVPTVTDDIIAKIKHPSEFSMVFYTDGSAIKHPNVNKSHNAGMGIAQVQFKPEFTVINTWSIPLGDHTAQLAEVAAVEFACKKALKIDGPVLIVTDSFYVAESVNKELPYWQSNGFFNNKKKPLKHVSKWKSIADCIQLKPDIIIIHEKGHQPTASTFHTEGNNLADKLATQGSYVVNAGKRTADGSEFEKRTADGSEFESPKKKAKVE

SEQ ID NO: 680 - protein, 2176 aa, synthetic construct
  source 1..2176: note = Description of Artificial Sequence: Synthetic polypeptide
MPAAKRVKLDGGDKKYSIGLDIGTNSVGWAVITDEYKVPSKKFKVLGNTDRHSIKKNLIGALLFDSGETAEATRLKRTARRRYTRRKNRICYLQEIFSNEMAKVDDSFFHRLEESFLVEEDKKHERHPIFGNIVDEVAYHEKYPTIYHLRKKLVDSTDKADLRLIYLALAHMIKFRGHFLIEGDLNPDNSDVDKLFIQLVQTYNQLFEENPINASGVDAKAILSARLSKSRRLENLIAQLPGEKKNGLFGNLIALSLGLTPNFKSNFDLAEDAKLQLSKDTYDDDLDNLLAQIGDQYADLFLAAKNLSDAILLSDILRVNTEITKAPLSASMIKRYDEHHQDLTLLKALVRQQLPEKYKEIFFDQSKNGYAGYIDGGASQEEFYKFIKPILEKMDGTEELLVKLNREDLLRKQRTFDNGSIPHQIHLGELHAILRRQEDFYPFLKDNREKIEKILTFRIPYYVGPLARGNSRFAWMTRKSEETITPWNFEEVVDKGASAQSFIERMTNFDKNLPNEKVLPKHSLLYEYFTVYNELTKVKYVTEGMRKPAFLSGEQKKAIVDLLFKTNRKVTVKQLKEDYFKKIECFDSVEISGVEDRFNASLGTYHDLLKIIKDKDFLDNEENEDILEDIVLTLTLFEDREMIEERLKTYAHLFDDKVMKQLKRRRYTGWGRLSRKLINGIRDKQSGKTILDFLKSDGFANRNFMQLIHDDSLTFKEDIQKAQVSGQGDSLHEHIANLAGSPAIKKGILQTVKVVDELVKVMGRHKPENIVIEMARENQTTQKGQKNSRERMKRIEEGIKELGSQILKEHPVENTQLQNEKLYLYYLQNGRDMYVDQELDINRLSDYDVDHIVPQSFLKDDSIDNKVLTRSDKARGKSDNVPSEEVVKKMKNYWRQLLNAKLITQRKFDNLTKAERGGLSELDKAGFIKRQLVETRQITKHVAQILDSRMNTKYDENDKLIREVKVITLKSKLVSDFRKDFQFYKVREINNYHHAHDAYLNAVVGTALIKKYPKLESEFVYGDYKVYDVRKMIAKSEQEIGKATAKYFFYSNIMNFFKTEITLANGEIRKRPLIETNGETGEIVWDKGRDFATVRKVLSMPQVNIVKKTEVQTGGFSKESILPKRNSDKLIARKKDWDPKKYGGFDSPTVAYSVLVVAKVEKGKSKKLKSVKELLGITIMERSSFEKNPIDFLEAKGYKEVKKDLIIKLPKYSLFELENGRKRMLASAGELQKGNELALPSKYVNFLYLASHYEKLKGSPEDNEQKQLFVEQHKHYLDEIIEQISEFSKRVILADANLDKVLSAYNKHRDKPIREQAENIIHLFTLTNLGAPAAFKYFDTTIDRKRYTSTKEVLDATLIHQSITGLYETRIDLSQLGGDGGEAAAKGGSPAPGGMDPLQLLQPLEAEIKGTKLKAHWNSGATITCVPQAFLEEEVPIKNIWIKTIHGEKEQPVYYLTFKIQGRKVEAEVISSPYDYILVSPSDIPWLMKKPLQLTTLVPLQEYEERLLKQTMLTGSYKEKLQSLFLKYDALWQHWENQVGHRRIKPHHIATGTVNPRPQKQYPINPKAKASIQTVINDLLKQGVLIQQNSIMNTPVYPVPKPDGKWRMVLDYREVNKTIPLIAAQNQHSAGILSSIFRGKYKTTLDLSNGFWAHSITPESYWLTAFTWLGQQYCWTRLPQGFLNSPALFNADVVDLLKEVPNVQVYVDDIYISHDDPREHLEQLEKVFSLLLNAGYVVSLKKSEIAQHEVEFLGFNITKEGRGLTETFKQKLLNITPPRDLKQLQSILGKLNFARNFIPNFSELVKPLYNIIATAPGKYITWTTDNSQQLQNIISMLNSAENLEERNPEVRLIMKVNTSPSAGYIRFYNEFAKRPIMYLNYVYTKAEVKFTNTEKLLTTIHKGLIKALDLGMGQEILVYSPIVSMTKIQKTPLPERKALPIRWITWMSYLEDPRIQFHYDKTLPELQQVPTVTDDIIAKIKHPSEFSMVFYTDGSAIKHPNVNKSHNAGMGIAQVQFKPEFTVINTWSIPLGDHTAQLAEVAAVEFACKKALKIDGPVLIVTDSFYVAESVNKELPYWQSNGFFNNKKKPLKHVSKWKSIADCIQLKPDIIIIHEKGHQPTASTFHTEGNNLADKLATQGSYVVNAGKRTADGSEFEKRTADGSEFESPKKKAKVE

SEQ ID NO: 681 - protein, 2175 aa, synthetic construct
  source 1..2175: note = Description of Artificial Sequence: Synthetic polypeptide
MPAAKRVKLDGGDKKYSIGLDIGTNSVGWAVITDEYKVPSKKFKVLGNTDRHSIKKNLIGALLFDSGETAEATRLKRTARRRYTRRKNRICYLQEIFSNEMAKVDDSFFHRLEESFLVEEDKKHERHPIFGNIVDEVAYHEKYPTIYHLRKKLVDSTDKADLRLIYLALAHMIKFRGHFLIEGDLNPDNSDVDKLFIQLVQTYNQLFEENPINASGVDAKAILSARLSKSRRLENLIAQLPGEKKNGLFGNLIALSLGLTPNFKSNFDLAEDAKLQLSKDTYDDDLDNLLAQIGDQYADLFLAAKNLSDAILLSDILRVNTEITKAPLSASMIKRYDEHHQDLTLLKALVRQQLPEKYKEIFFDQSKNGYAGYIDGGASQEEFYKFIKPILEKMDGTEELLVKLNREDLLRKQRTFDNGSIPHQIHLGELHAILRRQEDFYPFLKDNREKIEKILTFRIPYYVGPLARGNSRFAWMTRKSEETITPWNFEEVVDKGASAQSFIERMTNFDKNLPNEKVLPKHSLLYEYFTVYNELTKVKYVTEGMRKPAFLSGEQKKAIVDLLFKTNRKVTVKQLKEDYFKKIECFDSVEISGVEDRFNASLGTYHDLLKIIKDKDFLDNEENEDILEDIVLTLTLFEDREMIEERLKTYAHLFDDKVMKQLKRRRYTGWGRLSRKLINGIRDKQSGKTILDFLKSDGFANRNFMQLIHDDSLTFKEDIQKAQVSGQGDSLHEHIANLAGSPAIKKGILQTVKVVDELVKVMGRHKPENIVIEMARENQTTQKGQKNSRERMKRIEEGIKELGSQILKEHPVENTQLQNEKLYLYYLQNGRDMYVDQELDINRLSDYDVDHIVPQSFLKDDSIDNKVLTRSDKARGKSDNVPSEEVVKKMKNYWRQLLNAKLITQRKFDNLTKAERGGLSELDKAGFIKRQLVETRQITKHVAQILDSRMNTKYDENDKLIREVKVITLKSKLVSDFRKDFQFYKVREINNYHHAHDAYLNAVVGTALIKKYPKLESEFVYGDYKVYDVRKMIAKSEQEIGKATAKYFFYSNIMNFFKTEITLANGEIRKRPLIETNGETGEIVWDKGRDFATVRKVLSMPQVNIVKKTEVQTGGFSKESILPKRNSDKLIARKKDWDPKKYGGFDSPTVAYSVLVVAKVEKGKSKKLKSVKELLGITIMERSSFEKNPIDFLEAKGYKEVKKDLIIKLPKYSLFELENGRKRMLASAGELQKGNELALPSKYVNFLYLASHYEKLKGSPEDNEQKQLFVEQHKHYLDEIIEQISEFSKRVILADANLDKVLSAYNKHRDKPIREQAENIIHLFTLTNLGAPAAFKYFDTTIDRKRYTSTKEVLDATLIHQSITGLYETRIDLSQLGGDGGGGGGSGGGGSGGMDPLQLLQPLEAEIKGTKLKAHWNSGATITCVPQAFLEEEVPIKNIWIKTIHGEKEQPVYYLTFKIQGRKVEAEVISSPYDYILVSPSDIPWLMKKPLQLTTLVPLQEYEERLLKQTMLTGSYKEKLQSLFLKYDALWQHWENQVGHRRIKPHHIATGTVNPRPQKQYPINPKAKASIQTVINDLLKQGVLIQQNSIMNTPVYPVPKPDGKWRMVLDYREVNKTIPLIAAQNQHSAGILSSIFRGKYKTTLDLSNGFWAHSITPESYWLTAFTWLGQQYCWTRLPQGFLNSPALFNADVVDLLKEVPNVQVYVDDIYISHDDPREHLEQLEKVFSLLLNAGYVVSLKKSEIAQHEVEFLGFNITKEGRGLTETFKQKLLNITPPRDLKQLQSILGKLNFARNFIPNFSELVKPLYNIIATAPGKYITWTTDNSQQLQNIISMLNSAENLEERNPEVRLIMKVNTSPSAGYIRFYNEFAKRPIMYLNYVYTKAEVKFTNTEKLLTTIHKGLIKALDLGMGQEILVYSPIVSMTKIQKTPLPERKALPIRWITWMSYLEDPRIQFHYDKTLPELQQVPTVTDDIIAKIKHPSEFSMVFYTDGSAIKHPNVNKSHNAGMGIAQVQFKPEFTVINTWSIPLGDHTAQLAEVAAVEFACKKALKIDGPVLIVTDSFYVAESVNKELPYWQSNGFFNNKKKPLKHVSKWKSIADCIQLKPDIIIIHEKGHQPTASTFHTEGNNLADKLATQGSYVVNAGKRTADGSEFEKRTADGSEFESPKKKAKVE

SEQ ID NO: 682 - protein, 2171 aa, synthetic construct
  source 1..2171: note = Description of Artificial Sequence: Synthetic polypeptide
MPAAKRVKLDGGDKKYSIGLDIGTNSVGWAVITDEYKVPSKKFKVLGNTDRHSIKKNLIGALLFDSGETAEATRLKRTARRRYTRRKNRICYLQEIFSNEMAKVDDSFFHRLEESFLVEEDKKHERHPIFGNIVDEVAYHEKYPTIYHLRKKLVDSTDKADLRLIYLALAHMIKFRGHFLIEGDLNPDNSDVDKLFIQLVQTYNQLFEENPINASGVDAKAILSARLSKSRRLENLIAQLPGEKKNGLFGNLIALSLGLTPNFKSNFDLAEDAKLQLSKDTYDDDLDNLLAQIGDQYADLFLAAKNLSDAILLSDILRVNTEITKAPLSASMIKRYDEHHQDLTLLKALVRQQLPEKYKEIFFDQSKNGYAGYIDGGASQEEFYKFIKPILEKMDGTEELLVKLNREDLLRKQRTFDNGSIPHQIHLGELHAILRRQEDFYPFLKDNREKIEKILTFRIPYYVGPLARGNSRFAWMTRKSEETITPWNFEEVVDKGASAQSFIERMTNFDKNLPNEKVLPKHSLLYEYFTVYNELTKVKYVTEGMRKPAFLSGEQKKAIVDLLFKTNRKVTVKQLKEDYFKKIECFDSVEISGVEDRFNASLGTYHDLLKIIKDKDFLDNEENEDILEDIVLTLTLFEDREMIEERLKTYAHLFDDKVMKQLKRRRYTGWGRLSRKLINGIRDKQSGKTILDFLKSDGFANRNFMQLIHDDSLTFKEDIQKAQVSGQGDSLHEHIANLAGSPAIKKGILQTVKVVDELVKVMGRHKPENIVIEMARENQTTQKGQKNSRERMKRIEEGIKELGSQILKEHPVENTQLQNEKLYLYYLQNGRDMYVDQELDINRLSDYDVDHIVPQSFLKDDSIDNKVLTRSDKARGKSDNVPSEEVVKKMKNYWRQLLNAKLITQRKFDNLTKAERGGLSELDKAGFIKRQLVETRQITKHVAQILDSRMNTKYDENDKLIREVKVITLKSKLVSDFRKDFQFYKVREINNYHHAHDAYLNAVVGTALIKKYPKLESEFVYGDYKVYDVRKMIAKSEQEIGKATAKYFFYSNIMNFFKTEITLANGEIRKRPLIETNGETGEIVWDKGRDFATVRKVLSMPQVNIVKKTEVQTGGFSKESILPKRNSDKLIARKKDWDPKKYGGFDSPTVAYSVLVVAKVEKGKSKKLKSVKELLGITIMERSSFEKNPIDFLEAKGYKEVKKDLIIKLPKYSLFELENGRKRMLASAGELQKGNELALPSKYVNFLYLASHYEKLKGSPEDNEQKQLFVEQHKHYLDEIIEQISEFSKRVILADANLDKVLSAYNKHRDKPIREQAENIIHLFTLTNLGAPAAFKYFDTTIDRKRYTSTKEVLDATLIHQSITGLYETRIDLSQLGGDGGGGSGGSGGMDPLQLLQPLEAEIKGTKLKAHWNSGATITCVPQAFLEEEVPIKNIWIKTIHGEKEQPVYYLTFKIQGRKVEAEVISSPYDYILVSPSDIPWLMKKPLQLTTLVPLQEYEERLLKQTMLTGSYKEKLQSLFLKYDALWQHWENQVGHRRIKPHHIATGTVNPRPQKQYPINPKAKASIQTVINDLLKQGVLIQQNSIMNTPVYPVPKPDGKWRMVLDYREVNKTIPLIAAQNQHSAGILSSIFRGKYKTTLDLSNGFWAHSITPESYWLTAFTWLGQQYCWTRLPQGFLNSPALFNADVVDLLKEVPNVQVYVDDIYISHDDPREHLEQLEKVFSLLLNAGYVVSLKKSEIAQHEVEFLGFNITKEGRGLTETFKQKLLNITPPRDLKQLQSILGKLNFARNFIPNFSELVKPLYNIIATAPGKYITWTTDNSQQLQNIISMLNSAENLEERNPEVRLIMKVNTSPSAGYIRFYNEFAKRPIMYLNYVYTKAEVKFTNTEKLLTTIHKGLIKALDLGMGQEILVYSPIVSMTKIQKTPLPERKALPIRWITWMSYLEDPRIQFHYDKTLPELQQVPTVTDDIIAKIKHPSEFSMVFYTDGSAIKHPNVNKSHNAGMGIAQVQFKPEFTVINTWSIPLGDHTAQLAEVAAVEFACKKALKIDGPVLIVTDSFYVAESVNKELPYWQSNGFFNNKKKPLKHVSKWKSIADCIQLKPDIIIIHEKGHQPTASTFHTEGNNLADKLATQGSYVVNAGKRTADGSEFEKRTADGSEFESPKKKAKVE

SEQ ID NO: 683 - protein, 2174 aa, synthetic construct
  source 1..2174: note = Description of Artificial Sequence: Synthetic polypeptide
MPAAKRVKLDGGDKKYSIGLDIGTNSVGWAVITDEYKVPSKKFKVLGNTDRHSIKKNLIGALLFDSGETAEATRLKRTARRRYTRRKNRICYLQEIFSNEMAKVDDSFFHRLEESFLVEEDKKHERHPIFGNIVDEVAYHEKYPTIYHLRKKLVDSTDKADLRLIYLALAHMIKFRGHFLIEGDLNPDNSDVDKLFIQLVQTYNQLFEENPINASGVDAKAILSARLSKSRRLENLIAQLPGEKKNGLFGNLIALSLGLTPNFKSNFDLAEDAKLQLSKDTYDDDLDNLLAQIGDQYADLFLAAKNLSDAILLSDILRVNTEITKAPLSASMIKRYDEHHQDLTLLKALVRQQLPEKYKEIFFDQSKNGYAGYIDGGASQEEFYKFIKPILEKMDGTEELLVKLNREDLLRKQRTFDNGSIPHQIHLGELHAILRRQEDFYPFLKDNREKIEKILTFRIPYYVGPLARGNSRFAWMTRKSEETITPWNFEEVVDKGASAQSFIERMTNFDKNLPNEKVLPKHSLLYEYFTVYNELTKVKYVTEGMRKPAFLSGEQKKAIVDLLFKTNRKVTVKQLKEDYFKKIECFDSVEISGVEDRFNASLGTYHDLLKIIKDKDFLDNEENEDILEDIVLTLTLFEDREMIEERLKTYAHLFDDKVMKQLKRRRYTGWGRLSRKLINGIRDKQSGKTILDFLKSDGFANRNFMQLIHDDSLTFKEDIQKAQVSGQGDSLHEHIANLAGSPAIKKGILQTVKVVDELVKVMGRHKPENIVIEMARENQTTQKGQKNSRERMKRIEEGIKELGSQILKEHPVENTQLQNEKLYLYYLQNGRDMYVDQELDINRLSDYDVDHIVPQSFLKDDSIDNKVLTRSDKARGKSDNVPSEEVVKKMKNYWRQLLNAKLITQRKFDNLTKAERGGLSELDKAGFIKRQLVETRQITKHVAQILDSRMNTKYDENDKLIREVKVITLKSKLVSDFRKDFQFYKVREINNYHHAHDAYLNAVVGTALIKKYPKLESEFVYGDYKVYDVRKMIAKSEQEIGKATAKYFFYSNIMNFFKTEITLANGEIRKRPLIETNGETGEIVWDKGRDFATVRKVLSMPQVNIVKKTEVQTGGFSKESILPKRNSDKLIARKKDWDPKKYGGFDSPTVAYSVLVVAKVEKGKSKKLKSVKELLGITIMERSSFEKNPIDFLEAKGYKEVKKDLIIKLPKYSLFELENGRKRMLASAGELQKGNELALPSKYVNFLYLASHYEKLKGSPEDNEQKQLFVEQHKHYLDEIIEQISEFSKRVILADANLDKVLSAYNKHRDKPIREQAENIIHLFTLTNLGAPAAFKYFDTTIDRKRYTSTKEVLDATLIHQSITGLYETRIDLSQLGGDGGGSSGGSPAPGGMDPLQLLQPLEAEIKGTKLKAHWNSGATITCVPQAFLEEEVPIKNIWIKTIHGEKEQPVYYLTFKIQGRKVEAEVISSPYDYILVSPSDIPWLMKKPLQLTTLVPLQEYEERLLKQTMLTGSYKEKLQSLFLKYDALWQHWENQVGHRRIKPHHIATGTVNPRPQKQYPINPKAKASIQTVINDLLKQGVLIQQNSIMNTPVYPVPKPDGKWRMVLDYREVNKTIPLIAAQNQHSAGILSSIFRGKYKTTLDLSNGFWAHSITPESYWLTAFTWLGQQYCWTRLPQGFLNSPALFNADVVDLLKEVPNVQVYVDDIYISHDDPREHLEQLEKVFSLLLNAGYVVSLKKSEIAQHEVEFLGFNITKEGRGLTETFKQKLLNITPPRDLKQLQSILGKLNFARNFIPNFSELVKPLYNIIATAPGKYITWTTDNSQQLQNIISMLNSAENLEERNPEVRLIMKVNTSPSAGYIRFYNEFAKRPIMYLNYVYTKAEVKFTNTEKLLTTIHKGLIKALDLGMGQEILVYSPIVSMTKIQKTPLPERKALPIRWITWMSYLEDPRIQFHYDKTLPELQQVPTVTDDIIAKIKHPSEFSMVFYTDGSAIKHPNVNKSHNAGMGIAQVQFKPEFTVINTWSIPLGDHTAQLAEVAAVEFACKKALKIDGPVLIVTDSFYVAESVNKELPYWQSNGFFNNKKKPLKHVSKWKSIADCIQLKPDIIIIHEKGHQPTASTFHTEGNNLADKLATQGSYVVNAGKRTADGSEFEKRTADGSEFESPKKKAKVE

SEQ ID NO: 684 - protein, 2176 aa, synthetic construct
  source 1..2176: note = Description of Artificial Sequence: Synthetic polypeptide
MPAAKRVKLDGGDKKYSIGLDIGTNSVGWAVITDEYKVPSKKFKVLGNTDRHSIKKNLIGALLFDSGETAEATRLKRTARRRYTRRKNRICYLQEIFSNEMAKVDDSFFHRLEESFLVEEDKKHERHPIFGNIVDEVAYHEKYPTIYHLRKKLVDSTDKADLRLIYLALAHMIKFRGHFLIEGDLNPDNSDVDKLFIQLVQTYNQLFEENPINASGVDAKAILSARLSKSRRLENLIAQLPGEKKNGLFGNLIALSLGLTPNFKSNFDLAEDAKLQLSKDTYDDDLDNLLAQIGDQYADLFLAAKNLSDAILLSDILRVNTEITKAPLSASMIKRYDEHHQDLTLLKALVRQQLPEKYKEIFFDQSKNGYAGYIDGGASQEEFYKFIKPILEKMDGTEELLVKLNREDLLRKQRTFDNGSIPHQIHLGELHAILRRQEDFYPFLKDNREKIEKILTFRIPYYVGPLARGNSRFAWMTRKSEETITPWNFEEVVDKGASAQSFIERMTNFDKNLPNEKVLPKHSLLYEYFTVYNELTKVKYVTEGMRKPAFLSGEQKKAIVDLLFKTNRKVTVKQLKEDYFKKIECFDSVEISGVEDRFNASLGTYHDLLKIIKDKDFLDNEENEDILEDIVLTLTLFEDREMIEERLKTYAHLFDDKVMKQLKRRRYTGWGRLSRKLINGIRDKQSGKTILDFLKSDGFANRNFMQLIHDDSLTFKEDIQKAQVSGQGDSLHEHIANLAGSPAIKKGILQTVKVVDELVKVMGRHKPENIVIEMARENQTTQKGQKNSRERMKRIEEGIKELGSQILKEHPVENTQLQNEKLYLYYLQNGRDMYVDQELDINRLSDYDVDHIVPQSFLKDDSIDNKVLTRSDKARGKSDNVPSEEVVKKMKNYWRQLLNAKLITQRKFDNLTKAERGGLSELDKAGFIKRQLVETRQITKHVAQILDSRMNTKYDENDKLIREVKVITLKSKLVSDFRKDFQFYKVREINNYHHAHDAYLNAVVGTALIKKYPKLESEFVYGDYKVYDVRKMIAKSEQEIGKATAKYFFYSNIMNFFKTEITLANGEIRKRPLIETNGETGEIVWDKGRDFATVRKVLSMPQVNIVKKTEVQTGGFSKESILPKRNSDKLIARKKDWDPKKYGGFDSPTVAYSVLVVAKVEKGKSKKLKSVKELLGITIMERSSFEKNPIDFLEAKGYKEVKKDLIIKLPKYSLFELENGRKRMLASAGELQKGNELALPSKYVNFLYLASHYEKLKGSPEDNEQKQLFVEQHKHYLDEIIEQISEFSKRVILADANLDKVLSAYNKHRDKPIREQAENIIHLFTLTNLGAPAAFKYFDTTIDRKRYTSTKEVLDATLIHQSITGLYETRIDLSQLGGDGGGGSEAAAKGSSGGMDPLQLLQPLEAEIKGTKLKAHWNSGATITCVPQAFLEEEVPIKNIWIKTIHGEKEQPVYYLTFKIQGRKVEAEVISSPYDYILVSPSDIPWLMKKPLQLTTLVPLQEYEERLLKQTMLTGSYKEKLQSLFLKYDALWQHWENQVGHRRIKPHHIATGTVNPRPQKQYPINPKAKASIQTVINDLLKQGVLIQQNSIMNTPVYPVPKPDGKWRMVLDYREVNKTIPLIAAQNQHSAGILSSIFRGKYKTTLDLSNGFWAHSITPESYWLTAFTWLGQQYCWTRLPQGFLNSPALFNADVVDLLKEVPNVQVYVDDIYISHDDPREHLEQLEKVFSLLLNAGYVVSLKKSEIAQHEVEFLGFNITKEGRGLTETFKQKLLNITPPRDLKQLQSILGKLNFARNFIPNFSELVKPLYNIIATAPGKYITWTTDNSQQLQNIISMLNSAENLEERNPEVRLIMKVNTSPSAGYIRFYNEFAKRPIMYLNYVYTKAEVKFTNTEKLLTTIHKGLIKALDLGMGQEILVYSPIVSMTKIQKTPLPERKALPIRWITWMSYLEDPRIQFHYDKTLPELQQVPTVTDDIIAKIKHPSEFSMVFYTDGSAIKHPNVNKSHNAGMGIAQVQFKPEFTVINTWSIPLGDHTAQLAEVAAVEFACKKALKIDGPVLIVTDSFYVAESVNKELPYWQSNGFFNNKKKPLKHVSKWKSIADCIQLKPDIIIIHEKGHQPTASTFHTEGNNLADKLATQGSYVVNAGKRTADGSEFEKRTADGSEFESPKKKAKVE

SEQ ID NO: 685 - protein, 2176 aa, synthetic construct
  source 1..2176: note = Description of Artificial Sequence: Synthetic polypeptide
MPAAKRVKLDGGDKKYSIGLDIGTNSVGWAVITDEYKVPSKKFKVLGNTDRHSIKKNLIGALLFDSGETAEATRLKRTARRRYTRRKNRICYLQEIFSNEMAKVDDSFFHRLEESFLVEEDKKHERHPIFGNIVDEVAYHEKYPTIYHLRKKLVDSTDKADLRLIYLALAHMIKFRGHFLIEGDLNPDNSDVDKLFIQLVQTYNQLFEENPINASGVDAKAILSARLSKSRRLENLIAQLPGEKKNGLFGNLIALSLGLTPNFKSNFDLAEDAKLQLSKDTYDDDLDNLLAQIGDQYADLFLAAKNLSDAILLSDILRVNTEITKAPLSASMIKRYDEHHQDLTLLKALVRQQLPEKYKEIFFDQSKNGYAGYIDGGASQEEFYKFIKPILEKMDGTEELLVKLNREDLLRKQRTFDNGSIPHQIHLGELHAILRRQEDFYPFLKDNREKIEKILTFRIPYYVGPLARGNSRFAWMTRKSEETITPWNFEEVVDKGASAQSFIERMTNFDKNLPNEKVLPKHSLLYEYFTVYNELTKVKYVTEGMRKPAFLSGEQKKAIVDLLFKTNRKVTVKQLKEDYFKKIECFDSVEISGVEDRFNASLGTYHDLLKIIKDKDFLDNEENEDILEDIVLTLTLFEDREMIEERLKTYAHLFDDKVMKQLKRRRYTGWGRLSRKLINGIRDKQSGKTILDFLKSDGFANRNFMQLIHDDSLTFKEDIQKAQVSGQGDSLHEHIANLAGSPAIKKGILQTVKVVDELVKVMGRHKPENIVIEMARENQTTQKGQKNSRERMKRIEEGIKELGSQILKEHPVENTQLQNEKLYLYYLQNGRDMYVDQELDINRLSDYDVDHIVPQSFLKDDSIDNKVLTRSDKARGKSDNVPSEEVVKKMKNYWRQLLNAKLITQRKFDNLTKAERGGLSELDKAGFIKRQLVETRQITKHVAQILDSRMNTKYDENDKLIREVKVITLKSKLVSDFRKDFQFYKVREINNYHHAHDAYLNAVVGTALIKKYPKLESEFVYGDYKVYDVRKMIAKSEQEIGKATAKYFFYSNIMNFFKTEITLANGEIRKRPLIETNGETGEIVWDKGRDFATVRKVLSMPQVNIVKKTEVQTGGFSKESILPKRNSDKLIARKKDWDPKKYGGFDSPTVAYSVLVVAKVEKGKSKKLKSVKELLGITIMERSSFEKNPIDFLEAKGYKEVKKDLIIKLPKYSLFELENGRKRMLASAGELQKGNELALPSKYVNFLYLASHYEKLKGSPEDNEQKQLFVEQHKHYLDEIIEQISEFSKRVILADANLDKVLSAYNKHRDKPIREQAENIIHLFTLTNLGAPAAFKYFDTTIDRKRYTSTKEVLDATLIHQSITGLYETRIDLSQLGGDGGGGGEAAAKGSSGGMDPLQLLQPLEAEIKGTKLKAHWNSGATITCVPQAFLEEEVPIKNIWIKTIHGEKEQPVYYLTFKIQGRKVEAEVISSPYDYILVSPSDIPWLMKKPLQLTTLVPLQEYEERLLKQTMLTGSYKEKLQSLFLKYDALWQHWENQVGHRRIKPHHIATGTVNPRPQKQYPINPKAKASIQTVINDLLKQGVLIQQNSIMNTPVYPVPKPDGKWRMVLDYREVNKTIPLIAAQNQHSAGILSSIFRGKYKTTLDLSNGFWAHSITPESYWLTAFTWLGQQYCWTRLPQGFLNSPALFNADVVDLLKEVPNVQVYVDDIYISHDDPREHLEQLEKVFSLLLNAGYVVSLKKSEIAQHEVEFLGFNITKEGRGLTETFKQKLLNITPPRDLKQLQSILGKLNFARNFIPNFSELVKPLYNIIATAPGKYITWTTDNSQQLQNIISMLNSAENLEERNPEVRLIMKVNTSPSAGYIRFYNEFAKRPIMYLNYVYTKAEVKFTNTEKLLTTIHKGLIKALDLGMGQEILVYSPIVSMTKIQKTPLPERKALPIRWITWMSYLEDPRIQFHYDKTLPELQQVPTVTDDIIAKIKHPSEFSMVFYTDGSAIKHPNVNKSHNAGMGIAQVQFKPEFTVINTWSIPLGDHTAQLAEVAAVEFACKKALKIDGPVLIVTDSFYVAESVNKELPYWQSNGFFNNKKKPLKHVSKWKSIADCIQLKPDIIIIHEKGHQPTASTFHTEGNNLADKLATQGSYVVNAGKRTADGSEFEKRTADGSEFESPKKKAKVE

SEQ ID NO: 686 - protein, 2176 aa, synthetic construct
  source 1..2176: note = Description of Artificial Sequence: Synthetic polypeptide
MPAAKRVKLDGGDKKYSIGLDIGTNSVGWAVITDEYKVPSKKFKVLGNTDRHSIKKNLIGALLFDSGETAEATRLKRTARRRYTRRKNRICYLQEIFSNEMAKVDDSFFHRLEESFLVEEDKKHERHPIFGNIVDEVAYHEKYPTIYHLRKKLVDSTDKADLRLIYLALAHMIKFRGHFLIEGDLNPDNSDVDKLFIQLVQTYNQLFEENPINASGVDAKAILSARLSKSRRLENLIAQLPGEKKNGLFGNLIALSLGLTPNFKSNFDLAEDAKLQLSKDTYDDDLDNLLAQIGDQYADLFLAAKNLSDAILLSDILRVNTEITKAPLSASMIKRYDEHHQDLTLLKALVRQQLPEKYKEIFFDQSKNGYAGYIDGGASQEEFYKFIKPILEKMDGTEELLVKLNREDLLRKQRTFDNGSIPHQIHLGELHAILRRQEDFYPFLKDNREKIEKILTFRIPYYVGPLARGNSRFAWMTRKSEETITPWNFEEVVDKGASAQSFIERMTNFDKNLPNEKVLPKHSLLYEYFTVYNELTKVKYVTEGMRKPAFLSGEQKKAIVDLLFKTNRKVTVKQLKEDYFKKIECFDSVEISGVEDRFNASLGTYHDLLKIIKDKDFLDNEENEDILEDIVLTLTLFEDREMIEERLKTYAHLFDDKVMKQLKRRRYTGWGRLSRKLINGIRDKQSGKTILDFLKSDGFANRNFMQLIHDDSLTFKEDIQKAQVSGQGDSLHEHIANLAGSPAIKKGILQTVKVVDELVKVMGRHKPENIVIEMARENQTTQKGQKNSRERMKRIEEGIKELGSQILKEHPVENTQLQNEKLYLYYLQNGRDMYVDQELDINRLSDYDVDHIVPQSFLKDDSIDNKVLTRSDKARGKSDNVPSEEVVKKMKNYWRQLLNAKLITQRKFDNLTKAERGGLSELDKAGFIKRQLVETRQITKHVAQILDSRMNTKYDENDKLIREVKVITLKSKLVSDFRKDFQFYKVREINNYHHAHDAYLNAVVGTALIKKYPKLESEFVYGDYKVYDVRKMIAKSEQEIGKATAKYFFYSNIMNFFKTEITLANGEIRKRPLIETNGETGEIVWDKGRDFATVRKVLSMPQVNIVKKTEVQTGGFSKESILPKRNSDKLIARKKDWDPKKYGGFDSPTVAYSVLVVAKVEKGKSKKLKSVKELLGITIMERSSFEKNPIDFLEAKGYKEVKKDLIIKLPKYSLFELENGRKRMLASAGELQKGNELALPSKYVNFLYLASHYEKLKGSPEDNEQKQLFVEQHKHYLDEIIEQISEFSKRVILADANLDKVLSAYNKHRDKPIREQAENIIHLFTLTNLGAPAAFKYFDTTIDRKRYTSTKEVLDATLIHQSITGLYETRIDLSQLGGDGGEAAAKPAPGSSGGMDPLQLLQPLEAEIKGTKLKAHWNSGATITCVPQAFLEEEVPIKNIWIKTIHGEKEQPVYYLTFKIQGRKVEAEVISSPYDYILVSPSDIPWLMKKPLQLTTLVPLQEYEERLLKQTMLTGSYKEKLQSLFLKYDALWQHWENQVGHRRIKPHHIATGTVNPRPQKQYPINPKAKASIQTVINDLLKQGVLIQQNSIMNTPVYPVPKPDGKWRMVLDYREVNKTIPLIAAQNQHSAGILSSIFRGKYKTTLDLSNGFWAHSITPESYWLTAFTWLGQQYCWTRLPQGFLNSPALFNADVVDLLKEVPNVQVYVDDIYISHDDPREHLEQLEKVFSLLLNAGYVVSLKKSEIAQHEVEFLGFNITKEGRGLTETFKQKLLNITPPRDLKQLQSILGKLNFARNFIPNFSELVKPLYNIIATAPGKYITWTTDNSQQLQNIISMLNSAENLEERNPEVRLIMKVNTSPSAGYIRFYNEFAKRPIMYLNYVYTKAEVKFTNTEKLLTTIHKGLIKALDLGMGQEILVYSPIVSMTKIQKTPLPERKALPIRWITWMSYLEDPRIQFHYDKTLPELQQVPTVTDDIIAKIKHPSEFSMVFYTDGSAIKHPNVNKSHNAGMGIAQVQFKPEFTVINTWSIPLGDHTAQLAEVAAVEFACKKALKIDGPVLIVTDSFYVAESVNKELPYWQSNGFFNNKKKPLKHVSKWKSIADCIQLKPDIIIIHEKGHQPTASTFHTEGNNLADKLATQGSYVVNAGKRTADGSEFEKRTADGSEFESPKKKAKVE

SEQ ID NO: 687 - protein, 2174 aa, synthetic construct
  source 1..2174: note = Description of Artificial Sequence: Synthetic polypeptide
MPAAKRVKLDGGDKKYSIGLDIGTNSVGWAVITDEYKVPSKKFKVLGNTDRHSIKKNLIGALLFDSGETAEATRLKRTARRRYTRRKNRICYLQEIFSNEMAKVDDSFFHRLEESFLVEEDKKHERHPIFGNIVDEVAYHEKYPTIYHLRKKLVDSTDKADLRLIYLALAHMIKFRGHFLIEGDLNPDNSDVDKLFIQLVQTYNQLFEENPINASGVDAKAILSARLSKSRRLENLIAQLPGEKKNGLFGNLIALSLGLTPNFKSNFDLAEDAKLQLSKDTYDDDLDNLLAQIGDQYADLFLAAKNLSDAILLSDILRVNTEITKAPLSASMIKRYDEHHQDLTLLKALVRQQLPEKYKEIFFDQSKNGYAGYIDGGASQEEFYKFIKPILEKMDGTEELLVKLNREDLLRKQRTFDNGSIPHQIHLGELHAILRRQEDFYPFLKDNREKIEKILTFRIPYYVGPLARGNSRFAWMTRKSEETITPWNFEEVVDKGASAQSFIERMTNFDKNLPNEKVLPKHSLLYEYFTVYNELTKVKYVTEGMRKPAFLSGEQKKAIVDLLFKTNRKVTVKQLKEDYFKKIECFDSVEISGVEDRFNASLGTYHDLLKIIKDKDFLDNEENEDILEDIVLTLTLFEDREMIEERLKTYAHLFDDKVMKQLKRRRYTGWGRLSRKLINGIRDKQSGKTILDFLKSDGFANRNFMQLIHDDSLTFKEDIQKAQVSGQGDSLHEHIANLAGSPAIKKGILQTVKVVDELVKVMGRHKPENIVIEMARENQTTQKGQKNSRERMKRIEEGIKELGSQILKEHPVENTQLQNEKLYLYYLQNGRDMYVDQELDINRLSDYDVDHIVPQSFLKDDSIDNKVLTRSDKARGKSDNVPSEEVVKKMKNYWRQLLNAKLITQRKFDNLTKAERGGLSELDKAGFIKRQLVETRQITKHVAQILDSRMNTKYDENDKLIREVKVITLKSKLVSDFRKDFQFYKVREINNYHHAHDAYLNAVVGTALIKKYPKLESEFVYGDYKVYDVRKMIAKSEQEIGKATAKYFFYSNIMNFFKTEITLANGEIRKRPLIETNGETGEIVWDKGRDFATVRKVLSMPQVNIVKKTEVQTGGFSKESILPKRNSDKLIARKKDWDPKKYGGFDSPTVAYSVLVVAKVEKGKSKKLKSVKELLGITIMERSSFEKNPIDFLEAKGYKEVKKDLIIKLPKYSLFELENGRKRMLASAGELQKGNELALPSKYVNFLYLASHYEKLKGSPEDNEQKQLFVEQHKHYLDEIIEQISEFSKRVILADANLDKVLSAYNKHRDKPIREQAENIIHLFTLTNLGAPAAFKYFDTTIDRKRYTSTKEVLDATLIHQSITGLYETRIDLSQLGGDGGGGGPAPGSSGGMDPLQLLQPLEAEIKGTKLKAHWNSGATITCVPQAFLEEEVPIKNIWIKTIHGEKEQPVYYLTFKIQGRKVEAEVISSPYDYILVSPSDIPWLMKKPLQLTTLVPLQEYEERLLKQTMLTGSYKEKLQSLFLKYDALWQHWENQVGHRRIKPHHIATGTVNPRPQKQYPINPKAKASIQTVINDLLKQGVLIQQNSIMNTPVYPVPKPDGKWRMVLDYREVNKTIPLIAAQNQHSAGILSSIFRGKYKTTLDLSNGFWAHSITPESYWLTAFTWLGQQYCWTRLPQGFLNSPALFNADVVDLLKEVPNVQVYVDDIYISHDDPREHLEQLEKVFSLLLNAGYVVSLKKSEIAQHEVEFLGFNITKEGRGLTETFKQKLLNITPPRDLKQLQSILGKLNFARNFIPNFSELVKPLYNIIATAPGKYITWTTDNSQQLQNIISMLNSAENLEERNPEVRLIMKVNTSPSAGYIRFYNEFAKRPIMYLNYVYTKAEVKFTNTEKLLTTIHKGLIKALDLGMGQEILVYSPIVSMTKIQKTPLPERKALPIRWITWMSYLEDPRIQFHYDKTLPELQQVPTVTDDIIAKIKHPSEFSMVFYTDGSAIKHPNVNKSHNAGMGIAQVQFKPEFTVINTWSIPLGDHTAQLAEVAAVEFACKKALKIDGPVLIVTDSFYVAESVNKELPYWQSNGFFNNKKKPLKHVSKWKSIADCIQLKPDIIIIHEKGHQPTASTFHTEGNNLADKLATQGSYVVNAGKRTADGSEFEKRTADGSEFESPKKKAKVE

SEQ ID NO: 688 - protein, 2173 aa, synthetic construct
  source 1..2173: note = Description of Artificial Sequence: Synthetic polypeptide
MPAAKRVKLDGGDKKYSIGLDIGTNSVGWAVITDEYKVPSKKFKVLGNTDRHSIKKNLIGALLFDSGETAEATRLKRTARRRYTRRKNRICYLQEIFSNEMAKVDDSFFHRLEESFLVEEDKKHERHPIFGNIVDEVAYHEKYPTIYHLRKKLVDSTDKADLRLIYLALAHMIKFRGHFLIEGDLNPDNSDVDKLFIQLVQTYNQLFEENPINASGVDAKAILSARLSKSRRLENLIAQLPGEKKNGLFGNLIALSLGLTPNFKSNFDLAEDAKLQLSKDTYDDDLDNLLAQIGDQYADLFLAAKNLSDAILLSDILRVNTEITKAPLSASMIKRYDEHHQDLTLLKALVRQQLPEKYKEIFFDQSKNGYAGYIDGGASQEEFYKFIKPILEKMDGTEELLVKLNREDLLRKQRTFDNGSIPHQIHLGELHAILRRQEDFYPFLKDNREKIEKILTFRIPYYVGPLARGNSRFAWMTRKSEETITPWNFEEVVDKGASAQSFIERMTNFDKNLPNEKVLPKHSLLYEYFTVYNELTKVKYVTEGMRKPAFLSGEQKKAIVDLLFKTNRKVTVKQLKEDYFKKIECFDSVEISGVEDRFNASLGTYHDLLKIIKDKDFLDNEENEDILEDIVLTLTLFEDREMIEERLKTYAHLFDDKVMKQLKRRRYTGWGRLSRKLINGIRDKQSGKTILDFLKSDGFANRNFMQLIHDDSLTFKEDIQKAQVSGQGDSLHEHIANLAGSPAIKKGILQTVKVVDELVKVMGRHKPENIVIEMARENQTTQKGQKNSRERMKRIEEGIKELGSQILKEHPVENTQLQNEKLYLYYLQNGRDMYVDQELDINRLSDYDVDHIVPQSFLKDDSIDNKVLTRSDKARGKSDNVPSEEVVKKMKNYWRQLLNAKLITQRKFDNLTKAERGGLSELDKAGFIKRQLVETRQITKHVAQILDSRMNTKYDENDKLIREVKVITLKSKLVSDFRKDFQFYKVREINNYHHAHDAYLNAVVGTALIKKYPKLESEFVYGDYKVYDVRKMIAKSEQEIGKATAKYFFYSNIMNFFKTEITLANGEIRKRPLIETNGETGEIVWDKGRDFATVRKVLSMPQVNIVKKTEVQTGGFSKESILPKRNSDKLIARKKDWDPKKYGGFDSPTVAYSVLVVAKVEKGKSKKLKSVKELLGITIMERSSFEKNPIDFLEAKGYKEVKKDLIIKLPKYSLFELENGRKRMLASAGELQKGNELALPSKYVNFLYLASHYEKLKGSPEDNEQKQLFVEQHKHYLDEIIEQISEFSKRVILADANLDKVLSAYNKHRDKPIREQAENIIHLFTLTNLGAPAAFKYFDTTIDRKRYTSTKEVLDATLIHQSITGLYETRIDLSQLGGDGGEAAAKGSSGGMDPLQLLQPLEAEIKGTKLKAHWNSGATITCVPQAFLEEEVPIKNIWIKTIHGEKEQPVYYLTFKIQGRKVEAEVISSPYDYILVSPSDIPWLMKKPLQLTTLVPLQEYEERLLKQTMLTGSYKEKLQSLFLKYDALWQHWENQVGHRRIKPHHIATGTVNPRPQKQYPINPKAKASIQTVINDLLKQGVLIQQNSIMNTPVYPVPKPDGKWRMVLDYREVNKTIPLIAAQNQHSAGILSSIFRGKYKTTLDLSNGFWAHSITPESYWLTAFTWLGQQYCWTRLPQGFLNSPALFNADVVDLLKEVPNVQVYVDDIYISHDDPREHLEQLEKVFSLLLNAGYVVSLKKSEIAQHEVEFLGFNITKEGRGLTETFKQKLLNITPPRDLKQLQSILGKLNFARNFIPNFSELVKPLYNIIATAPGKYITWTTDNSQQLQNIISMLNSAENLEERNPEVRLIMKVNTSPSAGYIRFYNEFAKRPIMYLNYVYTKAEVKFTNTEKLLTTIHKGLIKALDLGMGQEILVYSPIVSMTKIQKTPLPERKALPIRWITWMSYLEDPRIQFHYDKTLPELQQVPTVTDDIIAKIKHPSEFSMVFYTDGSAIKHPNVNKSHNAGMGIAQVQFKPEFTVINTWSIPLGDHTAQLAEVAAVEFACKKALKIDGPVLIVTDSFYVAESVNKELPYWQSNGFFNNKKKPLKHVSKWKSIADCIQLKPDIIIIHEKGHQPTASTFHTEGNNLADKLATQGSYVVNAGKRTADGSEFEKRTADGSEFESPKKKAKVE

SEQ ID NO: 689 - protein, 2176 aa, synthetic construct
  source 1..2176: note = Description of Artificial Sequence: Synthetic polypeptide
MPAAKRVKLDGGDKKYSIGLDIGTNSVGWAVITDEYKVPSKKFKVLGNTDRHSIKKNLIGALLFDSGETAEATRLKRTARRRYTRRKNRICYLQEIFSNEMAKVDDSFFHRLEESFLVEEDKKHERHPIFGNIVDEVAYHEKYPTIYHLRKKLVDSTDKADLRLIYLALAHMIKFRGHFLIEGDLNPDNSDVDKLFIQLVQTYNQLFEENPINASGVDAKAILSARLSKSRRLENLIAQLPGEKKNGLFGNLIALSLGLTPNFKSNFDLAEDAKLQLSKDTYDDDLDNLLAQIGDQYADLFLAAKNLSDAILLSDILRVNTEITKAPLSASMIKRYDEHHQDLTLLKALVRQQLPEKYKEIFFDQSKNGYAGYIDGGASQEEFYKFIKPILEKMDGTEELLVKLNREDLLRKQRTFDNGSIPHQIHLGELHAILRRQEDFYPFLKDNREKIEKILTFRIPYYVGPLARGNSRFAWMTRKSEETITPWNFEEVVDKGASAQSFIERMTNFDKNLPNEKVLPKHSLLYEYFTVYNELTKVKYVTEGMRKPAFLSGEQKKAIVDLLFKTNRKVTVKQLKEDYFKKIECFDSVEISGVEDRFNASLGTYHDLLKIIKDKDFLDNEENEDILEDIVLTLTLFEDREMIEERLKTYAHLFDDKVMKQLKRRRYTGWGRLSRKLINGIRDKQSGKTILDFLKSDGFANRNFMQLIHDDSLTFKEDIQKAQVSGQGDSLHEHIANLAGSPAIKKGILQTVKVVDELVKVMGRHKPENIVIEMARENQTTQKGQKNSRERMKRIEEGIKELGSQILKEHPVENTQLQNEKLYLYYLQNGRDMYVDQELDINRLSDYDVDHIVPQSFLKDDSIDNKVLTRSDKARGKSDNVPSEEVVKKMKNYWRQLLNAKLITQRKFDNLTKAERGGLSELDKAGFIKRQLVETRQITKHVAQILDSRMNTKYDENDKLIREVKVITLKSKLVSDFRKDFQFYKVREINNYHHAHDAYLNAVVGTALIKKYPKLESEFVYGDYKVYDVRKMIAKSEQEIGKATAKYFFYSNIMNFFKTEITLANGEIRKRPLIETNGETGEIVWDKGRDFATVRKVLSMPQVNIVKKTEVQTGGFSKESILPKRNSDKLIARKKDWDPKKYGGFDSPTVAYSVLVVAKVEKGKSKKLKSVKELLGITIMERSSFEKNPIDFLEAKGYKEVKKDLIIKLPKYSLFELENGRKRMLASAGELQKGNELALPSKYVNFLYLASHYEKLKGSPEDNEQKQLFVEQHKHYLDEIIEQISEFSKRVILADANLDKVLSAYNKHRDKPIREQAENIIHLFTLTNLGAPAAFKYFDTTIDRKRYTSTKEVLDATLIHQSITGLYETRIDLSQLGGDGGEAAAKPAPGGSGGMNPLQLLQPLPAEVKGTKLLAHWNSGATITCIPESFLEDEQPIKQTLIKTIHGEKQQNVYYLTFKVKGRKVEAEVIASPYEYILLSPTDVPWLTQQPLQLTILVPLQEYQDRILNKTALPEEQKQQLKALFTKYDNLWQHWENQVGHRKIRPHNIATGDYPPRPQKQYPINPKAKPSIQIVIDDLLKQGVLTPQNSTMNTPVYPVPKPDGRWRMVLDYREVNKTIPLTAAQNQHSAGILATIVRQKYKTTLDLANGFWAHPITPDSYWLTAFTWQGKQYCWTRLPQGFLNSPALFTADAVDLLKEVPNVQVYVDDIYLSHDNPHEHIQQLEKVFQILLQAGYVVSLKKSEIGQRTVEFLGFNITKEGRGLTDTFKTKLLNVTPPKDLKQLQSILGLLNFARNFIPNFAELVQTLYNLIASSKGKYIEWTEDNTKQLNKVIEALNTASNLEERLPDQRLVIKVNTSPSAGYVRYYNESGKKPIMYLNYVFSKAELKFSMLEKLLTTMHKALIKAMDLAMGQEILVYSPIVSMTKIQKTPLPERKALPIRWITWMTYLEDPRIQFHYDKTLPELKHIPDVYTSSIPPLKHPSQYEGVFCTDGSAIKSPDPTKSNNAGMGIVHAIYNPEYKILNQWSIPLGHHTAQMAEIAAVEFACKKALKVPGPVLVITDSFYVAESANKELPYWKSNGFVNNKKEPLKHISKWKSIAECLSIKPDITIQHEKGHQPINTSIHTEGNALADKLATQGSYVVNAGKRTADGSEFEKRTADGSEFESPKKKAKVE

SEQ ID NO: 690 - protein, 2176 aa, synthetic construct
  source 1..2176: note = Description of Artificial Sequence: Synthetic polypeptide
MPAAKRVKLDGGDKKYSIGLDIGTNSVGWAVITDEYKVPSKKFKVLGNTDRHSIKKNLIGALLFDSGETAEATRLKRTARRRYTRRKNRICYLQEIFSNEMAKVDDSFFHRLEESFLVEEDKKHERHPIFGNIVDEVAYHEKYPTIYHLRKKLVDSTDKADLRLIYLALAHMIKFRGHFLIEGDLNPDNSDVDKLFIQLVQTYNQLFEENPINASGVDAKAILSARLSKSRRLENLIAQLPGEKKNGLFGNLIALSLGLTPNFKSNFDLAEDAKLQLSKDTYDDDLDNLLAQIGDQYADLFLAAKNLSDAILLSDILRVNTEITKAPLSASMIKRYDEHHQDLTLLKALVRQQLPEKYKEIFFDQSKNGYAGYIDGGASQEEFYKFIKPILEKMDGTEELLVKLNREDLLRKQRTFDNGSIPHQIHLGELHAILRRQEDFYPFLKDNREKIEKILTFRIPYYVGPLARGNSRFAWMTRKSEETITPWNFEEVVDKGASAQSFIERMTNFDKNLPNEKVLPKHSLLYEYFTVYNELTKVKYVTEGMRKPAFLSGEQKKAIVDLLFKTNRKVTVKQLKEDYFKKIECFDSVEISGVEDRFNASLGTYHDLLKIIKDKDFLDNEENEDILEDIVLTLTLFEDREMIEERLKTYAHLFDDKVMKQLKRRRYTGWGRLSRKLINGIRDKQSGKTILDFLKSDGFANRNFMQLIHDDSLTFKEDIQKAQVSGQGDSLHEHIANLAGSPAIKKGILQTVKVVDELVKVMGRHKPENIVIEMARENQTTQKGQKNSRERMKRIEEGIKELGSQILKEHPVENTQLQNEKLYLYYLQNGRDMYVDQELDINRLSDYDVDHIVPQSFLKDDSIDNKVLTRSDKARGKSDNVPSEEVVKKMKNYWRQLLNAKLITQRKFDNLTKAERGGLSELDKAGFIKRQLVETRQITKHVAQILDSRMNTKYDENDKLIREVKVITLKSKLVSDFRKDFQFYKVREINNYHHAHDAYLNAVVGTALIKKYPKLESEFVYGDYKVYDVRKMIAKSEQEIGKATAKYFFYSNIMNFFKTEITLANGEIRKRPLIETNGETGEIVWDKGRDFATVRKVLSMPQVNIVKKTEVQTGGFSKESILPKRNSDKLIARKKDWDPKKYGGFDSPTVAYSVLVVAKVEKGKSKKLKSVKELLGITIMERSSFEKNPIDFLEAKGYKEVKKDLIIKLPKYSLFELENGRKRMLASAGELQKGNELALPSKYVNFLYLASHYEKLKGSPEDNEQKQLFVEQHKHYLDEIIEQISEFSKRVILADANLDKVLSAYNKHRDKPIREQAENIIHLFTLTNLGAPAAFKYFDTTIDRKRYTSTKEVLDATLIHQSITGLYETRIDLSQLGGDGGGGSEAAAKPAPGGMNPLQLLQPLPAEVKGTKLLAHWNSGATITCIPESFLEDEQPIKQTLIKTIHGEKQQNVYYLTFKVKGRKVEAEVIASPYEYILLSPTDVPWLTQQPLQLTILVPLQEYQDRILNKTALPEEQKQQLKALFTKYDNLWQHWENQVGHRKIRPHNIATGDYPPRPQKQYPINPKAKPSIQIVIDDLLKQGVLTPQNSTMNTPVYPVPKPDGRWRMVLDYREVNKTIPLTAAQNQHSAGILATIVRQKYKTTLDLANGFWAHPITPDSYWLTAFTWQGKQYCWTRLPQGFLNSPALFTADAVDLLKEVPNVQVYVDDIYLSHDNPHEHIQQLEKVFQILLQAGYVVSLKKSEIGQRTVEFLGFNITKEGRGLTDTFKTKLLNVTPPKDLKQLQSILGLLNFARNFIPNFAELVQTLYNLIASSKGKYIEWTEDNTKQLNKVIEALNTASNLEERLPDQRLVIKVNTSPSAGYVRYYNESGKKPIMYLNYVFSKAELKFSMLEKLLTTMHKALIKAMDLAMGQEILVYSPIVSMTKIQKTPLPERKALPIRWITWMTYLEDPRIQFHYDKTLPELKHIPDVYTSSIPPLKHPSQYEGVFCTDGSAIKSPDPTKSNNAGMGIVHAIYNPEYKILNQWSIPLGHHTAQMAEIAAVEFACKKALKVPGPVLVITDSFYVAESANKELPYWKSNGFVNNKKEPLKHISKWKSIAECLSIKPDITIQHEKGHQPINTSIHTEGNALADKLATQGSYVVNAGKRTADGSEFEKRTADGSEFESPKKKAKVE

SEQ ID NO: 691 - protein, 2173 aa, synthetic construct
  source 1..2173: note = Description of Artificial Sequence: Synthetic polypeptide
MPAAKRVKLDGGDKKYSIGLDIGTNSVGWAVITDEYKVPSKKFKVLGNTDRHSIKKNLIGALLFDSGETAEATRLKRTARRRYTRRKNRICYLQEIFSNEMAKVDDSFFHRLEESFLVEEDKKHERHPIFGNIVDEVAYHEKYPTIYHLRKKLVDSTDKADLRLIYLALAHMIKFRGHFLIEGDLNPDNSDVDKLFIQLVQTYNQLFEENPINASGVDAKAILSARLSKSRRLENLIAQLPGEKKNGLFGNLIALSLGLTPNFKSNFDLAEDAKLQLSKDTYDDDLDNLLAQIGDQYADLFLAAKNLSDAILLSDILRVNTEITKAPLSASMIKRYDEHHQDLTLLKALVRQQLPEKYKEIFFDQSKNGYAGYIDGGASQEEFYKFIKPILEKMDGTEELLVKLNREDLLRKQRTFDNGSIPHQIHLGELHAILRRQEDFYPFLKDNREKIEKILTFRIPYYVGPLARGNSRFAWMTRKSEETITPWNFEEVVDKGASAQSFIERMTNFDKNLPNEKVLPKHSLLYEYFTVYNELTKVKYVTEGMRKPAFLSGEQKKAIVDLLFKTNRKVTVKQLKEDYFKKIECFDSVEISGVEDRFNASLGTYHDLLKIIKDKDFLDNEENEDILEDIVLTLTLFEDREMIEERLKTYAHLFDDKVMKQLKRRRYTGWGRLSRKLINGIRDKQSGKTILDFLKSDGFANRNFMQLIHDDSLTFKEDIQKAQVSGQGDSLHEHIANLAGSPAIKKGILQTVKVVDELVKVMGRHKPENIVIEMARENQTTQKGQKNSRERMKRIEEGIKELGSQILKEHPVENTQLQNEKLYLYYLQNGRDMYVDQELDINRLSDYDVDHIVPQSFLKDDSIDNKVLTRSDKARGKSDNVPSEEVVKKMKNYWRQLLNAKLITQRKFDNLTKAERGGLSELDKAGFIKRQLVETRQITKHVAQILDSRMNTKYDENDKLIREVKVITLKSKLVSDFRKDFQFYKVREINNYHHAHDAYLNAVVGTALIKKYPKLESEFVYGDYKVYDVRKMIAKSEQEIGKATAKYFFYSNIMNFFKTEITLANGEIRKRPLIETNGETGEIVWDKGRDFATVRKVLSMPQVNIVKKTEVQTGGFSKESILPKRNSDKLIARKKDWDPKKYGGFDSPTVAYSVLVVAKVEKGKSKKLKSVKELLGITIMERSSFEKNPIDFLEAKGYKEVKKDLIIKLPKYSLFELENGRKRMLASAGELQKGNELALPSKYVNFLYLASHYEKLKGSPEDNEQKQLFVEQHKHYLDEIIEQISEFSKRVILADANLDKVLSAYNKHRDKPIREQAENIIHLFTLTNLGAPAAFKYFDTTIDRKRYTSTKEVLDATLIHQSITGLYETRIDLSQLGGDGGGSSEAAAKGGMNPLQLLQPLPAEVKGTKLLAHWNSGATITCIPESFLEDEQPIKQTLIKTIHGEKQQNVYYLTFKVKGRKVEAEVIASPYEYILLSPTDVPWLTQQPLQLTILVPLQEYQDRILNKTALPEEQKQQLKALFTKYDNLWQHWENQVGHRKIRPHNIATGDYPPRPQKQYPINPKAKPSIQIVIDDLLKQGVLTPQNSTMNTPVYPVPKPDGRWRMVLDYREVNKTIPLTAAQNQHSAGILATIVRQKYKTTLDLANGFWAHPITPDSYWLTAFTWQGKQYCWTRLPQGFLNSPALFTADAVDLLKEVPNVQVYVDDIYLSHDNPHEHIQQLEKVFQILLQAGYVVSLKKSEIGQRTVEFLGFNITKEGRGLTDTFKTKLLNVTPPKDLKQLQSILGLLNFARNFIPNFAELVQTLYNLIASSKGKYIEWTEDNTKQLNKVIEALNTASNLEERLPDQRLVIKVNTSPSAGYVRYYNESGKKPIMYLNYVFSKAELKFSMLEKLLTTMHKALIKAMDLAMGQEILVYSPIVSMTKIQKTPLPERKALPIRWITWMTYLEDPRIQFHYDKTLPELKHIPDVYTSSIPPLKHPSQYEGVFCTDGSAIKSPDPTKSNNAGMGIVHAIYNPEYKILNQWSIPLGHHTAQMAEIAAVEFACKKALKVPGPVLVITDSFYVAESANKELPYWKSNGFVNNKKEPLKHISKWKSIAECLSIKPDITIQHEKGHQPINTSIHTEGNALADKLATQGSYVVNAGKRTADGSEFEKRTADGSEFESPKKKAKVE

SEQ ID NO: 692 - protein, 2180 aa, synthetic construct
  source 1..2180: note = Description of Artificial Sequence: Synthetic polypeptide
MPAAKRVKLDGGDKKYSIGLDIGTNSVGWAVITDEYKVPSKKFKVLGNTDRHSIKKNLIGALLFDSGETAEATRLKRTARRRYTRRKNRICYLQEIFSNEMAKVDDSFFHRLEESFLVEEDKKHERHPIFGNIVDEVAYHEKYPTIYHLRKKLVDSTDKADLRLIYLALAHMIKFRGHFLIEGDLNPDNSDVDKLFIQLVQTYNQLFEENPINASGVDAKAILSARLSKSRRLENLIAQLPGEKKNGLFGNLIALSLGLTPNFKSNFDLAEDAKLQLSKDTYDDDLDNLLAQIGDQYADLFLAAKNLSDAILLSDILRVNTEITKAPLSASMIKRYDEHHQDLTLLKALVRQQLPEKYKEIFFDQSKNGYAGYIDGGASQEEFYKFIKPILEKMDGTEELLVKLNREDLLRKQRTFDNGSIPHQIHLGELHAILRRQEDFYPFLKDNREKIEKILTFRIPYYVGPLARGNSRFAWMTRKSEETITPWNFEEVVDKGASAQSFIERMTNFDKNLPNEKVLPKHSLLYEYFTVYNELTKVKYVTEGMRKPAFLSGEQKKAIVDLLFKTNRKVTVKQLKEDYFKKIECFDSVEISGVEDRFNASLGTYHDLLKIIKDKDFLDNEENEDILEDIVLTLTLFEDREMIEERLKTYAHLFDDKVMKQLKRRRYTGWGRLSRKLINGIRDKQSGKTILDFLKSDGFANRNFMQLIHDDSLTFKEDIQKAQVSGQGDSLHEHIANLAGSPAIKKGILQTVKVVDELVKVMGRHKPENIVIEMARENQTTQKGQKNSRERMKRIEEGIKELGSQILKEHPVENTQLQNEKLYLYYLQNGRDMYVDQELDINRLSDYDVDHIVPQSFLKDDSIDNKVLTRSDKARGKSDNVPSEEVVKKMKNYWRQLLNAKLITQRKFDNLTKAERGGLSELDKAGFIKRQLVETRQITKHVAQILDSRMNTKYDENDKLIREVKVITLKSKLVSDFRKDFQFYKVREINNYHHAHDAYLNAVVGTALIKKYPKLESEFVYGDYKVYDVRKMIAKSEQEIGKATAKYFFYSNIMNFFKTEITLANGEIRKRPLIETNGETGEIVWDKGRDFATVRKVLSMPQVNIVKKTEVQTGGFSKESILPKRNSDKLIARKKDWDPKKYGGFDSPTVAYSVLVVAKVEKGKSKKLKSVKELLGITIMERSSFEKNPIDFLEAKGYKEVKKDLIIKLPKYSLFELENGRKRMLASAGELQKGNELALPSKYVNFLYLASHYEKLKGSPEDNEQKQLFVEQHKHYLDEIIEQISEFSKRVILADANLDKVLSAYNKHRDKPIREQAENIIHLFTLTNLGAPAAFKYFDTTIDRKRYTSTKEVLDATLIHQSITGLYETRIDLSQLGGDGGEAAAKGGGGSEAAAKGGMNPLQLLQPLPAEVKGTKLLAHWNSGATITCIPESFLEDEQPIKQTLIKTIHGEKQQNVYYLTFKVKGRKVEAEVIASPYEYILLSPTDVPWLTQQPLQLTILVPLQEYQDRILNKTALPEEQKQQLKALFTKYDNLWQHWENQVGHRKIRPHNIATGDYPPRPQKQYPINPKAKPSIQIVIDDLLKQGVLTPQNSTMNTPVYPVPKPDGRWRMVLDYREVNKTIPLTAAQNQHSAGILATIVRQKYKTTLDLANGFWAHPITPDSYWLTAFTWQGKQYCWTRLPQGFLNSPALFTADAVDLLKEVPNVQVYVDDIYLSHDNPHEHIQQLEKVFQILLQAGYVVSLKKSEIGQRTVEFLGFNITKEGRGLTDTFKTKLLNVTPPKDLKQLQSILGLLNFARNFIPNFAELVQTLYNLIASSKGKYIEWTEDNTKQLNKVIEALNTASNLEERLPDQRLVIKVNTSPSAGYVRYYNESGKKPIMYLNYVFSKAELKFSMLEKLLTTMHKALIKAMDLAMGQEILVYSPIVSMTKIQKTPLPERKALPIRWITWMTYLEDPRIQFHYDKTLPELKHIPDVYTSSIPPLKHPSQYEGVFCTDGSAIKSPDPTKSNNAGMGIVHAIYNPEYKILNQWSIPLGHHTAQMAEIAAVEFACKKALKVPGPVLVITDSFYVAESANKELPYWKSNGFVNNKKEPLKHISKWKSIAECLSIKPDITIQHEKGHQPINTSIHTEGNALADKLATQGSYVVNAGKRTADGSEFEKRTADGSEFESPKKKAKVE

SEQ ID NO: 693 - protein, 2170 aa, synthetic construct
  source 1..2170: note = Description of Artificial Sequence: Synthetic polypeptide
MPAAKRVKLDGGDKKYSIGLDIGTNSVGWAVITDEYKVPSKKFKVLGNTDRHSIKKNLIGALLFDSGETAEATRLKRTARRRYTRRKNRICYLQEIFSNEMAKVDDSFFHRLEESFLVEEDKKHERHPIFGNIVDEVAYHEKYPTIYHLRKKLVDSTDKADLRLIYLALAHMIKFRGHFLIEGDLNPDNSDVDKLFIQLVQTYNQLFEENPINASGVDAKAILSARLSKSRRLENLIAQLPGEKKNGLFGNLIALSLGLTPNFKSNFDLAEDAKLQLSKDTYDDDLDNLLAQIGDQYADLFLAAKNLSDAILLSDILRVNTEITKAPLSASMIKRYDEHHQDLTLLKALVRQQLPEKYKEIFFDQSKNGYAGYIDGGASQEEFYKFIKPILEKMDGTEELLVKLNREDLLRKQRTFDNGSIPHQIHLGELHAILRRQEDFYPFLKDNREKIEKILTFRIPYYVGPLARGNSRFAWMTRKSEETITPWNFEEVVDKGASAQSFIERMTNFDKNLPNEKVLPKHSLLYEYFTVYNELTKVKYVTEGMRKPAFLSGEQKKAIVDLLFKTNRKVTVKQLKEDYFKKIECFDSVEISGVEDRFNASLGTYHDLLKIIKDKDFLDNEENEDILEDIVLTLTLFEDREMIEERLKTYAHLFDDKVMKQLKRRRYTGWGRLSRKLINGIRDKQSGKTILDFLKSDGFANRNFMQLIHDDSLTFKEDIQKAQVSGQGDSLHEHIANLAGSPAIKKGILQTVKVVDELVKVMGRHKPENIVIEMARENQTTQKGQKNSRERMKRIEEGIKELGSQILKEHPVENTQLQNEKLYLYYLQNGRDMYVDQELDINRLSDYDVDHIVPQSFLKDDSIDNKVLTRSDKARGKSDNVPSEEVVKKMKNYWRQLLNAKLITQRKFDNLTKAERGGLSELDKAGFIKRQLVETRQITKHVAQILDSRMNTKYDENDKLIREVKVITLKSKLVSDFRKDFQFYKVREINNYHHAHDAYLNAVVGTALIKKYPKLESEFVYGDYKVYDVRKMIAKSEQEIGKATAKYFFYSNIMNFFKTEITLANGEIRKRPLIETNGETGEIVWDKGRDFATVRKVLSMPQVNIVKKTEVQTGGFSKESILPKRNSDKLIARKKDWDPKKYGGFDSPTVAYSVLVVAKVEKGKSKKLKSVKELLGITIMERSSFEKNPIDFLEAKGYKEVKKDLIIKLPKYSLFELENGRKRMLASAGELQKGNELALPSKYVNFLYLASHYEKLKGSPEDNEQKQLFVEQHKHYLDEIIEQISEFSKRVILADANLDKVLSAYNKHRDKPIREQAENIIHLFTLTNLGAPAAFKYFDTTIDRKRYTSTKEVLDATLIHQSITGLYETRIDLSQLGGDGGPAPAPGGMNPLQLLQPLPAEVKGTKLLAHWNSGATITCIPESFLEDEQPIKQTLIKTIHGEKQQNVYYLTFKVKGRKVEAEVIASPYEYILLSPTDVPWLTQQPLQLTILVPLQEYQDRILNKTALPEEQKQQLKALFTKYDNLWQHWENQVGHRKIRPHNIATGDYPPRPQKQYPINPKAKPSIQIVIDDLLKQGVLTPQNSTMNTPVYPVPKPDGRWRMVLDYREVNKTIPLTAAQNQHSAGILATIVRQKYKTTLDLANGFWAHPITPDSYWLTAFTWQGKQYCWTRLPQGFLNSPALFTADAVDLLKEVPNVQVYVDDIYLSHDNPHEHIQQLEKVFQILLQAGYVVSLKKSEIGQRTVEFLGFNITKEGRGLTDTFKTKLLNVTPPKDLKQLQSILGLLNFARNFIPNFAELVQTLYNLIASSKGKYIEWTEDNTKQLNKVIEALNTASNLEERLPDQRLVIKVNTSPSAGYVRYYNESGKKPIMYLNYVFSKAELKFSMLEKLLTTMHKALIKAMDLAMGQEILVYSPIVSMTKIQKTPLPERKALPIRWITWMTYLEDPRIQFHYDKTLPELKHIPDVYTSSIPPLKHPSQYEGVFCTDGSAIKSPDPTKSNNAGMGIVHAIYNPEYKILNQWSIPLGHHTAQMAEIAAVEFACKKALKVPGPVLVITDSFYVAESANKELPYWKSNGFVNNKKEPLKHISKWKSIAECLSIKPDITIQHEKGHQPINTSIHTEGNALADKLATQGSYVVNAGKRTADGSEFEKRTADGSEFESPKKKAKVE

SEQ ID NO: 694 - protein, 2185 aa, synthetic construct
  source 1..2185: note = Description of Artificial Sequence: Synthetic polypeptide
MPAAKRVKLDGGDKKYSIGLDIGTNSVGWAVITDEYKVPSKKFKVLGNTDRHSIKKNLIGALLFDSGETAEATRLKRTARRRYTRRKNRICYLQEIFSNEMAKVDDSFFHRLEESFLVEEDKKHERHPIFGNIVDEVAYHEKYPTIYHLRKKLVDSTDKADLRLIYLALAHMIKFRGHFLIEGDLNPDNSDVDKLFIQLVQTYNQLFEENPINASGVDAKAILSARLSKSRRLENLIAQLPGEKKNGLFGNLIALSLGLTPNFKSNFDLAEDAKLQLSKDTYDDDLDNLLAQIGDQYADLFLAAKNLSDAILLSDILRVNTEITKAPLSASMIKRYDEHHQDLTLLKALVRQQLPEKYKEIFFDQSKNGYAGYIDGGASQEEFYKFIKPILEKMDGTEELLVKLNREDLLRKQRTFDNGSIPHQIHLGELHAILRRQEDFYPFLKDNREKIEKILTFRIPYYVGPLARGNSRFAWMTRKSEETITPWNFEEVVDKGASAQSFIERMTNFDKNLPNEKVLPKHSLLYEYFTVYNELTKVKYVTEGMRKPAFLSGEQKKAIVDLLFKTNRKVTVKQLKEDYFKKIECFDSVEISGVEDRFNASLGTYHDLLKIIKDKDFLDNEENEDILEDIVLTLTLFEDREMIEERLKTYAHLFDDKVMKQLKRRRYTGWGRLSRKLINGIRDKQSGKTILDFLKSDGFANRNFMQLIHDDSLTFKEDIQKAQVSGQGDSLHEHIANLAGSPAIKKGILQTVKVVDELVKVMGRHKPENIVIEMARENQTTQKGQKNSRERMKRIEEGIKELGSQILKEHPVENTQLQNEKLYLYYLQNGRDMYVDQELDINRLSDYDVDHIVPQSFLKDDSIDNKVLTRSDKARGKSDNVPSEEVVKKMKNYWRQLLNAKLITQRKFDNLTKAERGGLSELDKAGFIKRQLVETRQITKHVAQILDSRMNTKYDENDKLIREVKVITLKSKLVSDFRKDFQFYKVREINNYHHAHDAYLNAVVGTALIKKYPKLESEFVYGDYKVYDVRKMIAKSEQEIGKATAKYFFYSNIMNFFKTEITLANGEIRKRPLIETNGETGEIVWDKGRDFATVRKVLSMPQVNIVKKTEVQTGGFSKESILPKRNSDKLIARKKDWDPKKYGGFDSPTVAYSVLVVAKVEKGKSKKLKSVKELLGITIMERSSFEKNPIDFLEAKGYKEVKKDLIIKLPKYSLFELENGRKRMLASAGELQKGNELALPSKYVNFLYLASHYEKLKGSPEDNEQKQLFVEQHKHYLDEIIEQISEFSKRVILADANLDKVLSAYNKHRDKPIREQAENIIHLFTLTNLGAPAAFKYFDTTIDRKRYTSTKEVLDATLIHQSITGLYETRIDLSQLGGDGGEAAAKEAAAKEAAAKEAAAKGGMNPLQLLQPLPAEVKGTKLLAHWNSGATITCIPESFLEDEQPIKQTLIKTIHGEKQQNVYYLTFKVKGRKVEAEVIASPYEYILLSPTDVPWLTQQPLQLTILVPLQEYQDRILNKTALPEEQKQQLKALFTKYDNLWQHWENQVGHRKIRPHNIATGDYPPRPQKQYPINPKAKPSIQIVIDDLLKQGVLTPQNSTMNTPVYPVPKPDGRWRMVLDYREVNKTIPLTAAQNQHSAGILATIVRQKYKTTLDLANGFWAHPITPDSYWLTAFTWQGKQYCWTRLPQGFLNSPALFTADAVDLLKEVPNVQVYVDDIYLSHDNPHEHIQQLEKVFQILLQAGYVVSLKKSEIGQRTVEFLGFNITKEGRGLTDTFKTKLLNVTPPKDLKQLQSILGLLNFARNFIPNFAELVQTLYNLIASSKGKYIEWTEDNTKQLNKVIEALNTASNLEERLPDQRLVIKVNTSPSAGYVRYYNESGKKPIMYLNYVFSKAELKFSMLEKLLTTMHKALIKAMDLAMGQEILVYSPIVSMTKIQKTPLPERKALPIRWITWMTYLEDPRIQFHYDKTLPELKHIPDVYTSSIPPLKHPSQYEGVFCTDGSAIKSPDPTKSNNAGMGIVHAIYNPEYKILNQWSIPLGHHTAQMAEIAAVEFACKKALKVPGPVLVITDSFYVAESANKELPYWKSNGFVNNKKEPLKHISKWKSIAECLSIKPDITIQHEKGHQPINTSIHTEGNALADKLATQGSYVVNAGKRTADGSEFEKRTADGSEFESPKKKAKVE

SEQ ID NO: 695 - protein, 2081 aa, synthetic construct
  source 1..2081: note = Description of Artificial Sequence: Synthetic polypeptide
MPAAKRVKLDGGDKKYSIGLDIGTNSVGWAVITDEYKVPSKKFKVLGNTDRHSIKKNLIGALLFDSGETAEATRLKRTARRRYTRRKNRICYLQEIFSNEMAKVDDSFFHRLEESFLVEEDKKHERHPIFGNIVDEVAYHEKYPTIYHLRKKLVDSTDKADLRLIYLALAHMIKFRGHFLIEGDLNPDNSDVDKLFIQLVQTYNQLFEENPINASGVDAKAILSARLSKSRRLENLIAQLPGEKKNGLFGNLIALSLGLTPNFKSNFDLAEDAKLQLSKDTYDDDLDNLLAQIGDQYADLFLAAKNLSDAILLSDILRVNTEITKAPLSASMIKRYDEHHQDLTLLKALVRQQLPEKYKEIFFDQSKNGYAGYIDGGASQEEFYKFIKPILEKMDGTEELLVKLNREDLLRKQRTFDNGSIPHQIHLGELHAILRRQEDFYPFLKDNREKIEKILTFRIPYYVGPLARGNSRFAWMTRKSEETITPWNFEEVVDKGASAQSFIERMTNFDKNLPNEKVLPKHSLLYEYFTVYNELTKVKYVTEGMRKPAFLSGEQKKAIVDLLFKTNRKVTVKQLKEDYFKKIECFDSVEISGVEDRFNASLGTYHDLLKIIKDKDFLDNEENEDILEDIVLTLTLFEDREMIEERLKTYAHLFDDKVMKQLKRRRYTGWGRLSRKLINGIRDKQSGKTILDFLKSDGFANRNFMQLIHDDSLTFKEDIQKAQVSGQGDSLHEHIANLAGSPAIKKGILQTVKVVDELVKVMGRHKPENIVIEMARENQTTQKGQKNSRERMKRIEEGIKELGSQILKEHPVENTQLQNEKLYLYYLQNGRDMYVDQELDINRLSDYDVDHIVPQSFLKDDSIDNKVLTRSDKARGKSDNVPSEEVVKKMKNYWRQLLNAKLITQRKFDNLTKAERGGLSELDKAGFIKRQLVETRQITKHVAQILDSRMNTKYDENDKLIREVKVITLKSKLVSDFRKDFQFYKVREINNYHHAHDAYLNAVVGTALIKKYPKLESEFVYGDYKVYDVRKMIAKSEQEIGKATAKYFFYSNIMNFFKTEITLANGEIRKRPLIETNGETGEIVWDKGRDFATVRKVLSMPQVNIVKKTEVQTGGFSKESILPKRNSDKLIARKKDWDPKKYGGFDSPTVAYSVLVVAKVEKGKSKKLKSVKELLGITIMERSSFEKNPIDFLEAKGYKEVKKDLIIKLPKYSLFELENGRKRMLASAGELQKGNELALPSKYVNFLYLASHYEKLKGSPEDNEQKQLFVEQHKHYLDEIIEQISEFSKRVILADANLDKVLSAYNKHRDKPIREQAENIIHLFTLTNLGAPAAFKYFDTTIDRKRYTSTKEVLDATLIHQSITGLYETRIDLSQLGGDGGPAPAPGGVPWLTQQPLQLTILVPLQEYQDRILNKTALPEEQKQQLKALFTKYDNLWQHWENQVGHRKIRPHNIATGDYPPRPQKQYPINPKAKPSIQIVIDDLLKQGVLTPQNSTMNTPVYPVPKPDGRWRMVLDYREVNKTIPLTAAQNQHSAGILATIVRQKYKTTLDLANGFWAHPITPDSYWLTAFTWQGKQYCWTRLPQGFLNSPALFTADAVDLLKEVPNVQVYVDDIYLSHDNPHEHIQQLEKVFQILLQAGYVVSLKKSEIGQRTVEFLGFNITKEGRGLTDTFKTKLLNVTPPKDLKQLQSILGLLNFARNFIPNFAELVQTLYNLIASSKGKYIEWTEDNTKQLNKVIEALNTASNLEERLPDQRLVIKVNTSPSAGYVRYYNESGKKPIMYLNYVFSKAELKFSMLEKLLTTMHKALIKAMDLAMGQEILVYSPIVSMTKIQKTPLPERKALPIRWITWMTYLEDPRIQFHYDKTLPELKHIPDVYTSSIPPLKHPSQYEGVFCTDGSAIKSPDPTKSNNAGMGIVHAIYNPEYKILNQWSIPLGHHTAQMAEIAAVEFACKKALKVPGPVLVITDSFYVAESANKELPYWKSNGFVNNKKEPLKHISKWKSIAECLSIKPDITIQHEKGHQPINTSIHTEGNALADKLATQGSYVVNAGKRTADGSEFEKRTADGSEFESPKKKAKVE

SEQ ID NO: 696 - protein, 2087 aa, synthetic construct
  source 1..2087: note = Description of Artificial Sequence: Synthetic polypeptide
MPAAKRVKLDGGDKKYSIGLDIGTNSVGWAVITDEYKVPSKKFKVLGNTDRHSIKKNLIGALLFDSGETAEATRLKRTARRRYTRRKNRICYLQEIFSNEMAKVDDSFFHRLEESFLVEEDKKHERHPIFGNIVDEVAYHEKYPTIYHLRKKLVDSTDKADLRLIYLALAHMIKFRGHFLIEGDLNPDNSDVDKLFIQLVQTYNQLFEENPINASGVDAKAILSARLSKSRRLENLIAQLPGEKKNGLFGNLIALSLGLTPNFKSNFDLAEDAKLQLSKDTYDDDLDNLLAQIGDQYADLFLAAKNLSDAILLSDILRVNTEITKAPLSASMIKRYDEHHQDLTLLKALVRQQLPEKYKEIFFDQSKNGYAGYIDGGASQEEFYKFIKPILEKMDGTEELLVKLNREDLLRKQRTFDNGSIPHQIHLGELHAILRRQEDFYPFLKDNREKIEKILTFRIPYYVGPLARGNSRFAWMTRKSEETITPWNFEEVVDKGASAQSFIERMTNFDKNLPNEKVLPKHSLLYEYFTVYNELTKVKYVTEGMRKPAFLSGEQKKAIVDLLFKTNRKVTVKQLKEDYFKKIECFDSVEISGVEDRFNASLGTYHDLLKIIKDKDFLDNEENEDILEDIVLTLTLFEDREMIEERLKTYAHLFDDKVMKQLKRRRYTGWGRLSRKLINGIRDKQSGKTILDFLKSDGFANRNFMQLIHDDSLTFKEDIQKAQVSGQGDSLHEHIANLAGSPAIKKGILQTVKVVDELVKVMGRHKPENIVIEMARENQTTQKGQKNSRERMKRIEEGIKELGSQILKEHPVENTQLQNEKLYLYYLQNGRDMYVDQELDINRLSDYDVDHIVPQSFLKDDSIDNKVLTRSDKARGKSDNVPSEEVVKKMKNYWRQLLNAKLITQRKFDNLTKAERGGLSELDKAGFIKRQLVETRQITKHVAQILDSRMNTKYDENDKLIREVKVITLKSKLVSDFRKDFQFYKVREINNYHHAHDAYLNAVVGTALIKKYPKLESEFVYGDYKVYDVRKMIAKSEQEIGKATAKYFFYSNIMNFFKTEITLANGEIRKRPLIETNGETGEIVWDKGRDFATVRKVLSMPQVNIVKKTEVQTGGFSKESILPKRNSDKLIARKKDWDPKKYGGFDSPTVAYSVLVVAKVEKGKSKKLKSVKELLGITIMERSSFEKNPIDFLEAKGYKEVKKDLIIKLPKYSLFELENGRKRMLASAGELQKGNELALPSKYVNFLYLASHYEKLKGSPEDNEQKQLFVEQHKHYLDEIIEQISEFSKRVILADANLDKVLSAYNKHRDKPIREQAENIIHLFTLTNLGAPAAFKYFDTTIDRKRYTSTKEVLDATLIHQSITGLYETRIDLSQLGGDGGPAPGGGEAAAKGGVPWLTQQPLQLTILVPLQEYQDRILNKTALPEEQKQQLKALFTKYDNLWQHWENQVGHRKIRPHNIATGDYPPRPQKQYPINPKAKPSIQIVIDDLLKQGVLTPQNSTMNTPVYPVPKPDGRWRMVLDYREVNKTIPLTAAQNQHSAGILATIVRQKYKTTLDLANGFWAHPITPDSYWLTAFTWQGKQYCWTRLPQGFLNSPALFTADAVDLLKEVPNVQVYVDDIYLSHDNPHEHIQQLEKVFQILLQAGYVVSLKKSEIGQRTVEFLGFNITKEGRGLTDTFKTKLLNVTPPKDLKQLQSILGLLNFARNFIPNFAELVQTLYNLIASSKGKYIEWTEDNTKQLNKVIEALNTASNLEERLPDQRLVIKVNTSPSAGYVRYYNESGKKPIMYLNYVFSKAELKFSMLEKLLTTMHKALIKAMDLAMGQEILVYSPIVSMTKIQKTPLPERKALPIRWITWMTYLEDPRIQFHYDKTLPELKHIPDVYTSSIPPLKHPSQYEGVFCTDGSAIKSPDPTKSNNAGMGIVHAIYNPEYKILNQWSIPLGHHTAQMAEIAAVEFACKKALKVPGPVLVITDSFYVAESANKELPYWKSNGFVNNKKEPLKHISKWKSIAECLSIKPDITIQHEKGHQPINTSIHTEGNALADKLATQGSYVVNAGKRTADGSEFEKRTADGSEFESPKKKAKVE

SEQ ID NO: 697 - protein, 2087 aa, synthetic construct
  source 1..2087: note = Description of Artificial Sequence: Synthetic polypeptide
MPAAKRVKLDGGDKKYSIGLDIGTNSVGWAVITDEYKVPSKKFKVLGNTDRHSIKKNLIGALLFDSGETAEATRLKRTARRRYTRRKNRICYLQEIFSNEMAKVDDSFFHRLEESFLVEEDKKHERHPIFGNIVDEVAYHEKYPTIYHLRKKLVDSTDKADLRLIYLALAHMIKFRGHFLIEGDLNPDNSDVDKLFIQLVQTYNQLFEENPINASGVDAKAILSARLSKSRRLENLIAQLPGEKKNGLFGNLIALSLGLTPNFKSNFDLAEDAKLQLSKDTYDDDLDNLLAQIGDQYADLFLAAKNLSDAILLSDILRVNTEITKAPLSASMIKRYDEHHQDLTLLKALVRQQLPEKYKEIFFDQSKNGYAGYIDGGASQEEFYKFIKPILEKMDGTEELLVKLNREDLLRKQRTFDNGSIPHQIHLGELHAILRRQEDFYPFLKDNREKIEKILTFRIPYYVGPLARGNSRFAWMTRKSEETITPWNFEEVVDKGASAQSFIERMTNFDKNLPNEKVLPKHSLLYEYFTVYNELTKVKYVTEGMRKPAFLSGEQKKAIVDLLFKTNRKVTVKQLKEDYFKKIECFDSVEISGVEDRFNASLGTYHDLLKIIKDKDFLDNEENEDILEDIVLTLTLFEDREMIEERLKTYAHLFDDKVMKQLKRRRYTGWGRLSRKLINGIRDKQSGKTILDFLKSDGFANRNFMQLIHDDSLTFKEDIQKAQVSGQGDSLHEHIANLAGSPAIKKGILQTVKVVDELVKVMGRHKPENIVIEMARENQTTQKGQKNSRERMKRIEEGIKELGSQILKEHPVENTQLQNEKLYLYYLQNGRDMYVDQELDINRLSDYDVDHIVPQSFLKDDSIDNKVLTRSDKARGKSDNVPSEEVVKKMKNYWRQLLNAKLITQRKFDNLTKAERGGLSELDKAGFIKRQLVETRQITKHVAQILDSRMNTKYDENDKLIREVKVITLKSKLVSDFRKDFQFYKVREINNYHHAHDAYLNAVVGTALIKKYPKLESEFVYGDYKVYDVRKMIAKSEQEIGKATAKYFFYSNIMNFFKTEITLANGEIRKRPLIETNGETGEIVWDKGRDFATVRKVLSMPQVNIVKKTEVQTGGFSKESILPKRNSDKLIARKKDWDPKKYGGFDSPTVAYSVLVVAKVEKGKSKKLKSVKELLGITIMERSSFEKNPIDFLEAKGYKEVKKDLIIKLPKYSLFELENGRKRMLASAGELQKGNELALPSKYVNFLYLASHYEKLKGSPEDNEQKQLFVEQHKHYLDEIIEQISEFSKRVILADANLDKVLSAYNKHRDKPIREQAENIIHLFTLTNLGAPAAFKYFDTTIDRKRYTSTKEVLDATLIHQSITGLYETRIDLSQLGGDGGGGGEAAAKGGSGGVPWLTQQPLQLTILVPLQEYQDRILNKTALPEEQKQQLKALFTKYDNLWQHWENQVGHRKIRPHNIATGDYPPRPQKQYPINPKAKPSIQIVIDDLLKQGVLTPQNSTMNTPVYPVPKPDGRWRMVLDYREVNKTIPLTAAQNQHSAGILATIVRQKYKTTLDLANGFWAHPITPDSYWLTAFTWQGKQYCWTRLPQGFLNSPALFTADAVDLLKEVPNVQVYVDDIYLSHDNPHEHIQQLEKVFQILLQAGYVVSLKKSEIGQRTVEFLGFNITKEGRGLTDTFKTKLLNVTPPKDLKQLQSILGLLNFARNFIPNFAELVQTLYNLIASSKGKYIEWTEDNTKQLNKVIEALNTASNLEERLPDQRLVIKVNTSPSAGYVRYYNESGKKPIMYLNYVFSKAELKFSMLEKLLTTMHKALIKAMDLAMGQEILVYSPIVSMTKIQKTPLPERKALPIRWITWMTYLEDPRIQFHYDKTLPELKHIPDVYTSSIPPLKHPSQYEGVFCTDGSAIKSPDPTKSNNAGMGIVHAIYNPEYKILNQWSIPLGHHTAQMAEIAAVEFACKKALKVPGPVLVITDSFYVAESANKELPYWKSNGFVNNKKEPLKHISKWKSIAECLSIKPDITIQHEKGHQPINTSIHTEGNALADKLATQGSYVVNAGKRTADGSEFEKRTADGSEFESPKKKAKVE

SEQ ID NO: 698 - protein, 2087 aa, synthetic construct
  source 1..2087: note = Description of Artificial Sequence: Synthetic polypeptide
MPAAKRVKLDGGDKKYSIGLDIGTNSVGWAVITDEYKVPSKKFKVLGNTDRHSIKKNLIGALLFDSGETAEATRLKRTARRRYTRRKNRICYLQEIFSNEMAKVDDSFFHRLEESFLVEEDKKHERHPIFGNIVDEVAYHEKYPTIYHLRKKLVDSTDKADLRLIYLALAHMIKFRGHFLIEGDLNPDNSDVDKLFIQLVQTYNQLFEENPINASGVDAKAILSARLSKSRRLENLIAQLPGEKKNGLFGNLIALSLGLTPNFKSNFDLAEDAKLQLSKDTYDDDLDNLLAQIGDQYADLFLAAKNLSDAILLSDILRVNTEITKAPLSASMIKRYDEHHQDLTLLKALVRQQLPEKYKEIFFDQSKNGYAGYIDGGASQEEFYKFIKPILEKMDGTEELLVKLNREDLLRKQRTFDNGSIPHQIHLGELHAILRRQEDFYPFLKDNREKIEKILTFRIPYYVGPLARGNSRFAWMTRKSEETITPWNFEEVVDKGASAQSFIERMTNFDKNLPNEKVLPKHSLLYEYFTVYNELTKVKYVTEGMRKPAFLSGEQKKAIVDLLFKTNRKVTVKQLKEDYFKKIECFDSVEISGVEDRFNASLGTYHDLLKIIKDKDFLDNEENEDILEDIVLTLTLFEDREMIEERLKTYAHLFDDKVMKQLKRRRYTGWGRLSRKLINGIRDKQSGKTILDFLKSDGFANRNFMQLIHDDSLTFKEDIQKAQVSGQGDSLHEHIANLAGSPAIKKGILQTVKVVDELVKVMGRHKPENIVIEMARENQTTQKGQKNSRERMKRIEEGIKELGSQILKEHPVENTQLQNEKLYLYYLQNGRDMYVDQELDINRLSDYDVDHIVPQSFLKDDSIDNKVLTRSDKARGKSDNVPSEEVVKKMKNYWRQLLNAKLITQRKFDNLTKAERGGLSELDKAGFIKRQLVETRQITKHVAQILDSRMNTKYDENDKLIREVKVITLKSKLVSDFRKDFQFYKVREINNYHHAHDAYLNAVVGTALIKKYPKLESEFVYGDYKVYDVRKMIAKSEQEIGKATAKYFFYSNIMNFFKTEITLANGEIRKRPLIETNGETGEIVWDKGRDFATVRKVLSMPQVNIVKKTEVQTGGFSKESILPKRNSDKLIARKKDWDPKKYGGFDSPTVAYSVLVVAKVEKGKSKKLKSVKELLGITIMERSSFEKNPIDFLEAKGYKEVKKDLIIKLPKYSLFELENGRKRMLASAGELQKGNELALPSKYVNFLYLASHYEKLKGSPEDNEQKQLFVEQHKHYLDEIIEQISEFSKRVILADANLDKVLSAYNKHRDKPIREQAENIIHLFTLTNLGAPAAFKYFDTTIDRKRYTSTKEVLDATLIHQSITGLYETRIDLSQLGGDGGGGGEAAAKGSSGGVPWLTQQPLQLTILVPLQEYQDRILNKTALPEEQKQQLKALFTKYDNLWQHWENQVGHRKIRPHNIATGDYPPRPQKQYPINPKAKPSIQIVIDDLLKQGVLTPQNSTMNTPVYPVPKPDGRWRMVLDYREVNKTIPLTAAQNQHSAGILATIVRQKYKTTLDLANGFWAHPITPDSYWLTAFTWQGKQYCWTRLPQGFLNSPALFTADAVDLLKEVPNVQVYVDDIYLSHDNPHEHIQQLEKVFQILLQAGYVVSLKKSEIGQRTVEFLGFNITKEGRGLTDTFKTKLLNVTPPKDLKQLQSILGLLNFARNFIPNFAELVQTLYNLIASSKGKYIEWTEDNTKQLNKVIEALNTASNLEERLPDQRLVIKVNTSPSAGYVRYYNESGKKPIMYLNYVFSKAELKFSMLEKLLTTMHKALIKAMDLAMGQEILVYSPIVSMTKIQKTPLPERKALPIRWITWMTYLEDPRIQFHYDKTLPELKHIPDVYTSSIPPLKHPSQYEGVFCTDGSAIKSPDPTKSNNAGMGIVHAIYNPEYKILNQWSIPLGHHTAQMAEIAAVEFACKKALKVPGPVLVITDSFYVAESANKELPYWKSNGFVNNKKEPLKHISKWKSIAECLSIKPDITIQHEKGHQPINTSIHTEGNALADKLATQGSYVVNAGKRTADGSEFEKRTADGSEFESPKKKAKVE

SEQ ID NO: 699 - protein, 2087 aa, synthetic construct
  source 1..2087: note = Description of Artificial Sequence: Synthetic polypeptide
MPAAKRVKLDGGDKKYSIGLDIGTNSVGWAVITDEYKVPSKKFKVLGNTDRHSIKKNLIGALLFDSGETAEATRLKRTARRRYTRRKNRICYLQEIFSNEMAKVDDSFFHRLEESFLVEEDKKHERHPIFGNIVDEVAYHEKYPTIYHLRKKLVDSTDKADLRLIYLALAHMIKFRGHFLIEGDLNPDNSDVDKLFIQLVQTYNQLFEENPINASGVDAKAILSARLSKSRRLENLIAQLPGEKKNGLFGNLIALSLGLTPNFKSNFDLAEDAKLQLSKDTYDDDLDNLLAQIGDQYADLFLAAKNLSDAILLSDILRVNTEITKAPLSASMIKRYDEHHQDLTLLKALVRQQLPEKYKEIFFDQSKNGYAGYIDGGASQEEFYKFIKPILEKMDGTEELLVKLNREDLLRKQRTFDNGSIPHQIHLGELHAILRRQEDFYPFLKDNREKIEKILTFRIPYYVGPLARGNSRFAWMTRKSEETITPWNFEEVVDKGASAQSFIERMTNFDKNLPNEKVLPKHSLLYEYFTVYNELTKVKYVTEGMRKPAFLSGEQKKAIVDLLFKTNRKVTVKQLKEDYFKKIECFDSVEISGVEDRFNASLGTYHDLLKIIKDKDFLDNEENEDILEDIVLTLTLFEDREMIEERLKTYAHLFDDKVMKQLKRRRYTGWGRLSRKLINGIRDKQSGKTILDFLKSDGFANRNFMQLIHDDSLTFKEDIQKAQVSGQGDSLHEHIANLAGSPAIKKGILQTVKVVDELVKVMGRHKPENIVIEMARENQTTQKGQKNSRERMKRIEEGIKELGSQILKEHPVENTQLQNEKLYLYYLQNGRDMYVDQELDINRLSDYDVDHIVPQSFLKDDSIDNKVLTRSDKARGKSDNVPSEEVVKKMKNYWRQLLNAKLITQRKFDNLTKAERGGLSELDKAGFIKRQLVETRQITKHVAQILDSRMNTKYDENDKLIREVKVITLKSKLVSDFRKDFQFYKVREINNYHHAHDAYLNAVVGTALIKKYPKLESEFVYGDYKVYDVRKMIAKSEQEIGKATAKYFFYSNIMNFFKTEITLANGEIRKRPLIETNGETGEIVWDKGRDFATVRKVLSMPQVNIVKKTEVQTGGFSKESILPKRNSDKLIARKKDWDPKKYGGFDSPTVAYSVLVVAKVEKGKSKKLKSVKELLGITIMERSSFEKNPIDFLEAKGYKEVKKDLIIKLPKYSLFELENGRKRMLASAGELQKGNELALPSKYVNFLYLASHYEKLKGSPEDNEQKQLFVEQHKHYLDEIIEQISEFSKRVILADANLDKVLSAYNKHRDKPIREQAENIIHLFTLTNLGAPAAFKYFDTTIDRKRYTSTKEVLDATLIHQSITGLYETRIDLSQLGGDGGGSSGGGEAAAKGGVPWLTQQPLQLTILVPLQEYQDRILNKTALPEEQKQQLKALFTKYDNLWQHWENQVGHRKIRPHNIATGDYPPRPQKQYPINPKAKPSIQIVIDDLLKQGVLTPQNSTMNTPVYPVPKPDGRWRMVLDYREVNKTIPLTAAQNQHSAGILATIVRQKYKTTLDLANGFWAHPITPDSYWLTAFTWQGKQYCWTRLPQGFLNSPALFTADAVDLLKEVPNVQVYVDDIYLSHDNPHEHIQQLEKVFQILLQAGYVVSLKKSEIGQRTVEFLGFNITKEGRGLTDTFKTKLLNVTPPKDLKQLQSILGLLNFARNFIPNFAELVQTLYNLIASSKGKYIEWTEDNTKQLNKVIEALNTASNLEERLPDQRLVIKVNTSPSAGYVRYYNESGKKPIMYLNYVFSKAELKFSMLEKLLTTMHKALIKAMDLAMGQEILVYSPIVSMTKIQKTPLPERKALPIRWITWMTYLEDPRIQFHYDKTLPELKHIPDVYTSSIPPLKHPSQYEGVFCTDGSAIKSPDPTKSNNAGMGIVHAIYNPEYKILNQWSIPLGHHTAQMAEIAAVEFACKKALKVPGPVLVITDSFYVAESANKELPYWKSNGFVNNKKEPLKHISKWKSIAECLSIKPDITIQHEKGHQPINTSIHTEGNALADKLATQGSYVVNAGKRTADGSEFEKRTADGSEFESPKKKAKVE

SEQ ID NO: 700 - protein, 2094 aa, synthetic construct
  source 1..2094: note = Description of Artificial Sequence: Synthetic polypeptide
MPAAKRVKLDGGDKKYSIGLDIGTNSVGWAVITDEYKVPSKKFKVLGNTDRHSIKKNLIGALLFDSGETAEATRLKRTARRRYTRRKNRICYLQEIFSNEMAKVDDSFFHRLEESFLVEEDKKHERHPIFGNIVDEVAYHEKYPTIYHLRKKLVDSTDKADLRLIYLALAHMIKFRGHFLIEGDLNPDNSDVDKLFIQLVQTYNQLFEENPINASGVDAKAILSARLSKSRRLENLIAQLPGEKKNGLFGNLIALSLGLTPNFKSNFDLAEDAKLQLSKDTYDDDLDNLLAQIGDQYADLFLAAKNLSDAILLSDILRVNTEITKAPLSASMIKRYDEHHQDLTLLKALVRQQLPEKYKEIFFDQSKNGYAGYIDGGASQEEFYKFIKPILEKMDGTEELLVKLNREDLLRKQRTFDNGSIPHQIHLGELHAILRRQEDFYPFLKDNREKIEKILTFRIPYYVGPLARGNSRFAWMTRKSEETITPWNFEEVVDKGASAQSFIERMTNFDKNLPNEKVLPKHSLLYEYFTVYNELTKVKYVTEGMRKPAFLSGEQKKAIVDLLFKTNRKVTVKQLKEDYFKKIECFDSVEISGVEDRFNASLGTYHDLLKIIKDKDFLDNEENEDILEDIVLTLTLFEDREMIEERLKTYAHLFDDKVMKQLKRRRYTGWGRLSRKLINGIRDKQSGKTILDFLKSDGFANRNFMQLIHDDSLTFKEDIQKAQVSGQGDSLHEHIANLAGSPAIKKGILQTVKVVDELVKVMGRHKPENIVIEMARENQTTQKGQKNSRERMKRIEEGIKELGSQILKEHPVENTQLQNEKLYLYYLQNGRDMYVDQELDINRLSDYDVDHIVPQSFLKDDSIDNKVLTRSDKARGKSDNVPSEEVVKKMKNYWRQLLNAKLITQRKFDNLTKAERGGLSELDKAGFIKRQLVETRQITKHVAQILDSRMNTKYDENDKLIREVKVITLKSKLVSDFRKDFQFYKVREINNYHHAHDAYLNAVVGTALIKKYPKLESEFVYGDYKVYDVRKMIAKSEQEIGKATAKYFFYSNIMNFFKTEITLANGEIRKRPLIETNGETGEIVWDKGRDFATVRKVLSMPQVNIVKKTEVQTGGFSKESILPKRNSDKLIARKKDWDPKKYGGFDSPTVAYSVLVVAKVEKGKSKKLKSVKELLGITIMERSSFEKNPIDFLEAKGYKEVKKDLIIKLPKYSLFELENGRKRMLASAGELQKGNELALPSKYVNFLYLASHYEKLKGSPEDNEQKQLFVEQHKHYLDEIIEQISEFSKRVILADANLDKVLSAYNKHRDKPIREQAENIIHLFTLTNLGAPAAFKYFDTTIDRKRYTSTKEVLDATLIHQSITGLYETRIDLSQLGGDGGGGSGGSGGSGGSGGSGGSGGVPWLTQQPLQLTILVPLQEYQDRILNKTALPEEQKQQLKALFTKYDNLWQHWENQVGHRKIRPHNIATGDYPPRPQKQYPINPKAKPSIQIVIDDLLKQGVLTPQNSTMNTPVYPVPKPDGRWRMVLDYREVNKTIPLTAAQNQHSAGILATIVRQKYKTTLDLANGFWAHPITPDSYWLTAFTWQGKQYCWTRLPQGFLNSPALFNADAVDLLKEVPNVQVYVDDIYLSHDNPHEHIQQLEKVFQILLQAGYVVSLKKSEIGQRTVEFLGFNITKEGRGLTDTFKTKLLNVTPPKDLKQLQSILGLLNFARNFIPNFAELVQTLYNLIASSPGKYIEWTEDNTKQLNKVIEALNTASNLEERLPDQRLVIKVNTSPSAGYVRYYNESGKKPIMYLNYVFSKAELKFSMLEKLLTTMHKALIKAMDLAMGQEILVYSPIVSMTKIQKTPLPERKALPIRWITWMTYLEDPRIQFHYDKTLPELKHIPDVYTSSIPPLKHPSQYEGVFCTDGSAIKSPDPTKSNNAGMGIVHAIYNPEYKILNQWSIPLGHHTAQMAEIAAVEFACKKALKVPGPVLVITDSFYVAESANKELPYWKSNGFVNNKKEPLKHISKWKSIAECLSIKPDITIQHEKGHQPINTSIHTEGNALADKLATQGSYVVNAGKRTADGSEFEKRTADGSEFESPKKKAKVE

SEQ ID NO: 701 - protein, 2091 aa, synthetic construct
  source 1..2091: note = Description of Artificial Sequence: Synthetic polypeptide
MPAAKRVKLDGGDKKYSIGLDIGTNSVGWAVITDEYKVPSKKFKVLGNTDRHSIKKNLIGALLFDSGETAEATRLKRTARRRYTRRKNRICYLQEIFSNEMAKVDDSFFHRLEESFLVEEDKKHERHPIFGNIVDEVAYHEKYPTIYHLRKKLVDSTDKADLRLIYLALAHMIKFRGHFLIEGDLNPDNSDVDKLFIQLVQTYNQLFEENPINASGVDAKAILSARLSKSRRLENLIAQLPGEKKNGLFGNLIALSLGLTPNFKSNFDLAEDAKLQLSKDTYDDDLDNLLAQIGDQYADLFLAAKNLSDAILLSDILRVNTEITKAPLSASMIKRYDEHHQDLTLLKALVRQQLPEKYKEIFFDQSKNGYAGYIDGGASQEEFYKFIKPILEKMDGTEELLVKLNREDLLRKQRTFDNGSIPHQIHLGELHAILRRQEDFYPFLKDNREKIEKILTFRIPYYVGPLARGNSRFAWMTRKSEETITPWNFEEVVDKGASAQSFIERMTNFDKNLPNEKVLPKHSLLYEYFTVYNELTKVKYVTEGMRKPAFLSGEQKKAIVDLLFKTNRKVTVKQLKEDYFKKIECFDSVEISGVEDRFNASLGTYHDLLKIIKDKDFLDNEENEDILEDIVLTLTLFEDREMIEERLKTYAHLFDDKVMKQLKRRRYTGWGRLSRKLINGIRDKQSGKTILDFLKSDGFANRNFMQLIHDDSLTFKEDIQKAQVSGQGDSLHEHIANLAGSPAIKKGILQTVKVVDELVKVMGRHKPENIVIEMARENQTTQKGQKNSRERMKRIEEGIKELGSQILKEHPVENTQLQNEKLYLYYLQNGRDMYVDQELDINRLSDYDVDHIVPQSFLKDDSIDNKVLTRSDKARGKSDNVPSEEVVKKMKNYWRQLLNAKLITQRKFDNLTKAERGGLSELDKAGFIKRQLVETRQITKHVAQILDSRMNTKYDENDKLIREVKVITLKSKLVSDFRKDFQFYKVREINNYHHAHDAYLNAVVGTALIKKYPKLESEFVYGDYKVYDVRKMIAKSEQEIGKATAKYFFYSNIMNFFKTEITLANGEIRKRPLIETNGETGEIVWDKGRDFATVRKVLSMPQVNIVKKTEVQTGGFSKESILPKRNSDKLIARKKDWDPKKYGGFDSPTVAYSVLVVAKVEKGKSKKLKSVKELLGITIMERSSFEKNPIDFLEAKGYKEVKKDLIIKLPKYSLFELENGRKRMLASAGELQKGNELALPSKYVNFLYLASHYEKLKGSPEDNEQKQLFVEQHKHYLDEIIEQISEFSKRVILADANLDKVLSAYNKHRDKPIREQAENIIHLFTLTNLGAPAAFKYFDTTIDRKRYTSTKEVLDATLIHQSITGLYETRIDLSQLGGDGGEAAAKGGGGSEAAAKGGVPWLTQQPLQLTILVPLQEYQDRILNKTALPEEQKQQLKALFTKYDNLWQHWENQVGHRKIRPHNIATGDYPPRPQKQYPINPKAKPSIQIVIDDLLKQGVLTPQNSTMNTPVYPVPKPDGRWRMVLDYREVNKTIPLTAAQNQHSAGILATIVRQKYKTTLDLANGFWAHPITPDSYWLTAFTWQGKQYCWTRLPQGFLNSPALFNADAVDLLKEVPNVQVYVDDIYLSHDNPHEHIQQLEKVFQILLQAGYVVSLKKSEIGQRTVEFLGFNITKEGRGLTDTFKTKLLNVTPPKDLKQLQSILGLLNFARNFIPNFAELVQTLYNLIASSPGKYIEWTEDNTKQLNKVIEALNTASNLEERLPDQRLVIKVNTSPSAGYVRYYNESGKKPIMYLNYVFSKAELKFSMLEKLLTTMHKALIKAMDLAMGQEILVYSPIVSMTKIQKTPLPERKALPIRWITWMTYLEDPRIQFHYDKTLPELKHIPDVYTSSIPPLKHPSQYEGVFCTDGSAIKSPDPTKSNNAGMGIVHAIYNPEYKILNQWSIPLGHHTAQMAEIAAVEFACKKALKVPGPVLVITDSFYVAESANKELPYWKSNGFVNNKKEPLKHISKWKSIAECLSIKPDITIQHEKGHQPINTSIHTEGNALADKLATQGSYVVNAGKRTADGSEFEKRTADGSEFESPKKKAKVE

SEQ ID NO: 702 - protein, 2091 aa, synthetic construct
  source 1..2091: note = Description of Artificial Sequence: Synthetic polypeptide
MPAAKRVKLDGGDKKYSIGLDIGTNSVGWAVITDEYKVPSKKFKVLGNTDRHSIKKNLIGALLFDSGETAEATRLKRTARRRYTRRKNRICYLQEIFSNEMAKVDDSFFHRLEESFLVEEDKKHERHPIFGNIVDEVAYHEKYPTIYHLRKKLVDSTDKADLRLIYLALAHMIKFRGHFLIEGDLNPDNSDVDKLFIQLVQTYNQLFEENPINASGVDAKAILSARLSKSRRLENLIAQLPGEKKNGLFGNLIALSLGLTPNFKSNFDLAEDAKLQLSKDTYDDDLDNLLAQIGDQYADLFLAAKNLSDAILLSDILRVNTEITKAPLSASMIKRYDEHHQDLTLLKALVRQQLPEKYKEIFFDQSKNGYAGYIDGGASQEEFYKFIKPILEKMDGTEELLVKLNREDLLRKQRTFDNGSIPHQIHLGELHAILRRQEDFYPFLKDNREKIEKILTFRIPYYVGPLARGNSRFAWMTRKSEETITPWNFEEVVDKGASAQSFIERMTNFDKNLPNEKVLPKHSLLYEYFTVYNELTKVKYVTEGMRKPAFLSGEQKKAIVDLLFKTNRKVTVKQLKEDYFKKIECFDSVEISGVEDRFNASLGTYHDLLKIIKDKDFLDNEENEDILEDIVLTLTLFEDREMIEERLKTYAHLFDDKVMKQLKRRRYTGWGRLSRKLINGIRDKQSGKTILDFLKSDGFANRNFMQLIHDDSLTFKEDIQKAQVSGQGDSLHEHIANLAGSPAIKKGILQTVKVVDELVKVMGRHKPENIVIEMARENQTTQKGQKNSRERMKRIEEGIKELGSQILKEHPVENTQLQNEKLYLYYLQNGRDMYVDQELDINRLSDYDVDHIVPQSFLKDDSIDNKVLTRSDKARGKSDNVPSEEVVKKMKNYWRQLLNAKLITQRKFDNLTKAERGGLSELDKAGFIKRQLVETRQITKHVAQILDSRMNTKYDENDKLIREVKVITLKSKLVSDFRKDFQFYKVREINNYHHAHDAYLNAVVGTALIKKYPKLESEFVYGDYKVYDVRKMIAKSEQEIGKATAKYFFYSNIMNFFKTEITLANGEIRKRPLIETNGETGEIVWDKGRDFATVRKVLSMPQVNIVKKTEVQTGGFSKESILPKRNSDKLIARKKDWDPKKYGGFDSPTVAYSVLVVAKVEKGKSKKLKSVKELLGITIMERSSFEKNPIDFLEAKGYKEVKKDLIIKLPKYSLFELENGRKRMLASAGELQKGNELALPSKYVNFLYLASHYEKLKGSPEDNEQKQLFVEQHKHYLDEIIEQISEFSKRVILADANLDKVLSAYNKHRDKPIREQAENIIHLFTLTNLGAPAAFKYFDTTIDRKRYTSTKEVLDATLIHQSITGLYETRIDLSQLGGDGGGGSGGSGGSGGSGGSGGVPWLTQQPLQLTILVPLQEYQDRILNKTALPEEQKQQLKALFTKYDNLWQHWENQVGHRKIRPHNIATGDYPPRPQKQYPINPKAKPSIQIVIDDLLKQGVLTPQNSTMNTPVYPVPKPDGRWRMVLDYREVNKTIPLTAAQNQHSAGILATIVRQKYKTTLDLANGFWAHPITPDSYWLTAFTWQGKQYCWTRLPQGFLNSPALFNADAVDLLKEVPNVQVYVDDIYLSHDNPHEHIQQLEKVFQILLQAGYVVSLKKSEIGQRTVEFLGFNITKEGRGLTDTFKTKLLNVTPPKDLKQLQSILGLLNFARNFIPNFAELVQTLYNLIASSPGKYIEWTEDNTKQLNKVIEALNTASNLEERLPDQRLVIKVNTSPSAGYVRYYNESGKKPIMYLNYVFSKAELKFSMLEKLLTTMHKALIKAMDLAMGQEILVYSPIVSMTKIQKTPLPERKALPIRWITWMTYLEDPRIQFHYDKTLPELKHIPDVYTSSIPPLKHPSQYEGVFCTDGSAIKSPDPTKSNNAGMGIVHAIYNPEYKILNQWSIPLGHHTAQMAEIAAVEFACKKALKVPGPVLVITDSFYVAESANKELPYWKSNGFVNNKKEPLKHISKWKSIAECLSIKPDITIQHEKGHQPINTSIHTEGNALADKLATQGSYVVNAGKRTADGSEFEKRTADGSEFESPKKKAKVE

SEQ ID NO: 703 - protein, 2082 aa, synthetic construct
  source 1..2082: note = Description of Artificial Sequence: Synthetic polypeptide
MPAAKRVKLDGGDKKYSIGLDIGTNSVGWAVITDEYKVPSKKFKVLGNTDRHSIKKNLIGALLFDSGETAEATRLKRTARRRYTRRKNRICYLQEIFSNEMAKVDDSFFHRLEESFLVEEDKKHERHPIFGNIVDEVAYHEKYPTIYHLRKKLVDSTDKADLRLIYLALAHMIKFRGHFLIEGDLNPDNSDVDKLFIQLVQTYNQLFEENPINASGVDAKAILSARLSKSRRLENLIAQLPGEKKNGLFGNLIALSLGLTPNFKSNFDLAEDAKLQLSKDTYDDDLDNLLAQIGDQYADLFLAAKNLSDAILLSDILRVNTEITKAPLSASMIKRYDEHHQDLTLLKALVRQQLPEKYKEIFFDQSKNGYAGYIDGGASQEEFYKFIKPILEKMDGTEELLVKLNREDLLRKQRTFDNGSIPHQIHLGELHAILRRQEDFYPFLKDNREKIEKILTFRIPYYVGPLARGNSRFAWMTRKSEETITPWNFEEVVDKGASAQSFIERMTNFDKNLPNEKVLPKHSLLYEYFTVYNELTKVKYVTEGMRKPAFLSGEQKKAIVDLLFKTNRKVTVKQLKEDYFKKIECFDSVEISGVEDRFNASLGTYHDLLKIIKDKDFLDNEENEDILEDIVLTLTLFEDREMIEERLKTYAHLFDDKVMKQLKRRRYTGWGRLSRKLINGIRDKQSGKTILDFLKSDGFANRNFMQLIHDDSLTFKEDIQKAQVSGQGDSLHEHIANLAGSPAIKKGILQTVKVVDELVKVMGRHKPENIVIEMARENQTTQKGQKNSRERMKRIEEGIKELGSQILKEHPVENTQLQNEKLYLYYLQNGRDMYVDQELDINRLSDYDVDHIVPQSFLKDDSIDNKVLTRSDKARGKSDNVPSEEVVKKMKNYWRQLLNAKLITQRKFDNLTKAERGGLSELDKAGFIKRQLVETRQITKHVAQILDSRMNTKYDENDKLIREVKVITLKSKLVSDFRKDFQFYKVREINNYHHAHDAYLNAVVGTALIKKYPKLESEFVYGDYKVYDVRKMIAKSEQEIGKATAKYFFYSNIMNFFKTEITLANGEIRKRPLIETNGETGEIVWDKGRDFATVRKVLSMPQVNIVKKTEVQTGGFSKESILPKRNSDKLIARKKDWDPKKYGGFDSPTVAYSVLVVAKVEKGKSKKLKSVKELLGITIMERSSFEKNPIDFLEAKGYKEVKKDLIIKLPKYSLFELENGRKRMLASAGELQKGNELALPSKYVNFLYLASHYEKLKGSPEDNEQKQLFVEQHKHYLDEIIEQISEFSKRVILADANLDKVLSAYNKHRDKPIREQAENIIHLFTLTNLGAPAAFKYFDTTIDRKRYTSTKEVLDATLIHQSITGLYETRIDLSQLGGDGGGSSGGSGGVPWLTQQPLQLTILVPLQEYQDRILNKTALPEEQKQQLKALFTKYDNLWQHWENQVGHRKIRPHNIATGDYPPRPQKQYPINPKAKPSIQIVIDDLLKQGVLTPQNSTMNTPVYPVPKPDGRWRMVLDYREVNKTIPLTAAQNQHSAGILATIVRQKYKTTLDLANGFWAHPITPDSYWLTAFTWQGKQYCWTRLPQGFLNSPALFNADAVDLLKEVPNVQVYVDDIYLSHDNPHEHIQQLEKVFQILLQAGYVVSLKKSEIGQRTVEFLGFNITKEGRGLTDTFKTKLLNVTPPKDLKQLQSILGLLNFARNFIPNFAELVQTLYNLIASSPGKYIEWTEDNTKQLNKVIEALNTASNLEERLPDQRLVIKVNTSPSAGYVRYYNESGKKPIMYLNYVFSKAELKFSMLEKLLTTMHKALIKAMDLAMGQEILVYSPIVSMTKIQKTPLPERKALPIRWITWMTYLEDPRIQFHYDKTLPELKHIPDVYTSSIPPLKHPSQYEGVFCTDGSAIKSPDPTKSNNAGMGIVHAIYNPEYKILNQWSIPLGHHTAQMAEIAAVEFACKKALKVPGPVLVITDSFYVAESANKELPYWKSNGFVNNKKEPLKHISKWKSIAECLSIKPDITIQHEKGHQPINTSIHTEGNALADKLATQGSYVVNAGKRTADGSEFEKRTADGSEFESPKKKAKVE

SEQ ID NO: 704 - protein, 2092 aa, synthetic construct
  source 1..2092: note = Description of Artificial Sequence: Synthetic polypeptide
MPAAKRVKLDGGDKKYSIGLDIGTNSVGWAVITDEYKVPSKKFKVLGNTDRHSIKKNLIGALLFDSGETAEATRLKRTARRRYTRRKNRICYLQEIFSNEMAKVDDSFFHRLEESFLVEEDKKHERHPIFGNIVDEVAYHEKYPTIYHLRKKLVDSTDKADLRLIYLALAHMIKFRGHFLIEGDLNPDNSDVDKLFIQLVQTYNQLFEENPINASGVDAKAILSARLSKSRRLENLIAQLPGEKKNGLFGNLIALSLGLTPNFKSNFDLAEDAKLQLSKDTYDDDLDNLLAQIGDQYADLFLAAKNLSDAILLSDILRVNTEITKAPLSASMIKRYDEHHQDLTLLKALVRQQLPEKYKEIFFDQSKNGYAGYIDGGASQEEFYKFIKPILEKMDGTEELLVKLNREDLLRKQRTFDNGSIPHQIHLGELHAILRRQEDFYPFLKDNREKIEKILTFRIPYYVGPLARGNSRFAWMTRKSEETITPWNFEEVVDKGASAQSFIERMTNFDKNLPNEKVLPKHSLLYEYFTVYNELTKVKYVTEGMRKPAFLSGEQKKAIVDLLFKTNRKVTVKQLKEDYFKKIECFDSVEISGVEDRFNASLGTYHDLLKIIKDKDFLDNEENEDILEDIVLTLTLFEDREMIEERLKTYAHLFDDKVMKQLKRRRYTGWGRLSRKLINGIRDKQSGKTILDFLKSDGFANRNFMQLIHDDSLTFKEDIQKAQVSGQGDSLHEHIANLAGSPAIKKGILQTVKVVDELVKVMGRHKPENIVIEMARENQTTQKGQKNSRERMKRIEEGIKELGSQILKEHPVENTQLQNEKLYLYYLQNGRDMYVDQELDINRLSDYDVDHIVPQSFLKDDSIDNKVLTRSDKARGKSDNVPSEEVVKKMKNYWRQLLNAKLITQRKFDNLTKAERGGLSELDKAGFIKRQLVETRQITKHVAQILDSRMNTKYDENDKLIREVKVITLKSKLVSDFRKDFQFYKVREINNYHHAHDAYLNAVVGTALIKKYPKLESEFVYGDYKVYDVRKMIAKSEQEIGKATAKYFFYSNIMNFFKTEITLANGEIRKRPLIETNGETGEIVWDKGRDFATVRKVLSMPQVNIVKKTEVQTGGFSKESILPKRNSDKLIARKKDWDPKKYGGFDSPTVAYSVLVVAKVEKGKSKKLKSVKELLGITIMERSSFEKNPIDFLEAKGYKEVKKDLIIKLPKYSLFELENGRKRMLASAGELQKGNELALPSKYVNFLYLASHYEKLKGSPEDNEQKQLFVEQHKHYLDEIIEQISEFSKRVILADANLDKVLSAYNKHRDKPIREQAENIIHLFTLTNLGAPAAFKYFDTTIDRKRYTSTKEVLDATLIHQSITGLYETRIDLSQLGGDGGSGSETPGTSESATPESGGVPWLTQQPLQLTILVPLQEYQDRILNKTALPEEQKQQLKALFTKYDNLWQHWENQVGHRKIRPHNIATGDYPPRPQKQYPINPKAKPSIQIVIDDLLKQGVLTPQNSTMNTPVYPVPKPDGRWRMVLDYREVNKTIPLTAAQNQHSAGILATIVRQKYKTTLDLANGFWAHPITPDSYWLTAFTWQGKQYCWTRLPQGFLNSPALFNADAVDLLKEVPNVQVYVDDIYLSHDNPHEHIQQLEKVFQILLQAGYVVSLKKSEIGQRTVEFLGFNITKEGRGLTDTFKTKLLNVTPPKDLKQLQSILGKLNFARNFIPNFAELVQTLYNLIASSPGKYIEWTEDNTKQLNKVIEALNTASNLEERLPDQRLVIKVNTSPSAGYVRYYNESGKKPIMYLNYVFSKAELKFSMLEKLLTTMHKALIKAMDLAMGQEILVYSPIVSMTKIQKTPLPERKALPIRWITWMTYLEDPRIQFHYDKTLPELKHIPDVYTSSIPPLKHPSQYEGVFCTDGSAIKSPDPTKSNNAGMGIVHAIYNPEYKILNQWSIPLGHHTAQMAEIAAVEFACKKALKVPGPVLVITDSFYVAESANKELPYWKSNGFVNNKKEPLKHISKWKSIAECLSIKPDITIQHEKGHQPINTSIHTEGNALADKLATQGSYVVNAGKRTADGSEFEKRTADGSEFESPKKKAKVE

SEQ ID NO: 705 - protein, 2087 aa, synthetic construct
  source 1..2087: note = Description of Artificial Sequence: Synthetic polypeptide
MPAAKRVKLDGGDKKYSIGLDIGTNSVGWAVITDEYKVPSKKFKVLGNTDRHSIKKNLIGALLFDSGETAEATRLKRTARRRYTRRKNRICYLQEIFSNEMAKVDDSFFHRLEESFLVEEDKKHERHPIFGNIVDEVAYHEKYPTIYHLRKKLVDSTDKADLRLIYLALAHMIKFRGHFLIEGDLNPDNSDVDKLFIQLVQTYNQLFEENPINASGVDAKAILSARLSKSRRLENLIAQLPGEKKNGLFGNLIALSLGLTPNFKSNFDLAEDAKLQLSKDTYDDDLDNLLAQIGDQYADLFLAAKNLSDAILLSDILRVNTEITKAPLSASMIKRYDEHHQDLTLLKALVRQQLPEKYKEIFFDQSKNGYAGYIDGGASQEEFYKFIKPILEKMDGTEELLVKLNREDLLRKQRTFDNGSIPHQIHLGELHAILRRQEDFYPFLKDNREKIEKILTFRIPYYVGPLARGNSRFAWMTRKSEETITPWNFEEVVDKGASAQSFIERMTNFDKNLPNEKVLPKHSLLYEYFTVYNELTKVKYVTEGMRKPAFLSGEQKKAIVDLLFKTNRKVTVKQLKEDYFKKIECFDSVEISGVEDRFNASLGTYHDLLKIIKDKDFLDNEENEDILEDIVLTLTLFEDREMIEERLKTYAHLFDDKVMKQLKRRRYTGWGRLSRKLINGIRDKQSGKTILDFLKSDGFANRNFMQLIHDDSLTFKEDIQKAQVSGQGDSLHEHIANLAGSPAIKKGILQTVKVVDELVKVMGRHKPENIVIEMARENQTTQKGQKNSRERMKRIEEGIKELGSQILKEHPVENTQLQNEKLYLYYLQNGRDMYVDQELDINRLSDYDVDHIVPQSFLKDDSIDNKVLTRSDKARGKSDNVPSEEVVKKMKNYWRQLLNAKLITQRKFDNLTKAERGGLSELDKAGFIKRQLVETRQITKHVAQILDSRMNTKYDENDKLIREVKVITLKSKLVSDFRKDFQFYKVREINNYHHAHDAYLNAVVGTALIKKYPKLESEFVYGDYKVYDVRKMIAKSEQEIGKATAKYFFYSNIMNFFKTEITLANGEIRKRPLIETNGETGEIVWDKGRDFATVRKVLSMPQVNIVKKTEVQTGGFSKESILPKRNSDKLIARKKDWDPKKYGGFDSPTVAYSVLVVAKVEKGKSKKLKSVKELLGITIMERSSFEKNPIDFLEAKGYKEVKKDLIIKLPKYSLFELENGRKRMLASAGELQKGNELALPSKYVNFLYLASHYEKLKGSPEDNEQKQLFVEQHKHYLDEIIEQISEFSKRVILADANLDKVLSAYNKHRDKPIREQAENIIHLFTLTNLGAPAAFKYFDTTIDRKRYTSTKEVLDATLIHQSITGLYETRIDLSQLGGDGGPAPAPAPAPAPGGVPWLTQQPLQLTILVPLQEYQDRILNKTALPEEQKQQLKALFTKYDNLWQHWENQVGHRKIRPHNIATGDYPPRPQKQYPINPKAKPSIQIVIDDLLKQGVLTPQNSTMNTPVYPVPKPDGRWRMVLDYREVNKTIPLTAAQNQHSAGILATIVRQKYKTTLDLANGFWAHPITPDSYWLTAFTWQGKQYCWTRLPQGFLNSPALFNADAVDLLKEVPNVQVYVDDIYLSHDNPHEHIQQLEKVFQILLQAGYVVSLKKSEIGQRTVEFLGFNITKEGRGLTDTFKTKLLNVTPPKDLKQLQSILGKLNFARNFIPNFAELVQTLYNLIASSPGKYIEWTEDNTKQLNKVIEALNTASNLEERLPDQRLVIKVNTSPSAGYVRYYNESGKKPIMYLNYVFSKAELKFSMLEKLLTTMHKALIKAMDLAMGQEILVYSPIVSMTKIQKTPLPERKALPIRWITWMTYLEDPRIQFHYDKTLPELKHIPDVYTSSIPPLKHPSQYEGVFCTDGSAIKSPDPTKSNNAGMGIVHAIYNPEYKILNQWSIPLGHHTAQMAEIAAVEFACKKALKVPGPVLVITDSFYVAESANKELPYWKSNGFVNNKKEPLKHISKWKSIAECLSIKPDITIQHEKGHQPINTSIHTEGNALADKLATQGSYVVNAGKRTADGSEFEKRTADGSEFESPKKKAKVE

SEQ ID NO: 706 - protein, 2085 aa, synthetic construct
  source 1..2085: note = Description of Artificial Sequence: Synthetic polypeptide
MPAAKRVKLDGGDKKYSIGLDIGTNSVGWAVITDEYKVPSKKFKVLGNTDRHSIKKNLIGALLFDSGETAEATRLKRTARRRYTRRKNRICYLQEIFSNEMAKVDDSFFHRLEESFLVEEDKKHERHPIFGNIVDEVAYHEKYPTIYHLRKKLVDSTDKADLRLIYLALAHMIKFRGHFLIEGDLNPDNSDVDKLFIQLVQTYNQLFEENPINASGVDAKAILSARLSKSRRLENLIAQLPGEKKNGLFGNLIALSLGLTPNFKSNFDLAEDAKLQLSKDTYDDDLDNLLAQIGDQYADLFLAAKNLSDAILLSDILRVNTEITKAPLSASMIKRYDEHHQDLTLLKALVRQQLPEKYKEIFFDQSKNGYAGYIDGGASQEEFYKFIKPILEKMDGTEELLVKLNREDLLRKQRTFDNGSIPHQIHLGELHAILRRQEDFYPFLKDNREKIEKILTFRIPYYVGPLARGNSRFAWMTRKSEETITPWNFEEVVDKGASAQSFIERMTNFDKNLPNEKVLPKHSLLYEYFTVYNELTKVKYVTEGMRKPAFLSGEQKKAIVDLLFKTNRKVTVKQLKEDYFKKIECFDSVEISGVEDRFNASLGTYHDLLKIIKDKDFLDNEENEDILEDIVLTLTLFEDREMIEERLKTYAHLFDDKVMKQLKRRRYTGWGRLSRKLINGIRDKQSGKTILDFLKSDGFANRNFMQLIHDDSLTFKEDIQKAQVSGQGDSLHEHIANLAGSPAIKKGILQTVKVVDELVKVMGRHKPENIVIEMARENQTTQKGQKNSRERMKRIEEGIKELGSQILKEHPVENTQLQNEKLYLYYLQNGRDMYVDQELDINRLSDYDVDHIVPQSFLKDDSIDNKVLTRSDKARGKSDNVPSEEVVKKMKNYWRQLLNAKLITQRKFDNLTKAERGGLSELDKAGFIKRQLVETRQITKHVAQILDSRMNTKYDENDKLIREVKVITLKSKLVSDFRKDFQFYKVREINNYHHAHDAYLNAVVGTALIKKYPKLESEFVYGDYKVYDVRKMIAKSEQEIGKATAKYFFYSNIMNFFKTEITLANGEIRKRPLIETNGETGEIVWDKGRDFATVRKVLSMPQVNIVKKTEVQTGGFSKESILPKRNSDKLIARKKDWDPKKYGGFDSPTVAYSVLVVAKVEKGKSKKLKSVKELLGITIMERSSFEKNPIDFLEAKGYKEVKKDLIIKLPKYSLFELENGRKRMLASAGELQKGNELALPSKYVNFLYLASHYEKLKGSPEDNEQKQLFVEQHKHYLDEIIEQISEFSKRVILADANLDKVLSAYNKHRDKPIREQAENIIHLFTLTNLGAPAAFKYFDTTIDRKRYTSTKEVLDATLIHQSITGLYETRIDLSQLGGDGGPAPGGGGSSGGVPWLTQQPLQLTILVPLQEYQDRILNKTALPEEQKQQLKALFTKYDNLWQHWENQVGHRKIRPHNIATGDYPPRPQKQYPINPKAKPSIQIVIDDLLKQGVLTPQNSTMNTPVYPVPKPDGRWRMVLDYREVNKTIPLTAAQNQHSAGILATIVRQKYKTTLDLANGFWAHPITPDSYWLTAFTWQGKQYCWTRLPQGFLNSPALFNADAVDLLKEVPNVQVYVDDIYLSHDNPHEHIQQLEKVFQILLQAGYVVSLKKSEIGQRTVEFLGFNITKEGRGLTDTFKTKLLNVTPPKDLKQLQSILGKLNFARNFIPNFAELVQTLYNLIASSPGKYIEWTEDNTKQLNKVIEALNTASNLEERLPDQRLVIKVNTSPSAGYVRYYNESGKKPIMYLNYVFSKAELKFSMLEKLLTTMHKALIKAMDLAMGQEILVYSPIVSMTKIQKTPLPERKALPIRWITWMTYLEDPRIQFHYDKTLPELKHIPDVYTSSIPPLKHPSQYEGVFCTDGSAIKSPDPTKSNNAGMGIVHAIYNPEYKILNQWSIPLGHHTAQMAEIAAVEFACKKALKVPGPVLVITDSFYVAESANKELPYWKSNGFVNNKKEPLKHISKWKSIAECLSIKPDITIQHEKGHQPINTSIHTEGNALADKLATQGSYVVNAGKRTADGSEFEKRTADGSEFESPKKKAKVE

SEQ ID NO: 707 - protein, 2168 aa, synthetic construct
  source 1..2168: note = Description of Artificial Sequence: Synthetic polypeptide
MPAAKRVKLDGGDKKYSIGLDIGTNSVGWAVITDEYKVPSKKFKVLGNTDRHSIKKNLIGALLFDSGETAEATRLKRTARRRYTRRKNRICYLQEIFSNEMAKVDDSFFHRLEESFLVEEDKKHERHPIFGNIVDEVAYHEKYPTIYHLRKKLVDSTDKADLRLIYLALAHMIKFRGHFLIEGDLNPDNSDVDKLFIQLVQTYNQLFEENPINASGVDAKAILSARLSKSRRLENLIAQLPGEKKNGLFGNLIALSLGLTPNFKSNFDLAEDAKLQLSKDTYDDDLDNLLAQIGDQYADLFLAAKNLSDAILLSDILRVNTEITKAPLSASMIKRYDEHHQDLTLLKALVRQQLPEKYKEIFFDQSKNGYAGYIDGGASQEEFYKFIKPILEKMDGTEELLVKLNREDLLRKQRTFDNGSIPHQIHLGELHAILRRQEDFYPFLKDNREKIEKILTFRIPYYVGPLARGNSRFAWMTRKSEETITPWNFEEVVDKGASAQSFIERMTNFDKNLPNEKVLPKHSLLYEYFTVYNELTKVKYVTEGMRKPAFLSGEQKKAIVDLLFKTNRKVTVKQLKEDYFKKIECFDSVEISGVEDRFNASLGTYHDLLKIIKDKDFLDNEENEDILEDIVLTLTLFEDREMIEERLKTYAHLFDDKVMKQLKRRRYTGWGRLSRKLINGIRDKQSGKTILDFLKSDGFANRNFMQLIHDDSLTFKEDIQKAQVSGQGDSLHEHIANLAGSPAIKKGILQTVKVVDELVKVMGRHKPENIVIEMARENQTTQKGQKNSRERMKRIEEGIKELGSQILKEHPVENTQLQNEKLYLYYLQNGRDMYVDQELDINRLSDYDVDHIVPQSFLKDDSIDNKVLTRSDKARGKSDNVPSEEVVKKMKNYWRQLLNAKLITQRKFDNLTKAERGGLSELDKAGFIKRQLVETRQITKHVAQILDSRMNTKYDENDKLIREVKVITLKSKLVSDFRKDFQFYKVREINNYHHAHDAYLNAVVGTALIKKYPKLESEFVYGDYKVYDVRKMIAKSEQEIGKATAKYFFYSNIMNFFKTEITLANGEIRKRPLIETNGETGEIVWDKGRDFATVRKVLSMPQVNIVKKTEVQTGGFSKESILPKRNSDKLIARKKDWDPKKYGGFDSPTVAYSVLVVAKVEKGKSKKLKSVKELLGITIMERSSFEKNPIDFLEAKGYKEVKKDLIIKLPKYSLFELENGRKRMLASAGELQKGNELALPSKYVNFLYLASHYEKLKGSPEDNEQKQLFVEQHKHYLDEIIEQISEFSKRVILADANLDKVLSAYNKHRDKPIREQAENIIHLFTLTNLGAPAAFKYFDTTIDRKRYTSTKEVLDATLIHQSITGLYETRIDLSQLGGDGGGSSGGMNPLQLLQPLPAEVKGTKLLAHWNSGATITCIPESFLEDEQPIKQTLIKTIHGEKQQNVYYLTFKVKGRKVEAEVIASPYEYILLSPTDVPWLTQQPLQLTILVPLQEYQDRILNKTALPEEQKQQLKALFTKYDNLWQHWENQVGHRKIRPHNIATGDYPPRPQKQYPINPKAKPSIQIVIDDLLKQGVLTPQNSTMNTPVYPVPKPDGRWRMVLDYREVNKTIPLTAAQNQHSAGILATIVRQKYKTTLDLANGFWAHPITPDSYWLTAFTWQGKQYCWTRLPQGFLNSPALFNADAVDLLKEVPNVQVYVDDIYLSHDNPHEHIQQLEKVFQILLQAGYVVSLKKSEIGQRTVEFLGFNITKEGRGLTDTFKTKLLNVTPPKDLKQLQSILGLLNFARNFIPNFAELVQTLYNLIASSPGKYIEWTEDNTKQLNKVIEALNTASNLEERLPDQRLVIKVNTSPSAGYVRYYNESGKKPIMYLNYVFSKAELKFSMLEKLLTTMHKALIKAMDLAMGQEILVYSPIVSMTKIQKTPLPERKALPIRWITWMTYLEDPRIQFHYDKTLPELKHIPDVYTSSIPPLKHPSQYEGVFCTDGSAIKSPDPTKSNNAGMGIVHAIYNPEYKILNQWSIPLGHHTAQMAEIAAVEFACKKALKVPGPVLVITDSFYVAESANKELPYWKSNGFVNNKKEPLKHISKWKSIAECLSIKPDITIQHEKGHQPINTSIHTEGNALADKLATQGSYVVNAGKRTADGSEFEKRTADGSEFESPKKKAKVE

SEQ ID NO: 708 - protein, 2174 aa, synthetic construct
  source 1..2174: note = Description of Artificial Sequence: Synthetic polypeptide
MPAAKRVKLDGGDKKYSIGLDIGTNSVGWAVITDEYKVPSKKFKVLGNTDRHSIKKNLIGALLFDSGETAEATRLKRTARRRYTRRKNRICYLQEIFSNEMAKVDDSFFHRLEESFLVEEDKKHERHPIFGNIVDEVAYHEKYPTIYHLRKKLVDSTDKADLRLIYLALAHMIKFRGHFLIEGDLNPDNSDVDKLFIQLVQTYNQLFEENPINASGVDAKAILSARLSKSRRLENLIAQLPGEKKNGLFGNLIALSLGLTPNFKSNFDLAEDAKLQLSKDTYDDDLDNLLAQIGDQYADLFLAAKNLSDAILLSDILRVNTEITKAPLSASMIKRYDEHHQDLTLLKALVRQQLPEKYKEIFFDQSKNGYAGYIDGGASQEEFYKFIKPILEKMDGTEELLVKLNREDLLRKQRTFDNGSIPHQIHLGELHAILRRQEDFYPFLKDNREKIEKILTFRIPYYVGPLARGNSRFAWMTRKSEETITPWNFEEVVDKGASAQSFIERMTNFDKNLPNEKVLPKHSLLYEYFTVYNELTKVKYVTEGMRKPAFLSGEQKKAIVDLLFKTNRKVTVKQLKEDYFKKIECFDSVEISGVEDRFNASLGTYHDLLKIIKDKDFLDNEENEDILEDIVLTLTLFEDREMIEERLKTYAHLFDDKVMKQLKRRRYTGWGRLSRKLINGIRDKQSGKTILDFLKSDGFANRNFMQLIHDDSLTFKEDIQKAQVSGQGDSLHEHIANLAGSPAIKKGILQTVKVVDELVKVMGRHKPENIVIEMARENQTTQKGQKNSRERMKRIEEGIKELGSQILKEHPVENTQLQNEKLYLYYLQNGRDMYVDQELDINRLSDYDVDHIVPQSFLKDDSIDNKVLTRSDKARGKSDNVPSEEVVKKMKNYWRQLLNAKLITQRKFDNLTKAERGGLSELDKAGFIKRQLVETRQITKHVAQILDSRMNTKYDENDKLIREVKVITLKSKLVSDFRKDFQFYKVREINNYHHAHDAYLNAVVGTALIKKYPKLESEFVYGDYKVYDVRKMIAKSEQEIGKATAKYFFYSNIMNFFKTEITLANGEIRKRPLIETNGETGEIVWDKGRDFATVRKVLSMPQVNIVKKTEVQTGGFSKESILPKRNSDKLIARKKDWDPKKYGGFDSPTVAYSVLVVAKVEKGKSKKLKSVKELLGITIMERSSFEKNPIDFLEAKGYKEVKKDLIIKLPKYSLFELENGRKRMLASAGELQKGNELALPSKYVNFLYLASHYEKLKGSPEDNEQKQLFVEQHKHYLDEIIEQISEFSKRVILADANLDKVLSAYNKHRDKPIREQAENIIHLFTLTNLGAPAAFKYFDTTIDRKRYTSTKEVLDATLIHQSITGLYETRIDLSQLGGDGGGGGPAPGSSGGMNPLQLLQPLPAEVKGTKLLAHWNSGATITCIPESFLEDEQPIKQTLIKTIHGEKQQNVYYLTFKVKGRKVEAEVIASPYEYILLSPTDVPWLTQQPLQLTILVPLQEYQDRILNKTALPEEQKQQLKALFTKYDNLWQHWENQVGHRKIRPHNIATGDYPPRPQKQYPINPKAKPSIQIVIDDLLKQGVLTPQNSTMNTPVYPVPKPDGRWRMVLDYREVNKTIPLTAAQNQHSAGILATIVRQKYKTTLDLANGFWAHPITPDSYWLTAFTWQGKQYCWTRLPQGFLNSPALFNADAVDLLKEVPNVQVYVDDIYLSHDNPHEHIQQLEKVFQILLQAGYVVSLKKSEIGQRTVEFLGFNITKEGRGLTDTFKTKLLNVTPPKDLKQLQSILGLLNFARNFIPNFAELVQTLYNLIASSPGKYIEWTEDNTKQLNKVIEALNTASNLEERLPDQRLVIKVNTSPSAGYVRYYNESGKKPIMYLNYVFSKAELKFSMLEKLLTTMHKALIKAMDLAMGQEILVYSPIVSMTKIQKTPLPERKALPIRWITWMTYLEDPRIQFHYDKTLPELKHIPDVYTSSIPPLKHPSQYEGVFCTDGSAIKSPDPTKSNNAGMGIVHAIYNPEYKILNQWSIPLGHHTAQMAEIAAVEFACKKALKVPGPVLVITDSFYVAESANKELPYWKSNGFVNNKKEPLKHISKWKSIAECLSIKPDITIQHEKGHQPINTSIHTEGNALADKLATQGSYVVNAGKRTADGSEFEKRTADGSEFESPKKKAKVE

SEQ ID NO: 709 - protein, 2176 aa, synthetic construct
  source 1..2176: note = Description of Artificial Sequence: Synthetic polypeptide
MPAAKRVKLDGGDKKYSIGLDIGTNSVGWAVITDEYKVPSKKFKVLGNTDRHSIKKNLIGALLFDSGETAEATRLKRTARRRYTRRKNRICYLQEIFSNEMAKVDDSFFHRLEESFLVEEDKKHERHPIFGNIVDEVAYHEKYPTIYHLRKKLVDSTDKADLRLIYLALAHMIKFRGHFLIEGDLNPDNSDVDKLFIQLVQTYNQLFEENPINASGVDAKAILSARLSKSRRLENLIAQLPGEKKNGLFGNLIALSLGLTPNFKSNFDLAEDAKLQLSKDTYDDDLDNLLAQIGDQYADLFLAAKNLSDAILLSDILRVNTEITKAPLSASMIKRYDEHHQDLTLLKALVRQQLPEKYKEIFFDQSKNGYAGYIDGGASQEEFYKFIKPILEKMDGTEELLVKLNREDLLRKQRTFDNGSIPHQIHLGELHAILRRQEDFYPFLKDNREKIEKILTFRIPYYVGPLARGNSRFAWMTRKSEETITPWNFEEVVDKGASAQSFIERMTNFDKNLPNEKVLPKHSLLYEYFTVYNELTKVKYVTEGMRKPAFLSGEQKKAIVDLLFKTNRKVTVKQLKEDYFKKIECFDSVEISGVEDRFNASLGTYHDLLKIIKDKDFLDNEENEDILEDIVLTLTLFEDREMIEERLKTYAHLFDDKVMKQLKRRRYTGWGRLSRKLINGIRDKQSGKTILDFLKSDGFANRNFMQLIHDDSLTFKEDIQKAQVSGQGDSLHEHIANLAGSPAIKKGILQTVKVVDELVKVMGRHKPENIVIEMARENQTTQKGQKNSRERMKRIEEGIKELGSQILKEHPVENTQLQNEKLYLYYLQNGRDMYVDQELDINRLSDYDVDHIVPQSFLKDDSIDNKVLTRSDKARGKSDNVPSEEVVKKMKNYWRQLLNAKLITQRKFDNLTKAERGGLSELDKAGFIKRQLVETRQITKHVAQILDSRMNTKYDENDKLIREVKVITLKSKLVSDFRKDFQFYKVREINNYHHAHDAYLNAVVGTALIKKYPKLESEFVYGDYKVYDVRKMIAKSEQEIGKATAKYFFYSNIMNFFKTEITLANGEIRKRPLIETNGETGEIVWDKGRDFATVRKVLSMPQVNIVKKTEVQTGGFSKESILPKRNSDKLIARKKDWDPKKYGGFDSPTVAYSVLVVAKVEKGKSKKLKSVKELLGITIMERSSFEKNPIDFLEAKGYKEVKKDLIIKLPKYSLFELENGRKRMLASAGELQKGNELALPSKYVNFLYLASHYEKLKGSPEDNEQKQLFVEQHKHYLDEIIEQISEFSKRVILADANLDKVLSAYNKHRDKPIREQAENIIHLFTLTNLGAPAAFKYFDTTIDRKRYTSTKEVLDATLIHQSITGLYETRIDLSQLGGDGGPAPEAAAKGSSGGMNPLQLLQPLPAEVKGTKLLAHWNSGATITCIPESFLEDEQPIKQTLIKTIHGEKQQNVYYLTFKVKGRKVEAEVIASPYEYILLSPTDVPWLTQQPLQLTILVPLQEYQDRILNKTALPEEQKQQLKALFTKYDNLWQHWENQVGHRKIRPHNIATGDYPPRPQKQYPINPKAKPSIQIVIDDLLKQGVLTPQNSTMNTPVYPVPKPDGRWRMVLDYREVNKTIPLTAAQNQHSAGILATIVRQKYKTTLDLANGFWAHPITPDSYWLTAFTWQGKQYCWTRLPQGFLNSPALFNADAVDLLKEVPNVQVYVDDIYLSHDNPHEHIQQLEKVFQILLQAGYVVSLKKSEIGQRTVEFLGFNITKEGRGLTDTFKTKLLNVTPPKDLKQLQSILGLLNFARNFIPNFAELVQTLYNLIASSPGKYIEWTEDNTKQLNKVIEALNTASNLEERLPDQRLVIKVNTSPSAGYVRYYNESGKKPIMYLNYVFSKAELKFSMLEKLLTTMHKALIKAMDLAMGQEILVYSPIVSMTKIQKTPLPERKALPIRWITWMTYLEDPRIQFHYDKTLPELKHIPDVYTSSIPPLKHPSQYEGVFCTDGSAIKSPDPTKSNNAGMGIVHAIYNPEYKILNQWSIPLGHHTAQMAEIAAVEFACKKALKVPGPVLVITDSFYVAESANKELPYWKSNGFVNNKKEPLKHISKWKSIAECLSIKPDITIQHEKGHQPINTSIHTEGNALADKLATQGSYVVNAGKRTADGSEFEKRTADGSEFESPKKKAKVE

SEQ ID NO: 710 - protein, 2171 aa, synthetic construct
  source 1..2171: note = Description of Artificial Sequence: Synthetic polypeptide
MPAAKRVKLDGGDKKYSIGLDIGTNSVGWAVITDEYKVPSKKFKVLGNTDRHSIKKNLIGALLFDSGETAEATRLKRTARRRYTRRKNRICYLQEIFSNEMAKVDDSFFHRLEESFLVEEDKKHERHPIFGNIVDEVAYHEKYPTIYHLRKKLVDSTDKADLRLIYLALAHMIKFRGHFLIEGDLNPDNSDVDKLFIQLVQTYNQLFEENPINASGVDAKAILSARLSKSRRLENLIAQLPGEKKNGLFGNLIALSLGLTPNFKSNFDLAEDAKLQLSKDTYDDDLDNLLAQIGDQYADLFLAAKNLSDAILLSDILRVNTEITKAPLSASMIKRYDEHHQDLTLLKALVRQQLPEKYKEIFFDQSKNGYAGYIDGGASQEEFYKFIKPILEKMDGTEELLVKLNREDLLRKQRTFDNGSIPHQIHLGELHAILRRQEDFYPFLKDNREKIEKILTFRIPYYVGPLARGNSRFAWMTRKSEETITPWNFEEVVDKGASAQSFIERMTNFDKNLPNEKVLPKHSLLYEYFTVYNELTKVKYVTEGMRKPAFLSGEQKKAIVDLLFKTNRKVTVKQLKEDYFKKIECFDSVEISGVEDRFNASLGTYHDLLKIIKDKDFLDNEENEDILEDIVLTLTLFEDREMIEERLKTYAHLFDDKVMKQLKRRRYTGWGRLSRKLINGIRDKQSGKTILDFLKSDGFANRNFMQLIHDDSLTFKEDIQKAQVSGQGDSLHEHIANLAGSPAIKKGILQTVKVVDELVKVMGRHKPENIVIEMARENQTTQKGQKNSRERMKRIEEGIKELGSQILKEHPVENTQLQNEKLYLYYLQNGRDMYVDQELDINRLSDYDVDHIVPQSFLKDDSIDNKVLTRSDKARGKSDNVPSEEVVKKMKNYWRQLLNAKLITQRKFDNLTKAERGGLSELDKAGFIKRQLVETRQITKHVAQILDSRMNTKYDENDKLIREVKVITLKSKLVSDFRKDFQFYKVREINNYHHAHDAYLNAVVGTALIKKYPKLESEFVYGDYKVYDVRKMIAKSEQEIGKATAKYFFYSNIMNFFKTEITLANGEIRKRPLIETNGETGEIVWDKGRDFATVRKVLSMPQVNIVKKTEVQTGGFSKESILPKRNSDKLIARKKDWDPKKYGGFDSPTVAYSVLVVAKVEKGKSKKLKSVKELLGITIMERSSFEKNPIDFLEAKGYKEVKKDLIIKLPKYSLFELENGRKRMLASAGELQKGNELALPSKYVNFLYLASHYEKLKGSPEDNEQKQLFVEQHKHYLDEIIEQISEFSKRVILADANLDKVLSAYNKHRDKPIREQAENIIHLFTLTNLGAPAAFKYFDTTIDRKRYTSTKEVLDATLIHQSITGLYETRIDLSQLGGDGGGGGGSSGGMNPLQLLQPLPAEVKGTKLLAHWNSGATITCIPESFLEDEQPIKQTLIKTIHGEKQQNVYYLTFKVKGRKVEAEVIASPYEYILLSPTDVPWLTQQPLQLTILVPLQEYQDRILNKTALPEEQKQQLKALFTKYDNLWQHWENQVGHRKIRPHNIATGDYPPRPQKQYPINPKAKPSIQIVIDDLLKQGVLTPQNSTMNTPVYPVPKPDGRWRMVLDYREVNKTIPLTAAQNQHSAGILATIVRQKYKTTLDLANGFWAHPITPDSYWLTAFTWQGKQYCWTRLPQGFLNSPALFNADAVDLLKEVPNVQVYVDDIYLSHDNPHEHIQQLEKVFQILLQAGYVVSLKKSEIGQRTVEFLGFNITKEGRGLTDTFKTKLLNVTPPKDLKQLQSILGLLNFARNFIPNFAELVQTLYNLIASSPGKYIEWTEDNTKQLNKVIEALNTASNLEERLPDQRLVIKVNTSPSAGYVRYYNESGKKPIMYLNYVFSKAELKFSMLEKLLTTMHKALIKAMDLAMGQEILVYSPIVSMTKIQKTPLPERKALPIRWITWMTYLEDPRIQFHYDKTLPELKHIPDVYTSSIPPLKHPSQYEGVFCTDGSAIKSPDPTKSNNAGMGIVHAIYNPEYKILNQWSIPLGHHTAQMAEIAAVEFACKKALKVPGPVLVITDSFYVAESANKELPYWKSNGFVNNKKEPLKHISKWKSIAECLSIKPDITIQHEKGHQPINTSIHTEGNALADKLATQGSYVVNAGKRTADGSEFEKRTADGSEFESPKKKAKVE

SEQ ID NO: 711 - protein, 2174 aa, synthetic construct
  source 1..2174: note = Description of Artificial Sequence: Synthetic polypeptide
MPAAKRVKLDGGDKKYSIGLDIGTNSVGWAVITDEYKVPSKKFKVLGNTDRHSIKKNLIGALLFDSGETAEATRLKRTARRRYTRRKNRICYLQEIFSNEMAKVDDSFFHRLEESFLVEEDKKHERHPIFGNIVDEVAYHEKYPTIYHLRKKLVDSTDKADLRLIYLALAHMIKFRGHFLIEGDLNPDNSDVDKLFIQLVQTYNQLFEENPINASGVDAKAILSARLSKSRRLENLIAQLPGEKKNGLFGNLIALSLGLTPNFKSNFDLAEDAKLQLSKDTYDDDLDNLLAQIGDQYADLFLAAKNLSDAILLSDILRVNTEITKAPLSASMIKRYDEHHQDLTLLKALVRQQLPEKYKEIFFDQSKNGYAGYIDGGASQEEFYKFIKPILEKMDGTEELLVKLNREDLLRKQRTFDNGSIPHQIHLGELHAILRRQEDFYPFLKDNREKIEKILTFRIPYYVGPLARGNSRFAWMTRKSEETITPWNFEEVVDKGASAQSFIERMTNFDKNLPNEKVLPKHSLLYEYFTVYNELTKVKYVTEGMRKPAFLSGEQKKAIVDLLFKTNRKVTVKQLKEDYFKKIECFDSVEISGVEDRFNASLGTYHDLLKIIKDKDFLDNEENEDILEDIVLTLTLFEDREMIEERLKTYAHLFDDKVMKQLKRRRYTGWGRLSRKLINGIRDKQSGKTILDFLKSDGFANRNFMQLIHDDSLTFKEDIQKAQVSGQGDSLHEHIANLAGSPAIKKGILQTVKVVDELVKVMGRHKPENIVIEMARENQTTQKGQKNSRERMKRIEEGIKELGSQILKEHPVENTQLQNEKLYLYYLQNGRDMYVDQELDINRLSDYDVDHIVPQSFLKDDSIDNKVLTRSDKARGKSDNVPSEEVVKKMKNYWRQLLNAKLITQRKFDNLTKAERGGLSELDKAGFIKRQLVETRQITKHVAQILDSRMNTKYDENDKLIREVKVITLKSKLVSDFRKDFQFYKVREINNYHHAHDAYLNAVVGTALIKKYPKLESEFVYGDYKVYDVRKMIAKSEQEIGKATAKYFFYSNIMNFFKTEITLANGEIRKRPLIETNGETGEIVWDKGRDFATVRKVLSMPQVNIVKKTEVQTGGFSKESILPKRNSDKLIARKKDWDPKKYGGFDSPTVAYSVLVVAKVEKGKSKKLKSVKELLGITIMERSSFEKNPIDFLEAKGYKEVKKDLIIKLPKYSLFELENGRKRMLASAGELQKGNELALPSKYVNFLYLASHYEKLKGSPEDNEQKQLFVEQHKHYLDEIIEQISEFSKRVILADANLDKVLSAYNKHRDKPIREQAENIIHLFTLTNLGAPAAFKYFDTTIDRKRYTSTKEVLDATLIHQSITGLYETRIDLSQLGGDGGGSSGGGGGSGGMNPLQLLQPLPAEVKGTKLLAHWNSGATITCIPESFLEDEQPIKQTLIKTIHGEKQQNVYYLTFKVKGRKVEAEVIASPYEYILLSPTDVPWLTQQPLQLTILVPLQEYQDRILNKTALPEEQKQQLKALFTKYDNLWQHWENQVGHRKIRPHNIATGDYPPRPQKQYPINPKAKPSIQIVIDDLLKQGVLTPQNSTMNTPVYPVPKPDGRWRMVLDYREVNKTIPLTAAQNQHSAGILATIVRQKYKTTLDLANGFWAHPITPDSYWLTAFTWQGKQYCWTRLPQGFLNSPALFNADAVDLLKEVPNVQVYVDDIYLSHDNPHEHIQQLEKVFQILLQAGYVVSLKKSEIGQRTVEFLGFNITKEGRGLTDTFKTKLLNVTPPKDLKQLQSILGLLNFARNFIPNFAELVQTLYNLIASSPGKYIEWTEDNTKQLNKVIEALNTASNLEERLPDQRLVIKVNTSPSAGYVRYYNESGKKPIMYLNYVFSKAELKFSMLEKLLTTMHKALIKAMDLAMGQEILVYSPIVSMTKIQKTPLPERKALPIRWITWMTYLEDPRIQFHYDKTLPELKHIPDVYTSSIPPLKHPSQYEGVFCTDGSAIKSPDPTKSNNAGMGIVHAIYNPEYKILNQWSIPLGHHTAQMAEIAAVEFACKKALKVPGPVLVITDSFYVAESANKELPYWKSNGFVNNKKEPLKHISKWKSIAECLSIKPDITIQHEKGHQPINTSIHTEGNALADKLATQGSYVVNAGKRTADGSEFEKRTADGSEFESPKKKAKVE

SEQ ID NO: 712 - protein, 2176 aa, synthetic construct
  source 1..2176: note = Description of Artificial Sequence: Synthetic polypeptide
MPAAKRVKLDGGDKKYSIGLDIGTNSVGWAVITDEYKVPSKKFKVLGNTDRHSIKKNLIGALLFDSGETAEATRLKRTARRRYTRRKNRICYLQEIFSNEMAKVDDSFFHRLEESFLVEEDKKHERHPIFGNIVDEVAYHEKYPTIYHLRKKLVDSTDKADLRLIYLALAHMIKFRGHFLIEGDLNPDNSDVDKLFIQLVQTYNQLFEENPINASGVDAKAILSARLSKSRRLENLIAQLPGEKKNGLFGNLIALSLGLTPNFKSNFDLAEDAKLQLSKDTYDDDLDNLLAQIGDQYADLFLAAKNLSDAILLSDILRVNTEITKAPLSASMIKRYDEHHQDLTLLKALVRQQLPEKYKEIFFDQSKNGYAGYIDGGASQEEFYKFIKPILEKMDGTEELLVKLNREDLLRKQRTFDNGSIPHQIHLGELHAILRRQEDFYPFLKDNREKIEKILTFRIPYYVGPLARGNSRFAWMTRKSEETITPWNFEEVVDKGASAQSFIERMTNFDKNLPNEKVLPKHSLLYEYFTVYNELTKVKYVTEGMRKPAFLSGEQKKAIVDLLFKTNRKVTVKQLKEDYFKKIECFDSVEISGVEDRFNASLGTYHDLLKIIKDKDFLDNEENEDILEDIVLTLTLFEDREMIEERLKTYAHLFDDKVMKQLKRRRYTGWGRLSRKLINGIRDKQSGKTILDFLKSDGFANRNFMQLIHDDSLTFKEDIQKAQVSGQGDSLHEHIANLAGSPAIKKGILQTVKVVDELVKVMGRHKPENIVIEMARENQTTQKGQKNSRERMKRIEEGIKELGSQILKEHPVENTQLQNEKLYLYYLQNGRDMYVDQELDINRLSDYDVDHIVPQSFLKDDSIDNKVLTRSDKARGKSDNVPSEEVVKKMKNYWRQLLNAKLITQRKFDNLTKAERGGLSELDKAGFIKRQLVETRQITKHVAQILDSRMNTKYDENDKLIREVKVITLKSKLVSDFRKDFQFYKVREINNYHHAHDAYLNAVVGTALIKKYPKLESEFVYGDYKVYDVRKMIAKSEQEIGKATAKYFFYSNIMNFFKTEITLANGEIRKRPLIETNGETGEIVWDKGRDFATVRKVLSMPQVNIVKKTEVQTGGFSKESILPKRNSDKLIARKKDWDPKKYGGFDSPTVAYSVLVVAKVEKGKSKKLKSVKELLGITIMERSSFEKNPIDFLEAKGYKEVKKDLIIKLPKYSLFELENGRKRMLASAGELQKGNELALPSKYVNFLYLASHYEKLKGSPEDNEQKQLFVEQHKHYLDEIIEQISEFSKRVILADANLDKVLSAYNKHRDKPIREQAENIIHLFTLTNLGAPAAFKYFDTTIDRKRYTSTKEVLDATLIHQSITGLYETRIDLSQLGGDGGGSSGGSEAAAKGGMNPLQLLQPLPAEVKGTKLLAHWNSGATITCIPESFLEDEQPIKQTLIKTIHGEKQQNVYYLTFKVKGRKVEAEVIASPYEYILLSPTDVPWLTQQPLQLTILVPLQEYQDRILNKTALPEEQKQQLKALFTKYDNLWQHWENQVGHRKIRPHNIATGDYPPRPQKQYPINPKAKPSIQIVIDDLLKQGVLTPQNSTMNTPVYPVPKPDGRWRMVLDYREVNKTIPLTAAQNQHSAGILATIVRQKYKTTLDLANGFWAHPITPDSYWLTAFTWQGKQYCWTRLPQGFLNSPALFNADAVDLLKEVPNVQVYVDDIYLSHDNPHEHIQQLEKVFQILLQAGYVVSLKKSEIGQRTVEFLGFNITKEGRGLTDTFKTKLLNVTPPKDLKQLQSILGLLNFARNFIPNFAELVQTLYNLIASSPGKYIEWTEDNTKQLNKVIEALNTASNLEERLPDQRLVIKVNTSPSAGYVRYYNESGKKPIMYLNYVFSKAELKFSMLEKLLTTMHKALIKAMDLAMGQEILVYSPIVSMTKIQKTPLPERKALPIRWITWMTYLEDPRIQFHYDKTLPELKHIPDVYTSSIPPLKHPSQYEGVFCTDGSAIKSPDPTKSNNAGMGIVHAIYNPEYKILNQWSIPLGHHTAQMAEIAAVEFACKKALKVPGPVLVITDSFYVAESANKELPYWKSNGFVNNKKEPLKHISKWKSIAECLSIKPDITIQHEKGHQPINTSIHTEGNALADKLATQGSYVVNAGKRTADGSEFEKRTADGSEFESPKKKAKVE

SEQ ID NO: 713 - protein, 2181 aa, synthetic construct
  source 1..2181: note = Description of Artificial Sequence: Synthetic polypeptide
MPAAKRVKLDGGDKKYSIGLDIGTNSVGWAVITDEYKVPSKKFKVLGNTDRHSIKKNLIGALLFDSGETAEATRLKRTARRRYTRRKNRICYLQEIFSNEMAKVDDSFFHRLEESFLVEEDKKHERHPIFGNIVDEVAYHEKYPTIYHLRKKLVDSTDKADLRLIYLALAHMIKFRGHFLIEGDLNPDNSDVDKLFIQLVQTYNQLFEENPINASGVDAKAILSARLSKSRRLENLIAQLPGEKKNGLFGNLIALSLGLTPNFKSNFDLAEDAKLQLSKDTYDDDLDNLLAQIGDQYADLFLAAKNLSDAILLSDILRVNTEITKAPLSASMIKRYDEHHQDLTLLKALVRQQLPEKYKEIFFDQSKNGYAGYIDGGASQEEFYKFIKPILEKMDGTEELLVKLNREDLLRKQRTFDNGSIPHQIHLGELHAILRRQEDFYPFLKDNREKIEKILTFRIPYYVGPLARGNSRFAWMTRKSEETITPWNFEEVVDKGASAQSFIERMTNFDKNLPNEKVLPKHSLLYEYFTVYNELTKVKYVTEGMRKPAFLSGEQKKAIVDLLFKTNRKVTVKQLKEDYFKKIECFDSVEISGVEDRFNASLGTYHDLLKIIKDKDFLDNEENEDILEDIVLTLTLFEDREMIEERLKTYAHLFDDKVMKQLKRRRYTGWGRLSRKLINGIRDKQSGKTILDFLKSDGFANRNFMQLIHDDSLTFKEDIQKAQVSGQGDSLHEHIANLAGSPAIKKGILQTVKVVDELVKVMGRHKPENIVIEMARENQTTQKGQKNSRERMKRIEEGIKELGSQILKEHPVENTQLQNEKLYLYYLQNGRDMYVDQELDINRLSDYDVDHIVPQSFLKDDSIDNKVLTRSDKARGKSDNVPSEEVVKKMKNYWRQLLNAKLITQRKFDNLTKAERGGLSELDKAGFIKRQLVETRQITKHVAQILDSRMNTKYDENDKLIREVKVITLKSKLVSDFRKDFQFYKVREINNYHHAHDAYLNAVVGTALIKKYPKLESEFVYGDYKVYDVRKMIAKSEQEIGKATAKYFFYSNIMNFFKTEITLANGEIRKRPLIETNGETGEIVWDKGRDFATVRKVLSMPQVNIVKKTEVQTGGFSKESILPKRNSDKLIARKKDWDPKKYGGFDSPTVAYSVLVVAKVEKGKSKKLKSVKELLGITIMERSSFEKNPIDFLEAKGYKEVKKDLIIKLPKYSLFELENGRKRMLASAGELQKGNELALPSKYVNFLYLASHYEKLKGSPEDNEQKQLFVEQHKHYLDEIIEQISEFSKRVILADANLDKVLSAYNKHRDKPIREQAENIIHLFTLTNLGAPAAFKYFDTTIDRKRYTSTKEVLDATLIHQSITGLYETRIDLSQLGGDGGSGSETPGTSESATPESGGMNPLQLLQPLPAEVKGTKLLAHWNSGATITCIPESFLEDEQPIKQTLIKTIHGEKQQNVYYLTFKVKGRKVEAEVIASPYEYILLSPTDVPWLTQQPLQLTILVPLQEYQDRILNKTALPEEQKQQLKALFTKYDNLWQHWENQVGHRKIRPHNIATGDYPPRPQKQYPINPKAKPSIQIVIDDLLKQGVLTPQNSTMNTPVYPVPKPDGRWRMVLDYREVNKTIPLTAAQNQHSAGILATIVRQKYKTTLDLANGFWAHPITPDSYWLTAFTWQGKQYCWTRLPQGFLNSPALFNADAVDLLKEVPNVQVYVDDIYLSHDNPHEHIQQLEKVFQILLQAGYVVSLKKSEIGQRTVEFLGFNITKEGRGLTDTFKTKLLNVTPPKDLKQLQSILGLLNFARNFIPNFAELVQTLYNLIASSPGKYIEWTEDNTKQLNKVIEALNTASNLEERLPDQRLVIKVNTSPSAGYVRYYNESGKKPIMYLNYVFSKAELKFSMLEKLLTTMHKALIKAMDLAMGQEILVYSPIVSMTKIQKTPLPERKALPIRWITWMTYLEDPRIQFHYDKTLPELKHIPDVYTSSIPPLKHPSQYEGVFCTDGSAIKSPDPTKSNNAGMGIVHAIYNPEYKILNQWSIPLGHHTAQMAEIAAVEFACKKALKVPGPVLVITDSFYVAESANKELPYWKSNGFVNNKKEPLKHISKWKSIAECLSIKPDITIQHEKGHQPINTSIHTEGNALADKLATQGSYVVNAGKRTADGSEFEKRTADGSEFESPKKKAKVE

SEQ ID NO: 714 - protein, 2176 aa, synthetic construct
  source 1..2176: note = Description of Artificial Sequence: Synthetic polypeptide
MPAAKRVKLDGGDKKYSIGLDIGTNSVGWAVITDEYKVPSKKFKVLGNTDRHSIKKNLIGALLFDSGETAEATRLKRTARRRYTRRKNRICYLQEIFSNEMAKVDDSFFHRLEESFLVEEDKKHERHPIFGNIVDEVAYHEKYPTIYHLRKKLVDSTDKADLRLIYLALAHMIKFRGHFLIEGDLNPDNSDVDKLFIQLVQTYNQLFEENPINASGVDAKAILSARLSKSRRLENLIAQLPGEKKNGLFGNLIALSLGLTPNFKSNFDLAEDAKLQLSKDTYDDDLDNLLAQIGDQYADLFLAAKNLSDAILLSDILRVNTEITKAPLSASMIKRYDEHHQDLTLLKALVRQQLPEKYKEIFFDQSKNGYAGYIDGGASQEEFYKFIKPILEKMDGTEELLVKLNREDLLRKQRTFDNGSIPHQIHLGELHAILRRQEDFYPFLKDNREKIEKILTFRIPYYVGPLARGNSRFAWMTRKSEETITPWNFEEVVDKGASAQSFIERMTNFDKNLPNEKVLPKHSLLYEYFTVYNELTKVKYVTEGMRKPAFLSGEQKKAIVDLLFKTNRKVTVKQLKEDYFKKIECFDSVEISGVEDRFNASLGTYHDLLKIIKDKDFLDNEENEDILEDIVLTLTLFEDREMIEERLKTYAHLFDDKVMKQLKRRRYTGWGRLSRKLINGIRDKQSGKTILDFLKSDGFANRNFMQLIHDDSLTFKEDIQKAQVSGQGDSLHEHIANLAGSPAIKKGILQTVKVVDELVKVMGRHKPENIVIEMARENQTTQKGQKNSRERMKRIEEGIKELGSQILKEHPVENTQLQNEKLYLYYLQNGRDMYVDQELDINRLSDYDVDHIVPQSFLKDDSIDNKVLTRSDKARGKSDNVPSEEVVKKMKNYWRQLLNAKLITQRKFDNLTKAERGGLSELDKAGFIKRQLVETRQITKHVAQILDSRMNTKYDENDKLIREVKVITLKSKLVSDFRKDFQFYKVREINNYHHAHDAYLNAVVGTALIKKYPKLESEFVYGDYKVYDVRKMIAKSEQEIGKATAKYFFYSNIMNFFKTEITLANGEIRKRPLIETNGETGEIVWDKGRDFATVRKVLSMPQVNIVKKTEVQTGGFSKESILPKRNSDKLIARKKDWDPKKYGGFDSPTVAYSVLVVAKVEKGKSKKLKSVKELLGITIMERSSFEKNPIDFLEAKGYKEVKKDLIIKLPKYSLFELENGRKRMLASAGELQKGNELALPSKYVNFLYLASHYEKLKGSPEDNEQKQLFVEQHKHYLDEIIEQISEFSKRVILADANLDKVLSAYNKHRDKPIREQAENIIHLFTLTNLGAPAAFKYFDTTIDRKRYTSTKEVLDATLIHQSITGLYETRIDLSQLGGDGGGGSEAAAKPAPGGMNPLQLLQPLPAEVKGTKLLAHWNSGATITCIPESFLEDEQPIKQTLIKTIHGEKQQNVYYLTFKVKGRKVEAEVIASPYEYILLSPTDVPWLTQQPLQLTILVPLQEYQDRILNKTALPEEQKQQLKALFTKYDNLWQHWENQVGHRKIRPHNIATGDYPPRPQKQYPINPKAKPSIQIVIDDLLKQGVLTPQNSTMNTPVYPVPKPDGRWRMVLDYREVNKTIPLTAAQNQHSAGILATIVRQKYKTTLDLANGFWAHPITPDSYWLTAFTWQGKQYCWTRLPQGFLNSPALFNADAVDLLKEVPNVQVYVDDIYLSHDNPHEHIQQLEKVFQILLQAGYVVSLKKSEIGQRTVEFLGFNITKEGRGLTDTFKTKLLNVTPPKDLKQLQSILGLLNFARNFIPNFAELVQTLYNLIASSPGKYIEWTEDNTKQLNKVIEALNTASNLEERLPDQRLVIKVNTSPSAGYVRYYNESGKKPIMYLNYVFSKAELKFSMLEKLLTTMHKALIKAMDLAMGQEILVYSPIVSMTKIQKTPLPERKALPIRWITWMTYLEDPRIQFHYDKTLPELKHIPDVYTSSIPPLKHPSQYEGVFCTDGSAIKSPDPTKSNNAGMGIVHAIYNPEYKILNQWSIPLGHHTAQMAEIAAVEFACKKALKVPGPVLVITDSFYVAESANKELPYWKSNGFVNNKKEPLKHISKWKSIAECLSIKPDITIQHEKGHQPINTSIHTEGNALADKLATQGSYVVNAGKRTADGSEFEKRTADGSEFESPKKKAKVE

SEQ ID NO: 715 - protein, 2208 aa, synthetic construct
  source 1..2208: note = Description of Artificial Sequence: Synthetic polypeptide
MPAAKRVKLDGGDKKYSIGLDIGTNSVGWAVITDEYKVPSKKFKVLGNTDRHSIKKNLIGALLFDSGETAEATRLKRTARRRYTRRKNRICYLQEIFSNEMAKVDDSFFHRLEESFLVEEDKKHERHPIFGNIVDEVAYHEKYPTIYHLRKKLVDSTDKADLRLIYLALAHMIKFRGHFLIEGDLNPDNSDVDKLFIQLVQTYNQLFEENPINASGVDAKAILSARLSKSRRLENLIAQLPGEKKNGLFGNLIALSLGLTPNFKSNFDLAEDAKLQLSKDTYDDDLDNLLAQIGDQYADLFLAAKNLSDAILLSDILRVNTEITKAPLSASMIKRYDEHHQDLTLLKALVRQQLPEKYKEIFFDQSKNGYAGYIDGGASQEEFYKFIKPILEKMDGTEELLVKLNREDLLRKQRTFDNGSIPHQIHLGELHAILRRQEDFYPFLKDNREKIEKILTFRIPYYVGPLARGNSRFAWMTRKSEETITPWNFEEVVDKGASAQSFIERMTNFDKNLPNEKVLPKHSLLYEYFTVYNELTKVKYVTEGMRKPAFLSGEQKKAIVDLLFKTNRKVTVKQLKEDYFKKIECFDSVEISGVEDRFNASLGTYHDLLKIIKDKDFLDNEENEDILEDIVLTLTLFEDREMIEERLKTYAHLFDDKVMKQLKRRRYTGWGRLSRKLINGIRDKQSGKTILDFLKSDGFANRNFMQLIHDDSLTFKEDIQKAQVSGQGDSLHEHIANLAGSPAIKKGILQTVKVVDELVKVMGRHKPENIVIEMARENQTTQKGQKNSRERMKRIEEGIKELGSQILKEHPVENTQLQNEKLYLYYLQNGRDMYVDQELDINRLSDYDVDHIVPQSFLKDDSIDNKVLTRSDKARGKSDNVPSEEVVKKMKNYWRQLLNAKLITQRKFDNLTKAERGGLSELDKAGFIKRQLVETRQITKHVAQILDSRMNTKYDENDKLIREVKVITLKSKLVSDFRKDFQFYKVREINNYHHAHDAYLNAVVGTALIKKYPKLESEFVYGDYKVYDVRKMIAKSEQEIGKATAKYFFYSNIMNFFKTEITLANGEIRKRPLIETNGETGEIVWDKGRDFATVRKVLSMPQVNIVKKTEVQTGGFSKESILPKRNSDKLIARKKDWDPKKYGGFDSPTVAYSVLVVAKVEKGKSKKLKSVKELLGITIMERSSFEKNPIDFLEAKGYKEVKKDLIIKLPKYSLFELENGRKRMLASAGELQKGNELALPSKYVNFLYLASHYEKLKGSPEDNEQKQLFVEQHKHYLDEIIEQISEFSKRVILADANLDKVLSAYNKHRDKPIREQAENIIHLFTLTNLGAPAAFKYFDTTIDRKRYTSTKEVLDATLIHQSITGLYETRIDLSQLGGDGGAEAAAKEAAAKEAAAKEAAAKALEAEAAAKEAAAKEAAAKEAAAKAGGMDLLKPLTVERKGVKIKGYWNSQADITCVPKDLLQGEEPVRQQNVTTIHGTQEGDVYYVNLKIDGRRINTEVIGTTLDYAIITPGDVPWILKKPLELTIKLDLEEQQGTLLNNSILSKKGKEELKQLFEKYSALWQSWENQVGHRRIRPHKIATGTVKPTPQKQYHINPKAKPDIQIVINDLLKQGVLIQKESTMNTPVYPVPKPNGRWRMVLDYRAVNKVTPLIAVQNQHSYGILGSLFKGRYKTTIDLSNGFWAHPIVPEDYWITAFTWQGKQYCWTVLPQGFLNSPGLFTGDVVDLLQGIPNVEVYVDDVYISHDSEKEHLEYLDILFNRLKEAGYIISLKKSNIANSIVDFLGFQITNEGRGLTDTFKEKLENITAPTTLKQLQSILGLLNFARNFIPDFTELIAPLYALIPKSTKNYVPWQIEHSTTLETLITKLNGAEYLQGRKGDKTLIMKVNASYTTGYIRYYNEGEKKPISYVSIVFSKTELKFTELEKLLTTVHKGLLKALDLSMGQNIHVYSPIVSMQNIQKTPQTAKKALASRWLSWLSYLEDPRIRFFYDPQMPALKDLPAVDTGKDNKKHPSNFQHIFYTDGSAITSPTKEGHLNAGMGIVYFINKDGNLQKQQEWSISLGNHTAQFAEIAAFEFALKKCLPLGGNILVVTDSNYVAKAYNEELDVWASNGFVNNRKKPLKHISKWKSVADLKRLRPDVVVTHEPGHQKLDSSPHAYGNNLADQLATQASFKVHAGKRTADGSEFEKRTADGSEFESPKKKAKVE

SEQ ID NO: 716 - protein, 2192 aa, synthetic construct
  source 1..2192: note = Description of Artificial Sequence: Synthetic polypeptide
MPAAKRVKLDGGDKKYSIGLDIGTNSVGWAVITDEYKVPSKKFKVLGNTDRHSIKKNLIGALLFDSGETAEATRLKRTARRRYTRRKNRICYLQEIFSNEMAKVDDSFFHRLEESFLVEEDKKHERHPIFGNIVDEVAYHEKYPTIYHLRKKLVDSTDKADLRLIYLALAHMIKFRGHFLIEGDLNPDNSDVDKLFIQLVQTYNQLFEENPINASGVDAKAILSARLSKSRRLENLIAQLPGEKKNGLFGNLIALSLGLTPNFKSNFDLAEDAKLQLSKDTYDDDLDNLLAQIGDQYADLFLAAKNLSDAILLSDILRVNTEITKAPLSASMIKRYDEHHQDLTLLKALVRQQLPEKYKEIFFDQSKNGYAGYIDGGASQEEFYKFIKPILEKMDGTEELLVKLNREDLLRKQRTFDNGSIPHQIHLGELHAILRRQEDFYPFLKDNREKIEKILTFRIPYYVGPLARGNSRFAWMTRKSEETITPWNFEEVVDKGASAQSFIERMTNFDKNLPNEKVLPKHSLLYEYFTVYNELTKVKYVTEGMRKPAFLSGEQKKAIVDLLFKTNRKVTVKQLKEDYFKKIECFDSVEISGVEDRFNASLGTYHDLLKIIKDKDFLDNEENEDILEDIVLTLTLFEDREMIEERLKTYAHLFDDKVMKQLKRRRYTGWGRLSRKLINGIRDKQSGKTILDFLKSDGFANRNFMQLIHDDSLTFKEDIQKAQVSGQGDSLHEHIANLAGSPAIKKGILQTVKVVDELVKVMGRHKPENIVIEMARENQTTQKGQKNSRERMKRIEEGIKELGSQILKEHPVENTQLQNEKLYLYYLQNGRDMYVDQELDINRLSDYDVDHIVPQSFLKDDSIDNKVLTRSDKARGKSDNVPSEEVVKKMKNYWRQLLNAKLITQRKFDNLTKAERGGLSELDKAGFIKRQLVETRQITKHVAQILDSRMNTKYDENDKLIREVKVITLKSKLVSDFRKDFQFYKVREINNYHHAHDAYLNAVVGTALIKKYPKLESEFVYGDYKVYDVRKMIAKSEQEIGKATAKYFFYSNIMNFFKTEITLANGEIRKRPLIETNGETGEIVWDKGRDFATVRKVLSMPQVNIVKKTEVQTGGFSKESILPKRNSDKLIARKKDWDPKKYGGFDSPTVAYSVLVVAKVEKGKSKKLKSVKELLGITIMERSSFEKNPIDFLEAKGYKEVKKDLIIKLPKYSLFELENGRKRMLASAGELQKGNELALPSKYVNFLYLASHYEKLKGSPEDNEQKQLFVEQHKHYLDEIIEQISEFSKRVILADANLDKVLSAYNKHRDKPIREQAENIIHLFTLTNLGAPAAFKYFDTTIDRKRYTSTKEVLDATLIHQSITGLYETRIDLSQLGGDGGGGGGSGGGGSGGGGSGGGGSGGGGSGGGGSGGMDLLKPLTVERKGVKIKGYWNSQADITCVPKDLLQGEEPVRQQNVTTIHGTQEGDVYYVNLKIDGRRINTEVIGTTLDYAIITPGDVPWILKKPLELTIKLDLEEQQGTLLNNSILSKKGKEELKQLFEKYSALWQSWENQVGHRRIRPHKIATGTVKPTPQKQYHINPKAKPDIQIVINDLLKQGVLIQKESTMNTPVYPVPKPNGRWRMVLDYRAVNKVTPLIAVQNQHSYGILGSLFKGRYKTTIDLSNGFWAHPIVPEDYWITAFTWQGKQYCWTVLPQGFLNSPGLFTGDVVDLLQGIPNVEVYVDDVYISHDSEKEHLEYLDILFNRLKEAGYIISLKKSNIANSIVDFLGFQITNEGRGLTDTFKEKLENITAPTTLKQLQSILGLLNFARNFIPDFTELIAPLYALIPKSTKNYVPWQIEHSTTLETLITKLNGAEYLQGRKGDKTLIMKVNASYTTGYIRYYNEGEKKPISYVSIVFSKTELKFTELEKLLTTVHKGLLKALDLSMGQNIHVYSPIVSMQNIQKTPQTAKKALASRWLSWLSYLEDPRIRFFYDPQMPALKDLPAVDTGKDNKKHPSNFQHIFYTDGSAITSPTKEGHLNAGMGIVYFINKDGNLQKQQEWSISLGNHTAQFAEIAAFEFALKKCLPLGGNILVVTDSNYVAKAYNEELDVWASNGFVNNRKKPLKHISKWKSVADLKRLRPDVVVTHEPGHQKLDSSPHAYGNNLADQLATQASFKVHAGKRTADGSEFEKRTADGSEFESPKKKAKVE

SEQ ID NO: 717 - protein, 2171 aa, synthetic construct
  source 1..2171: note = Description of Artificial Sequence: Synthetic polypeptide
MPAAKRVKLDGGDKKYSIGLDIGTNSVGWAVITDEYKVPSKKFKVLGNTDRHSIKKNLIGALLFDSGETAEATRLKRTARRRYTRRKNRICYLQEIFSNEMAKVDDSFFHRLEESFLVEEDKKHERHPIFGNIVDEVAYHEKYPTIYHLRKKLVDSTDKADLRLIYLALAHMIKFRGHFLIEGDLNPDNSDVDKLFIQLVQTYNQLFEENPINASGVDAKAILSARLSKSRRLENLIAQLPGEKKNGLFGNLIALSLGLTPNFKSNFDLAEDAKLQLSKDTYDDDLDNLLAQIGDQYADLFLAAKNLSDAILLSDILRVNTEITKAPLSASMIKRYDEHHQDLTLLKALVRQQLPEKYKEIFFDQSKNGYAGYIDGGASQEEFYKFIKPILEKMDGTEELLVKLNREDLLRKQRTFDNGSIPHQIHLGELHAILRRQEDFYPFLKDNREKIEKILTFRIPYYVGPLARGNSRFAWMTRKSEETITPWNFEEVVDKGASAQSFIERMTNFDKNLPNEKVLPKHSLLYEYFTVYNELTKVKYVTEGMRKPAFLSGEQKKAIVDLLFKTNRKVTVKQLKEDYFKKIECFDSVEISGVEDRFNASLGTYHDLLKIIKDKDFLDNEENEDILEDIVLTLTLFEDREMIEERLKTYAHLFDDKVMKQLKRRRYTGWGRLSRKLINGIRDKQSGKTILDFLKSDGFANRNFMQLIHDDSLTFKEDIQKAQVSGQGDSLHEHIANLAGSPAIKKGILQTVKVVDELVKVMGRHKPENIVIEMARENQTTQKGQKNSRERMKRIEEGIKELGSQILKEHPVENTQLQNEKLYLYYLQNGRDMYVDQELDINRLSDYDVDHIVPQSFLKDDSIDNKVLTRSDKARGKSDNVPSEEVVKKMKNYWRQLLNAKLITQRKFDNLTKAERGGLSELDKAGFIKRQLVETRQITKHVAQILDSRMNTKYDENDKLIREVKVITLKSKLVSDFRKDFQFYKVREINNYHHAHDAYLNAVVGTALIKKYPKLESEFVYGDYKVYDVRKMIAKSEQEIGKATAKYFFYSNIMNFFKTEITLANGEIRKRPLIETNGETGEIVWDKGRDFATVRKVLSMPQVNIVKKTEVQTGGFSKESILPKRNSDKLIARKKDWDPKKYGGFDSPTVAYSVLVVAKVEKGKSKKLKSVKELLGITIMERSSFEKNPIDFLEAKGYKEVKKDLIIKLPKYSLFELENGRKRMLASAGELQKGNELALPSKYVNFLYLASHYEKLKGSPEDNEQKQLFVEQHKHYLDEIIEQISEFSKRVILADANLDKVLSAYNKHRDKPIREQAENIIHLFTLTNLGAPAAFKYFDTTIDRKRYTSTKEVLDATLIHQSITGLYETRIDLSQLGGDGGGSSGGSPAPGGMDLLKPLTVERKGVKIKGYWNSQADITCVPKDLLQGEEPVRQQNVTTIHGTQEGDVYYVNLKIDGRRINTEVIGTTLDYAIITPGDVPWILKKPLELTIKLDLEEQQGTLLNNSILSKKGKEELKQLFEKYSALWQSWENQVGHRRIRPHKIATGTVKPTPQKQYHINPKAKPDIQIVINDLLKQGVLIQKESTMNTPVYPVPKPNGRWRMVLDYRAVNKVTPLIAVQNQHSYGILGSLFKGRYKTTIDLSNGFWAHPIVPEDYWITAFTWQGKQYCWTVLPQGFLNSPGLFTGDVVDLLQGIPNVEVYVDDVYISHDSEKEHLEYLDILFNRLKEAGYIISLKKSNIANSIVDFLGFQITNEGRGLTDTFKEKLENITAPTTLKQLQSILGLLNFARNFIPDFTELIAPLYALIPKSTKNYVPWQIEHSTTLETLITKLNGAEYLQGRKGDKTLIMKVNASYTTGYIRYYNEGEKKPISYVSIVFSKTELKFTELEKLLTTVHKGLLKALDLSMGQNIHVYSPIVSMQNIQKTPQTAKKALASRWLSWLSYLEDPRIRFFYDPQMPALKDLPAVDTGKDNKKHPSNFQHIFYTDGSAITSPTKEGHLNAGMGIVYFINKDGNLQKQQEWSISLGNHTAQFAEIAAFEFALKKCLPLGGNILVVTDSNYVAKAYNEELDVWASNGFVNNRKKPLKHISKWKSVADLKRLRPDVVVTHEPGHQKLDSSPHAYGNNLADQLATQASFKVHAGKRTADGSEFEKRTADGSEFESPKKKAKVE

SEQ ID NO: 718 - protein, 2177 aa, synthetic construct
  source 1..2177: note = Description of Artificial Sequence: Synthetic polypeptide
MPAAKRVKLDGGDKKYSIGLDIGTNSVGWAVITDEYKVPSKKFKVLGNTDRHSIKKNLIGALLFDSGETAEATRLKRTARRRYTRRKNRICYLQEIFSNEMAKVDDSFFHRLEESFLVEEDKKHERHPIFGNIVDEVAYHEKYPTIYHLRKKLVDSTDKADLRLIYLALAHMIKFRGHFLIEGDLNPDNSDVDKLFIQLVQTYNQLFEENPINASGVDAKAILSARLSKSRRLENLIAQLPGEKKNGLFGNLIALSLGLTPNFKSNFDLAEDAKLQLSKDTYDDDLDNLLAQIGDQYADLFLAAKNLSDAILLSDILRVNTEITKAPLSASMIKRYDEHHQDLTLLKALVRQQLPEKYKEIFFDQSKNGYAGYIDGGASQEEFYKFIKPILEKMDGTEELLVKLNREDLLRKQRTFDNGSIPHQIHLGELHAILRRQEDFYPFLKDNREKIEKILTFRIPYYVGPLARGNSRFAWMTRKSEETITPWNFEEVVDKGASAQSFIERMTNFDKNLPNEKVLPKHSLLYEYFTVYNELTKVKYVTEGMRKPAFLSGEQKKAIVDLLFKTNRKVTVKQLKEDYFKKIECFDSVEISGVEDRFNASLGTYHDLLKIIKDKDFLDNEENEDILEDIVLTLTLFEDREMIEERLKTYAHLFDDKVMKQLKRRRYTGWGRLSRKLINGIRDKQSGKTILDFLKSDGFANRNFMQLIHDDSLTFKEDIQKAQVSGQGDSLHEHIANLAGSPAIKKGILQTVKVVDELVKVMGRHKPENIVIEMARENQTTQKGQKNSRERMKRIEEGIKELGSQILKEHPVENTQLQNEKLYLYYLQNGRDMYVDQELDINRLSDYDVDHIVPQSFLKDDSIDNKVLTRSDKARGKSDNVPSEEVVKKMKNYWRQLLNAKLITQRKFDNLTKAERGGLSELDKAGFIKRQLVETRQITKHVAQILDSRMNTKYDENDKLIREVKVITLKSKLVSDFRKDFQFYKVREINNYHHAHDAYLNAVVGTALIKKYPKLESEFVYGDYKVYDVRKMIAKSEQEIGKATAKYFFYSNIMNFFKTEITLANGEIRKRPLIETNGETGEIVWDKGRDFATVRKVLSMPQVNIVKKTEVQTGGFSKESILPKRNSDKLIARKKDWDPKKYGGFDSPTVAYSVLVVAKVEKGKSKKLKSVKELLGITIMERSSFEKNPIDFLEAKGYKEVKKDLIIKLPKYSLFELENGRKRMLASAGELQKGNELALPSKYVNFLYLASHYEKLKGSPEDNEQKQLFVEQHKHYLDEIIEQISEFSKRVILADANLDKVLSAYNKHRDKPIREQAENIIHLFTLTNLGAPAAFKYFDTTIDRKRYTSTKEVLDATLIHQSITGLYETRIDLSQLGGDGGEAAAKEAAAKEAAAKGGMDLLKPLTVERKGVKIKGYWNSQADITCVPKDLLQGEEPVRQQNVTTIHGTQEGDVYYVNLKIDGRRINTEVIGTTLDYAIITPGDVPWILKKPLELTIKLDLEEQQGTLLNNSILSKKGKEELKQLFEKYSALWQSWENQVGHRRIRPHKIATGTVKPTPQKQYHINPKAKPDIQIVINDLLKQGVLIQKESTMNTPVYPVPKPNGRWRMVLDYRAVNKVTPLIAVQNQHSYGILGSLFKGRYKTTIDLSNGFWAHPIVPEDYWITAFTWQGKQYCWTVLPQGFLNSPGLFTGDVVDLLQGIPNVEVYVDDVYISHDSEKEHLEYLDILFNRLKEAGYIISLKKSNIANSIVDFLGFQITNEGRGLTDTFKEKLENITAPTTLKQLQSILGLLNFARNFIPDFTELIAPLYALIPKSTKNYVPWQIEHSTTLETLITKLNGAEYLQGRKGDKTLIMKVNASYTTGYIRYYNEGEKKPISYVSIVFSKTELKFTELEKLLTTVHKGLLKALDLSMGQNIHVYSPIVSMQNIQKTPQTAKKALASRWLSWLSYLEDPRIRFFYDPQMPALKDLPAVDTGKDNKKHPSNFQHIFYTDGSAITSPTKEGHLNAGMGIVYFINKDGNLQKQQEWSISLGNHTAQFAEIAAFEFALKKCLPLGGNILVVTDSNYVAKAYNEELDVWASNGFVNNRKKPLKHISKWKSVADLKRLRPDVVVTHEPGHQKLDSSPHAYGNNLADQLATQASFKVHAGKRTADGSEFEKRTADGSEFESPKKKAKVE

SEQ ID NO: 719 - protein, 2177 aa, synthetic construct
  source 1..2177: note = Description of Artificial Sequence: Synthetic polypeptide
MPAAKRVKLDGGDKKYSIGLDIGTNSVGWAVITDEYKVPSKKFKVLGNTDRHSIKKNLIGALLFDSGETAEATRLKRTARRRYTRRKNRICYLQEIFSNEMAKVDDSFFHRLEESFLVEEDKKHERHPIFGNIVDEVAYHEKYPTIYHLRKKLVDSTDKADLRLIYLALAHMIKFRGHFLIEGDLNPDNSDVDKLFIQLVQTYNQLFEENPINASGVDAKAILSARLSKSRRLENLIAQLPGEKKNGLFGNLIALSLGLTPNFKSNFDLAEDAKLQLSKDTYDDDLDNLLAQIGDQYADLFLAAKNLSDAILLSDILRVNTEITKAPLSASMIKRYDEHHQDLTLLKALVRQQLPEKYKEIFFDQSKNGYAGYIDGGASQEEFYKFIKPILEKMDGTEELLVKLNREDLLRKQRTFDNGSIPHQIHLGELHAILRRQEDFYPFLKDNREKIEKILTFRIPYYVGPLARGNSRFAWMTRKSEETITPWNFEEVVDKGASAQSFIERMTNFDKNLPNEKVLPKHSLLYEYFTVYNELTKVKYVTEGMRKPAFLSGEQKKAIVDLLFKTNRKVTVKQLKEDYFKKIECFDSVEISGVEDRFNASLGTYHDLLKIIKDKDFLDNEENEDILEDIVLTLTLFEDREMIEERLKTYAHLFDDKVMKQLKRRRYTGWGRLSRKLINGIRDKQSGKTILDFLKSDGFANRNFMQLIHDDSLTFKEDIQKAQVSGQGDSLHEHIANLAGSPAIKKGILQTVKVVDELVKVMGRHKPENIVIEMARENQTTQKGQKNSRERMKRIEEGIKELGSQILKEHPVENTQLQNEKLYLYYLQNGRDMYVDQELDINRLSDYDVDHIVPQSFLKDDSIDNKVLTRSDKARGKSDNVPSEEVVKKMKNYWRQLLNAKLITQRKFDNLTKAERGGLSELDKAGFIKRQLVETRQITKHVAQILDSRMNTKYDENDKLIREVKVITLKSKLVSDFRKDFQFYKVREINNYHHAHDAYLNAVVGTALIKKYPKLESEFVYGDYKVYDVRKMIAKSEQEIGKATAKYFFYSNIMNFFKTEITLANGEIRKRPLIETNGETGEIVWDKGRDFATVRKVLSMPQVNIVKKTEVQTGGFSKESILPKRNSDKLIARKKDWDPKKYGGFDSPTVAYSVLVVAKVEKGKSKKLKSVKELLGITIMERSSFEKNPIDFLEAKGYKEVKKDLIIKLPKYSLFELENGRKRMLASAGELQKGNELALPSKYVNFLYLASHYEKLKGSPEDNEQKQLFVEQHKHYLDEIIEQISEFSKRVILADANLDKVLSAYNKHRDKPIREQAENIIHLFTLTNLGAPAAFKYFDTTIDRKRYTSTKEVLDATLIHQSITGLYETRIDLSQLGGDGGGSSGSSGSSGSSGSSGGMDLLKPLTVERKGVKIKGYWNSQADITCVPKDLLQGEEPVRQQNVTTIHGTQEGDVYYVNLKIDGRRINTEVIGTTLDYAIITPGDVPWILKKPLELTIKLDLEEQQGTLLNNSILSKKGKEELKQLFEKYSALWQSWENQVGHRRIRPHKIATGTVKPTPQKQYHINPKAKPDIQIVINDLLKQGVLIQKESTMNTPVYPVPKPNGRWRMVLDYRAVNKVTPLIAVQNQHSYGILGSLFKGRYKTTIDLSNGFWAHPIVPEDYWITAFTWQGKQYCWTVLPQGFLNSPGLFTGDVVDLLQGIPNVEVYVDDVYISHDSEKEHLEYLDILFNRLKEAGYIISLKKSNIANSIVDFLGFQITNEGRGLTDTFKEKLENITAPTTLKQLQSILGLLNFARNFIPDFTELIAPLYALIPKSTKNYVPWQIEHSTTLETLITKLNGAEYLQGRKGDKTLIMKVNASYTTGYIRYYNEGEKKPISYVSIVFSKTELKFTELEKLLTTVHKGLLKALDLSMGQNIHVYSPIVSMQNIQKTPQTAKKALASRWLSWLSYLEDPRIRFFYDPQMPALKDLPAVDTGKDNKKHPSNFQHIFYTDGSAITSPTKEGHLNAGMGIVYFINKDGNLQKQQEWSISLGNHTAQFAEIAAFEFALKKCLPLGGNILVVTDSNYVAKAYNEELDVWASNGFVNNRKKPLKHISKWKSVADLKRLRPDVVVTHEPGHQKLDSSPHAYGNNLADQLATQASFKVHAGKRTADGSEFEKRTADGSEFESPKKKAKVE

SEQ ID NO: 720 - protein, 2171 aa, synthetic construct
  source 1..2171: note = Description of Artificial Sequence: Synthetic polypeptide
MPAAKRVKLDGGDKKYSIGLDIGTNSVGWAVITDEYKVPSKKFKVLGNTDRHSIKKNLIGALLFDSGETAEATRLKRTARRRYTRRKNRICYLQEIFSNEMAKVDDSFFHRLEESFLVEEDKKHERHPIFGNIVDEVAYHEKYPTIYHLRKKLVDSTDKADLRLIYLALAHMIKFRGHFLIEGDLNPDNSDVDKLFIQLVQTYNQLFEENPINASGVDAKAILSARLSKSRRLENLIAQLPGEKKNGLFGNLIALSLGLTPNFKSNFDLAEDAKLQLSKDTYDDDLDNLLAQIGDQYADLFLAAKNLSDAILLSDILRVNTEITKAPLSASMIKRYDEHHQDLTLLKALVRQQLPEKYKEIFFDQSKNGYAGYIDGGASQEEFYKFIKPILEKMDGTEELLVKLNREDLLRKQRTFDNGSIPHQIHLGELHAILRRQEDFYPFLKDNREKIEKILTFRIPYYVGPLARGNSRFAWMTRKSEETITPWNFEEVVDKGASAQSFIERMTNFDKNLPNEKVLPKHSLLYEYFTVYNELTKVKYVTEGMRKPAFLSGEQKKAIVDLLFKTNRKVTVKQLKEDYFKKIECFDSVEISGVEDRFNASLGTYHDLLKIIKDKDFLDNEENEDILEDIVLTLTLFEDREMIEERLKTYAHLFDDKVMKQLKRRRYTGWGRLSRKLINGIRDKQSGKTILDFLKSDGFANRNFMQLIHDDSLTFKEDIQKAQVSGQGDSLHEHIANLAGSPAIKKGILQTVKVVDELVKVMGRHKPENIVIEMARENQTTQKGQKNSRERMKRIEEGIKELGSQILKEHPVENTQLQNEKLYLYYLQNGRDMYVDQELDINRLSDYDVDHIVPQSFLKDDSIDNKVLTRSDKARGKSDNVPSEEVVKKMKNYWRQLLNAKLITQRKFDNLTKAERGGLSELDKAGFIKRQLVETRQITKHVAQILDSRMNTKYDENDKLIREVKVITLKSKLVSDFRKDFQFYKVREINNYHHAHDAYLNAVVGTALIKKYPKLESEFVYGDYKVYDVRKMIAKSEQEIGKATAKYFFYSNIMNFFKTEITLANGEIRKRPLIETNGETGEIVWDKGRDFATVRKVLSMPQVNIVKKTEVQTGGFSKESILPKRNSDKLIARKKDWDPKKYGGFDSPTVAYSVLVVAKVEKGKSKKLKSVKELLGITIMERSSFEKNPIDFLEAKGYKEVKKDLIIKLPKYSLFELENGRKRMLASAGELQKGNELALPSKYVNFLYLASHYEKLKGSPEDNEQKQLFVEQHKHYLDEIIEQISEFSKRVILADANLDKVLSAYNKHRDKPIREQAENIIHLFTLTNLGAPAAFKYFDTTIDRKRYTSTKEVLDATLIHQSITGLYETRIDLSQLGGDGGGGGGSSPAPGGMDLLKPLTVERKGVKIKGYWNSQADITCVPKDLLQGEEPVRQQNVTTIHGTQEGDVYYVNLKIDGRRINTEVIGTTLDYAIITPGDVPWILKKPLELTIKLDLEEQQGTLLNNSILSKKGKEELKQLFEKYSALWQSWENQVGHRRIRPHKIATGTVKPTPQKQYHINPKAKPDIQIVINDLLKQGVLIQKESTMNTPVYPVPKPNGRWRMVLDYRAVNKVTPLIAVQNQHSYGILGSLFKGRYKTTIDLSNGFWAHPIVPEDYWITAFTWQGKQYCWTVLPQGFLNSPGLFTGDVVDLLQGIPNVEVYVDDVYISHDSEKEHLEYLDILFNRLKEAGYIISLKKSNIANSIVDFLGFQITNEGRGLTDTFKEKLENITAPTTLKQLQSILGLLNFARNFIPDFTELIAPLYALIPKSTKNYVPWQIEHSTTLETLITKLNGAEYLQGRKGDKTLIMKVNASYTTGYIRYYNEGEKKPISYVSIVFSKTELKFTELEKLLTTVHKGLLKALDLSMGQNIHVYSPIVSMQNIQKTPQTAKKALASRWLSWLSYLEDPRIRFFYDPQMPALKDLPAVDTGKDNKKHPSNFQHIFYTDGSAITSPTKEGHLNAGMGIVYFINKDGNLQKQQEWSISLGNHTAQFAEIAAFEFALKKCLPLGGNILVVTDSNYVAKAYNEELDVWASNGFVNNRKKPLKHISKWKSVADLKRLRPDVVVTHEPGHQKLDSSPHAYGNNLADQLATQASFKVHAGKRTADGSEFEKRTADGSEFESPKKKAKVE

SEQ ID NO: 721 - protein, 2173 aa, synthetic construct
  source 1..2173: note = Description of Artificial Sequence: Synthetic polypeptide
MPAAKRVKLDGGDKKYSIGLDIGTNSVGWAVITDEYKVPSKKFKVLGNTDRHSIKKNLIGALLFDSGETAEATRLKRTARRRYTRRKNRICYLQEIFSNEMAKVDDSFFHRLEESFLVEEDKKHERHPIFGNIVDEVAYHEKYPTIYHLRKKLVDSTDKADLRLIYLALAHMIKFRGHFLIEGDLNPDNSDVDKLFIQLVQTYNQLFEENPINASGVDAKAILSARLSKSRRLENLIAQLPGEKKNGLFGNLIALSLGLTPNFKSNFDLAEDAKLQLSKDTYDDDLDNLLAQIGDQYADLFLAAKNLSDAILLSDILRVNTEITKAPLSASMIKRYDEHHQDLTLLKALVRQQLPEKYKEIFFDQSKNGYAGYIDGGASQEEFYKFIKPILEKMDGTEELLVKLNREDLLRKQRTFDNGSIPHQIHLGELHAILRRQEDFYPFLKDNREKIEKILTFRIPYYVGPLARGNSRFAWMTRKSEETITPWNFEEVVDKGASAQSFIERMTNFDKNLPNEKVLPKHSLLYEYFTVYNELTKVKYVTEGMRKPAFLSGEQKKAIVDLLFKTNRKVTVKQLKEDYFKKIECFDSVEISGVEDRFNASLGTYHDLLKIIKDKDFLDNEENEDILEDIVLTLTLFEDREMIEERLKTYAHLFDDKVMKQLKRRRYTGWGRLSRKLINGIRDKQSGKTILDFLKSDGFANRNFMQLIHDDSLTFKEDIQKAQVSGQGDSLHEHIANLAGSPAIKKGILQTVKVVDELVKVMGRHKPENIVIEMARENQTTQKGQKNSRERMKRIEEGIKELGSQILKEHPVENTQLQNEKLYLYYLQNGRDMYVDQELDINRLSDYDVDHIVPQSFLKDDSIDNKVLTRSDKARGKSDNVPSEEVVKKMKNYWRQLLNAKLITQRKFDNLTKAERGGLSELDKAGFIKRQLVETRQITKHVAQILDSRMNTKYDENDKLIREVKVITLKSKLVSDFRKDFQFYKVREINNYHHAHDAYLNAVVGTALIKKYPKLESEFVYGDYKVYDVRKMIAKSEQEIGKATAKYFFYSNIMNFFKTEITLANGEIRKRPLIETNGETGEIVWDKGRDFATVRKVLSMPQVNIVKKTEVQTGGFSKESILPKRNSDKLIARKKDWDPKKYGGFDSPTVAYSVLVVAKVEKGKSKKLKSVKELLGITIMERSSFEKNPIDFLEAKGYKEVKKDLIIKLPKYSLFELENGRKRMLASAGELQKGNELALPSKYVNFLYLASHYEKLKGSPEDNEQKQLFVEQHKHYLDEIIEQISEFSKRVILADANLDKVLSAYNKHRDKPIREQAENIIHLFTLTNLGAPAAFKYFDTTIDRKRYTSTKEVLDATLIHQSITGLYETRIDLSQLGGDGGEAAAKGSSPAPGGMDLLKPLTVERKGVKIKGYWNSQADITCVPKDLLQGEEPVRQQNVTTIHGTQEGDVYYVNLKIDGRRINTEVIGTTLDYAIITPGDVPWILKKPLELTIKLDLEEQQGTLLNNSILSKKGKEELKQLFEKYSALWQSWENQVGHRRIRPHKIATGTVKPTPQKQYHINPKAKPDIQIVINDLLKQGVLIQKESTMNTPVYPVPKPNGRWRMVLDYRAVNKVTPLIAVQNQHSYGILGSLFKGRYKTTIDLSNGFWAHPIVPEDYWITAFTWQGKQYCWTVLPQGFLNSPGLFTGDVVDLLQGIPNVEVYVDDVYISHDSEKEHLEYLDILFNRLKEAGYIISLKKSNIANSIVDFLGFQITNEGRGLTDTFKEKLENITAPTTLKQLQSILGLLNFARNFIPDFTELIAPLYALIPKSTKNYVPWQIEHSTTLETLITKLNGAEYLQGRKGDKTLIMKVNASYTTGYIRYYNEGEKKPISYVSIVFSKTELKFTELEKLLTTVHKGLLKALDLSMGQNIHVYSPIVSMQNIQKTPQTAKKALASRWLSWLSYLEDPRIRFFYDPQMPALKDLPAVDTGKDNKKHPSNFQHIFYTDGSAITSPTKEGHLNAGMGIVYFINKDGNLQKQQEWSISLGNHTAQFAEIAAFEFALKKCLPLGGNILVVTDSNYVAKAYNEELDVWASNGFVNNRKKPLKHISKWKSVADLKRLRPDVVVTHEPGHQKLDSSPHAYGNNLADQLATQASFKVHAGKRTADGSEFEKRTADGSEFESPKKKAKVE

SEQ ID NO: 722 - protein, 2180 aa, synthetic construct
  source 1..2180: note = Description of Artificial Sequence: Synthetic polypeptide
MPAAKRVKLDGGDKKYSIGLDIGTNSVGWAVITDEYKVPSKKFKVLGNTDRHSIKKNLIGALLFDSGETAEATRLKRTARRRYTRRKNRICYLQEIFSNEMAKVDDSFFHRLEESFLVEEDKKHERHPIFGNIVDEVAYHEKYPTIYHLRKKLVDSTDKADLRLIYLALAHMIKFRGHFLIEGDLNPDNSDVDKLFIQLVQTYNQLFEENPINASGVDAKAILSARLSKSRRLENLIAQLPGEKKNGLFGNLIALSLGLTPNFKSNFDLAEDAKLQLSKDTYDDDLDNLLAQIGDQYADLFLAAKNLSDAILLSDILRVNTEITKAPLSASMIKRYDEHHQDLTLLKALVRQQLPEKYKEIFFDQSKNGYAGYIDGGASQEEFYKFIKPILEKMDGTEELLVKLNREDLLRKQRTFDNGSIPHQIHLGELHAILRRQEDFYPFLKDNREKIEKILTFRIPYYVGPLARGNSRFAWMTRKSEETITPWNFEEVVDKGASAQSFIERMTNFDKNLPNEKVLPKHSLLYEYFTVYNELTKVKYVTEGMRKPAFLSGEQKKAIVDLLFKTNRKVTVKQLKEDYFKKIECFDSVEISGVEDRFNASLGTYHDLLKIIKDKDFLDNEENEDILEDIVLTLTLFEDREMIEERLKTYAHLFDDKVMKQLKRRRYTGWGRLSRKLINGIRDKQSGKTILDFLKSDGFANRNFMQLIHDDSLTFKEDIQKAQVSGQGDSLHEHIANLAGSPAIKKGILQTVKVVDELVKVMGRHKPENIVIEMARENQTTQKGQKNSRERMKRIEEGIKELGSQILKEHPVENTQLQNEKLYLYYLQNGRDMYVDQELDINRLSDYDVDHIVPQSFLKDDSIDNKVLTRSDKARGKSDNVPSEEVVKKMKNYWRQLLNAKLITQRKFDNLTKAERGGLSELDKAGFIKRQLVETRQITKHVAQILDSRMNTKYDENDKLIREVKVITLKSKLVSDFRKDFQFYKVREINNYHHAHDAYLNAVVGTALIKKYPKLESEFVYGDYKVYDVRKMIAKSEQEIGKATAKYFFYSNIMNFFKTEITLANGEIRKRPLIETNGETGEIVWDKGRDFATVRKVLSMPQVNIVKKTEVQTGGFSKESILPKRNSDKLIARKKDWDPKKYGGFDSPTVAYSVLVVAKVEKGKSKKLKSVKELLGITIMERSSFEKNPIDFLEAKGYKEVKKDLIIKLPKYSLFELENGRKRMLASAGELQKGNELALPSKYVNFLYLASHYEKLKGSPEDNEQKQLFVEQHKHYLDEIIEQISEFSKRVILADANLDKVLSAYNKHRDKPIREQAENIIHLFTLTNLGAPAAFKYFDTTIDRKRYTSTKEVLDATLIHQSITGLYETRIDLSQLGGDGGGSSGSSGSSGSSGSSGSSGGMDLLKPLTVERKGVKIKGYWNSQADITCVPKDLLQGEEPVRQQNVTTIHGTQEGDVYYVNLKIDGRRINTEVIGTTLDYAIITPGDVPWILKKPLELTIKLDLEEQQGTLLNNSILSKKGKEELKQLFEKYSALWQSWENQVGHRRIRPHKIATGTVKPTPQKQYHINPKAKPDIQIVINDLLKQGVLIQKESTMNTPVYPVPKPNGRWRMVLDYRAVNKVTPLIAVQNQHSYGILGSLFKGRYKTTIDLSNGFWAHPIVPEDYWITAFTWQGKQYCWTVLPQGFLNSPGLFTGDVVDLLQGIPNVEVYVDDVYISHDSEKEHLEYLDILFNRLKEAGYIISLKKSNIANSIVDFLGFQITNEGRGLTDTFKEKLENITAPTTLKQLQSILGLLNFARNFIPDFTELIAPLYALIPKSTKNYVPWQIEHSTTLETLITKLNGAEYLQGRKGDKTLIMKVNASYTTGYIRYYNEGEKKPISYVSIVFSKTELKFTELEKLLTTVHKGLLKALDLSMGQNIHVYSPIVSMQNIQKTPQTAKKALASRWLSWLSYLEDPRIRFFYDPQMPALKDLPAVDTGKDNKKHPSNFQHIFYTDGSAITSPTKEGHLNAGMGIVYFINKDGNLQKQQEWSISLGNHTAQFAEIAAFEFALKKCLPLGGNILVVTDSNYVAKAYNEELDVWASNGFVNNRKKPLKHISKWKSVADLKRLRPDVVVTHEPGHQKLDSSPHAYGNNLADQLATQASFKVHAGKRTADGSEFEKRTADGSEFESPKKKAKVE

SEQ ID NO: 723 - protein, 2171 aa, synthetic construct
  source 1..2171: note = Description of Artificial Sequence: Synthetic polypeptide
MPAAKRVKLDGGDKKYSIGLDIGTNSVGWAVITDEYKVPSKKFKVLGNTDRHSIKKNLIGALLFDSGETAEATRLKRTARRRYTRRKNRICYLQEIFSNEMAKVDDSFFHRLEESFLVEEDKKHERHPIFGNIVDEVAYHEKYPTIYHLRKKLVDSTDKADLRLIYLALAHMIKFRGHFLIEGDLNPDNSDVDKLFIQLVQTYNQLFEENPINASGVDAKAILSARLSKSRRLENLIAQLPGEKKNGLFGNLIALSLGLTPNFKSNFDLAEDAKLQLSKDTYDDDLDNLLAQIGDQYADLFLAAKNLSDAILLSDILRVNTEITKAPLSASMIKRYDEHHQDLTLLKALVRQQLPEKYKEIFFDQSKNGYAGYIDGGASQEEFYKFIKPILEKMDGTEELLVKLNREDLLRKQRTFDNGSIPHQIHLGELHAILRRQEDFYPFLKDNREKIEKILTFRIPYYVGPLARGNSRFAWMTRKSEETITPWNFEEVVDKGASAQSFIERMTNFDKNLPNEKVLPKHSLLYEYFTVYNELTKVKYVTEGMRKPAFLSGEQKKAIVDLLFKTNRKVTVKQLKEDYFKKIECFDSVEISGVEDRFNASLGTYHDLLKIIKDKDFLDNEENEDILEDIVLTLTLFEDREMIEERLKTYAHLFDDKVMKQLKRRRYTGWGRLSRKLINGIRDKQSGKTILDFLKSDGFANRNFMQLIHDDSLTFKEDIQKAQVSGQGDSLHEHIANLAGSPAIKKGILQTVKVVDELVKVMGRHKPENIVIEMARENQTTQKGQKNSRERMKRIEEGIKELGSQILKEHPVENTQLQNEKLYLYYLQNGRDMYVDQELDINRLSDYDVDHIVPQSFLKDDSIDNKVLTRSDKARGKSDNVPSEEVVKKMKNYWRQLLNAKLITQRKFDNLTKAERGGLSELDKAGFIKRQLVETRQITKHVAQILDSRMNTKYDENDKLIREVKVITLKSKLVSDFRKDFQFYKVREINNYHHAHDAYLNAVVGTALIKKYPKLESEFVYGDYKVYDVRKMIAKSEQEIGKATAKYFFYSNIMNFFKTEITLANGEIRKRPLIETNGETGEIVWDKGRDFATVRKVLSMPQVNIVKKTEVQTGGFSKESILPKRNSDKLIARKKDWDPKKYGGFDSPTVAYSVLVVAKVEKGKSKKLKSVKELLGITIMERSSFEKNPIDFLEAKGYKEVKKDLIIKLPKYSLFELENGRKRMLASAGELQKGNELALPSKYVNFLYLASHYEKLKGSPEDNEQKQLFVEQHKHYLDEIIEQISEFSKRVILADANLDKVLSAYNKHRDKPIREQAENIIHLFTLTNLGAPAAFKYFDTTIDRKRYTSTKEVLDATLIHQSITGLYETRIDLSQLGGDGGPAPAPAPAPGGMDLLKPLTVERKGVKIKGYWNSQADITCVPKDLLQGEEPVRQQNVTTIHGTQEGDVYYVNLKIDGRRINTEVIGTTLDYAIITPGDVPWILKKPLELTIKLDLEEQQGTLLNNSILSKKGKEELKQLFEKYSALWQSWENQVGHRRIRPHKIATGTVKPTPQKQYHINPKAKPDIQIVINDLLKQGVLIQKESTMNTPVYPVPKPNGRWRMVLDYRAVNKVTPLIAVQNQHSYGILGSLFKGRYKTTIDLSNGFWAHPIVPEDYWITAFTWQGKQYCWTVLPQGFLNSPGLFTGDVVDLLQGIPNVEVYVDDVYISHDSEKEHLEYLDILFNRLKEAGYIISLKKSNIANSIVDFLGFQITNEGRGLTDTFKEKLENITAPTTLKQLQSILGLLNFARNFIPDFTELIAPLYALIPKSTKNYVPWQIEHSTTLETLITKLNGAEYLQGRKGDKTLIMKVNASYTTGYIRYYNEGEKKPISYVSIVFSKTELKFTELEKLLTTVHKGLLKALDLSMGQNIHVYSPIVSMQNIQKTPQTAKKALASRWLSWLSYLEDPRIRFFYDPQMPALKDLPAVDTGKDNKKHPSNFQHIFYTDGSAITSPTKEGHLNAGMGIVYFINKDGNLQKQQEWSISLGNHTAQFAEIAAFEFALKKCLPLGGNILVVTDSNYVAKAYNEELDVWASNGFVNNRKKPLKHISKWKSVADLKRLRPDVVVTHEPGHQKLDSSPHAYGNNLADQLATQASFKVHAGKRTADGSEFEKRTADGSEFESPKKKAKVE

SEQ ID NO: 724 - protein, 2170 aa, synthetic construct
  source 1..2170: note = Description of Artificial Sequence: Synthetic polypeptide
MPAAKRVKLDGGDKKYSIGLDIGTNSVGWAVITDEYKVPSKKFKVLGNTDRHSIKKNLIGALLFDSGETAEATRLKRTARRRYTRRKNRICYLQEIFSNEMAKVDDSFFHRLEESFLVEEDKKHERHPIFGNIVDEVAYHEKYPTIYHLRKKLVDSTDKADLRLIYLALAHMIKFRGHFLIEGDLNPDNSDVDKLFIQLVQTYNQLFEENPINASGVDAKAILSARLSKSRRLENLIAQLPGEKKNGLFGNLIALSLGLTPNFKSNFDLAEDAKLQLSKDTYDDDLDNLLAQIGDQYADLFLAAKNLSDAILLSDILRVNTEITKAPLSASMIKRYDEHHQDLTLLKALVRQQLPEKYKEIFFDQSKNGYAGYIDGGASQEEFYKFIKPILEKMDGTEELLVKLNREDLLRKQRTFDNGSIPHQIHLGELHAILRRQEDFYPFLKDNREKIEKILTFRIPYYVGPLARGNSRFAWMTRKSEETITPWNFEEVVDKGASAQSFIERMTNFDKNLPNEKVLPKHSLLYEYFTVYNELTKVKYVTEGMRKPAFLSGEQKKAIVDLLFKTNRKVTVKQLKEDYFKKIECFDSVEISGVEDRFNASLGTYHDLLKIIKDKDFLDNEENEDILEDIVLTLTLFEDREMIEERLKTYAHLFDDKVMKQLKRRRYTGWGRLSRKLINGIRDKQSGKTILDFLKSDGFANRNFMQLIHDDSLTFKEDIQKAQVSGQGDSLHEHIANLAGSPAIKKGILQTVKVVDELVKVMGRHKPENIVIEMARENQTTQKGQKNSRERMKRIEEGIKELGSQILKEHPVENTQLQNEKLYLYYLQNGRDMYVDQELDINRLSDYDVDHIVPQSFLKDDSIDNKVLTRSDKARGKSDNVPSEEVVKKMKNYWRQLLNAKLITQRKFDNLTKAERGGLSELDKAGFIKRQLVETRQITKHVAQILDSRMNTKYDENDKLIREVKVITLKSKLVSDFRKDFQFYKVREINNYHHAHDAYLNAVVGTALIKKYPKLESEFVYGDYKVYDVRKMIAKSEQEIGKATAKYFFYSNIMNFFKTEITLANGEIRKRPLIETNGETGEIVWDKGRDFATVRKVLSMPQVNIVKKTEVQTGGFSKESILPKRNSDKLIARKKDWDPKKYGGFDSPTVAYSVLVVAKVEKGKSKKLKSVKELLGITIMERSSFEKNPIDFLEAKGYKEVKKDLIIKLPKYSLFELENGRKRMLASAGELQKGNELALPSKYVNFLYLASHYEKLKGSPEDNEQKQLFVEQHKHYLDEIIEQISEFSKRVILADANLDKVLSAYNKHRDKPIREQAENIIHLFTLTNLGAPAAFKYFDTTIDRKRYTSTKEVLDATLIHQSITGLYETRIDLSQLGGDGGGSSEAAAKGGMDLLKPLTVERKGVKIKGYWNSQADITCVPKDLLQGEEPVRQQNVTTIHGTQEGDVYYVNLKIDGRRINTEVIGTTLDYAIITPGDVPWILKKPLELTIKLDLEEQQGTLLNNSILSKKGKEELKQLFEKYSALWQSWENQVGHRRIRPHKIATGTVKPTPQKQYHINPKAKPDIQIVINDLLKQGVLIQKESTMNTPVYPVPKPNGRWRMVLDYRAVNKVTPLIAVQNQHSYGILGSLFKGRYKTTIDLSNGFWAHPIVPEDYWITAFTWQGKQYCWTVLPQGFLNSPGLFTGDVVDLLQGIPNVEVYVDDVYISHDSEKEHLEYLDILFNRLKEAGYIISLKKSNIANSIVDFLGFQITNEGRGLTDTFKEKLENITAPTTLKQLQSILGLLNFARNFIPDFTELIAPLYALIPKSTKNYVPWQIEHSTTLETLITKLNGAEYLQGRKGDKTLIMKVNASYTTGYIRYYNEGEKKPISYVSIVFSKTELKFTELEKLLTTVHKGLLKALDLSMGQNIHVYSPIVSMQNIQKTPQTAKKALASRWLSWLSYLEDPRIRFFYDPQMPALKDLPAVDTGKDNKKHPSNFQHIFYTDGSAITSPTKEGHLNAGMGIVYFINKDGNLQKQQEWSISLGNHTAQFAEIAAFEFALKKCLPLGGNILVVTDSNYVAKAYNEELDVWASNGFVNNRKKPLKHISKWKSVADLKRLRPDVVVTHEPGHQKLDSSPHAYGNNLADQLATQASFKVHAGKRTADGSEFEKRTADGSEFESPKKKAKVE

SEQ ID NO: 725 - protein, 2165 aa, synthetic construct
  source 1..2165: note = Description of Artificial Sequence: Synthetic polypeptide
MPAAKRVKLDGGDKKYSIGLDIGTNSVGWAVITDEYKVPSKKFKVLGNTDRHSIKKNLIGALLFDSGETAEATRLKRTARRRYTRRKNRICYLQEIFSNEMAKVDDSFFHRLEESFLVEEDKKHERHPIFGNIVDEVAYHEKYPTIYHLRKKLVDSTDKADLRLIYLALAHMIKFRGHFLIEGDLNPDNSDVDKLFIQLVQTYNQLFEENPINASGVDAKAILSARLSKSRRLENLIAQLPGEKKNGLFGNLIALSLGLTPNFKSNFDLAEDAKLQLSKDTYDDDLDNLLAQIGDQYADLFLAAKNLSDAILLSDILRVNTEITKAPLSASMIKRYDEHHQDLTLLKALVRQQLPEKYKEIFFDQSKNGYAGYIDGGASQEEFYKFIKPILEKMDGTEELLVKLNREDLLRKQRTFDNGSIPHQIHLGELHAILRRQEDFYPFLKDNREKIEKILTFRIPYYVGPLARGNSRFAWMTRKSEETITPWNFEEVVDKGASAQSFIERMTNFDKNLPNEKVLPKHSLLYEYFTVYNELTKVKYVTEGMRKPAFLSGEQKKAIVDLLFKTNRKVTVKQLKEDYFKKIECFDSVEISGVEDRFNASLGTYHDLLKIIKDKDFLDNEENEDILEDIVLTLTLFEDREMIEERLKTYAHLFDDKVMKQLKRRRYTGWGRLSRKLINGIRDKQSGKTILDFLKSDGFANRNFMQLIHDDSLTFKEDIQKAQVSGQGDSLHEHIANLAGSPAIKKGILQTVKVVDELVKVMGRHKPENIVIEMARENQTTQKGQKNSRERMKRIEEGIKELGSQILKEHPVENTQLQNEKLYLYYLQNGRDMYVDQELDINRLSDYDVDHIVPQSFLKDDSIDNKVLTRSDKARGKSDNVPSEEVVKKMKNYWRQLLNAKLITQRKFDNLTKAERGGLSELDKAGFIKRQLVETRQITKHVAQILDSRMNTKYDENDKLIREVKVITLKSKLVSDFRKDFQFYKVREINNYHHAHDAYLNAVVGTALIKKYPKLESEFVYGDYKVYDVRKMIAKSEQEIGKATAKYFFYSNIMNFFKTEITLANGEIRKRPLIETNGETGEIVWDKGRDFATVRKVLSMPQVNIVKKTEVQTGGFSKESILPKRNSDKLIARKKDWDPKKYGGFDSPTVAYSVLVVAKVEKGKSKKLKSVKELLGITIMERSSFEKNPIDFLEAKGYKEVKKDLIIKLPKYSLFELENGRKRMLASAGELQKGNELALPSKYVNFLYLASHYEKLKGSPEDNEQKQLFVEQHKHYLDEIIEQISEFSKRVILADANLDKVLSAYNKHRDKPIREQAENIIHLFTLTNLGAPAAFKYFDTTIDRKRYTSTKEVLDATLIHQSITGLYETRIDLSQLGGDGGGSSGGMDLLKPLTVERKGVKIKGYWNSQADITCVPKDLLQGEEPVRQQNVTTIHGTQEGDVYYVNLKIDGRRINTEVIGTTLDYAIITPGDVPWILKKPLELTIKLDLEEQQGTLLNNSILSKKGKEELKQLFEKYSALWQSWENQVGHRRIRPHKIATGTVKPTPQKQYHINPKAKPDIQIVINDLLKQGVLIQKESTMNTPVYPVPKPNGRWRMVLDYRAVNKVTPLIAVQNQHSYGILGSLFKGRYKTTIDLSNGFWAHPIVPEDYWITAFTWQGKQYCWTVLPQGFLNSPGLFTGDVVDLLQGIPNVEVYVDDVYISHDSEKEHLEYLDILFNRLKEAGYIISLKKSNIANSIVDFLGFQITNEGRGLTDTFKEKLENITAPTTLKQLQSILGLLNFARNFIPDFTELIAPLYALIPKSTKNYVPWQIEHSTTLETLITKLNGAEYLQGRKGDKTLIMKVNASYTTGYIRYYNEGEKKPISYVSIVFSKTELKFTELEKLLTTVHKGLLKALDLSMGQNIHVYSPIVSMQNIQKTPQTAKKALASRWLSWLSYLEDPRIRFFYDPQMPALKDLPAVDTGKDNKKHPSNFQHIFYTDGSAITSPTKEGHLNAGMGIVYFINKDGNLQKQQEWSISLGNHTAQFAEIAAFEFALKKCLPLGGNILVVTDSNYVAKAYNEELDVWASNGFVNNRKKPLKHISKWKSVADLKRLRPDVVVTHEPGHQKLDSSPHAYGNNLADQLATQASFKVHAGKRTADGSEFEKRTADGSEFESPKKKAKVE

SEQ ID NO: 726 - protein, 2173 aa, synthetic construct
  source 1..2173: note = Description of Artificial Sequence: Synthetic polypeptide
MPAAKRVKLDGGDKKYSIGLDIGTNSVGWAVITDEYKVPSKKFKVLGNTDRHSIKKNLIGALLFDSGETAEATRLKRTARRRYTRRKNRICYLQEIFSNEMAKVDDSFFHRLEESFLVEEDKKHERHPIFGNIVDEVAYHEKYPTIYHLRKKLVDSTDKADLRLIYLALAHMIKFRGHFLIEGDLNPDNSDVDKLFIQLVQTYNQLFEENPINASGVDAKAILSARLSKSRRLENLIAQLPGEKKNGLFGNLIALSLGLTPNFKSNFDLAEDAKLQLSKDTYDDDLDNLLAQIGDQYADLFLAAKNLSDAILLSDILRVNTEITKAPLSASMIKRYDEHHQDLTLLKALVRQQLPEKYKEIFFDQSKNGYAGYIDGGASQEEFYKFIKPILEKMDGTEELLVKLNREDLLRKQRTFDNGSIPHQIHLGELHAILRRQEDFYPFLKDNREKIEKILTFRIPYYVGPLARGNSRFAWMTRKSEETITPWNFEEVVDKGASAQSFIERMTNFDKNLPNEKVLPKHSLLYEYFTVYNELTKVKYVTEGMRKPAFLSGEQKKAIVDLLFKTNRKVTVKQLKEDYFKKIECFDSVEISGVEDRFNASLGTYHDLLKIIKDKDFLDNEENEDILEDIVLTLTLFEDREMIEERLKTYAHLFDDKVMKQLKRRRYTGWGRLSRKLINGIRDKQSGKTILDFLKSDGFANRNFMQLIHDDSLTFKEDIQKAQVSGQGDSLHEHIANLAGSPAIKKGILQTVKVVDELVKVMGRHKPENIVIEMARENQTTQKGQKNSRERMKRIEEGIKELGSQILKEHPVENTQLQNEKLYLYYLQNGRDMYVDQELDINRLSDYDVDHIVPQSFLKDDSIDNKVLTRSDKARGKSDNVPSEEVVKKMKNYWRQLLNAKLITQRKFDNLTKAERGGLSELDKAGFIKRQLVETRQITKHVAQILDSRMNTKYDENDKLIREVKVITLKSKLVSDFRKDFQFYKVREINNYHHAHDAYLNAVVGTALIKKYPKLESEFVYGDYKVYDVRKMIAKSEQEIGKATAKYFFYSNIMNFFKTEITLANGEIRKRPLIETNGETGEIVWDKGRDFATVRKVLSMPQVNIVKKTEVQTGGFSKESILPKRNSDKLIARKKDWDPKKYGGFDSPTVAYSVLVVAKVEKGKSKKLKSVKELLGITIMERSSFEKNPIDFLEAKGYKEVKKDLIIKLPKYSLFELENGRKRMLASAGELQKGNELALPSKYVNFLYLASHYEKLKGSPEDNEQKQLFVEQHKHYLDEIIEQISEFSKRVILADANLDKVLSAYNKHRDKPIREQAENIIHLFTLTNLGAPAAFKYFDTTIDRKRYTSTKEVLDATLIHQSITGLYETRIDLSQLGGDGGEAAAKGGSGGGGGMDLLKPLTVERKGVKIKGYWNSQADITCVPKDLLQGEEPVRQQNVTTIHGTQEGDVYYVNLKIDGRRINTEVIGTTLDYAIITPGDVPWILKKPLELTIKLDLEEQQGTLLNNSILSKKGKEELKQLFEKYSALWQSWENQVGHRRIRPHKIATGTVKPTPQKQYHINPKAKPDIQIVINDLLKQGVLIQKESTMNTPVYPVPKPNGRWRMVLDYRAVNKVTPLIAVQNQHSYGILGSLFKGRYKTTIDLSNGFWAHPIVPEDYWITAFTWQGKQYCWTVLPQGFLNSPGLFTGDVVDLLQGIPNVEVYVDDVYISHDSEKEHLEYLDILFNRLKEAGYIISLKKSNIANSIVDFLGFQITNEGRGLTDTFKEKLENITAPTTLKQLQSILGLLNFARNFIPDFTELIAPLYALIPKSTKNYVPWQIEHSTTLETLITKLNGAEYLQGRKGDKTLIMKVNASYTTGYIRYYNEGEKKPISYVSIVFSKTELKFTELEKLLTTVHKGLLKALDLSMGQNIHVYSPIVSMQNIQKTPQTAKKALASRWLSWLSYLEDPRIRFFYDPQMPALKDLPAVDTGKDNKKHPSNFQHIFYTDGSAITSPTKEGHLNAGMGIVYFINKDGNLQKQQEWSISLGNHTAQFAEIAAFEFALKKCLPLGGNILVVTDSNYVAKAYNEELDVWASNGFVNNRKKPLKHISKWKSVADLKRLRPDVVVTHEPGHQKLDSSPHAYGNNLADQLATQASFKVHAGKRTADGSEFEKRTADGSEFESPKKKAKVE

SEQ ID NO: 727 - protein, 2173 aa, synthetic construct
  source 1..2173: note = Description of Artificial Sequence: Synthetic polypeptide
MPAAKRVKLDGGDKKYSIGLDIGTNSVGWAVITDEYKVPSKKFKVLGNTDRHSIKKNLIGALLFDSGETAEATRLKRTARRRYTRRKNRICYLQEIFSNEMAKVDDSFFHRLEESFLVEEDKKHERHPIFGNIVDEVAYHEKYPTIYHLRKKLVDSTDKADLRLIYLALAHMIKFRGHFLIEGDLNPDNSDVDKLFIQLVQTYNQLFEENPINASGVDAKAILSARLSKSRRLENLIAQLPGEKKNGLFGNLIALSLGLTPNFKSNFDLAEDAKLQLSKDTYDDDLDNLLAQIGDQYADLFLAAKNLSDAILLSDILRVNTEITKAPLSASMIKRYDEHHQDLTLLKALVRQQLPEKYKEIFFDQSKNGYAGYIDGGASQEEFYKFIKPILEKMDGTEELLVKLNREDLLRKQRTFDNGSIPHQIHLGELHAILRRQEDFYPFLKDNREKIEKILTFRIPYYVGPLARGNSRFAWMTRKSEETITPWNFEEVVDKGASAQSFIERMTNFDKNLPNEKVLPKHSLLYEYFTVYNELTKVKYVTEGMRKPAFLSGEQKKAIVDLLFKTNRKVTVKQLKEDYFKKIECFDSVEISGVEDRFNASLGTYHDLLKIIKDKDFLDNEENEDILEDIVLTLTLFEDREMIEERLKTYAHLFDDKVMKQLKRRRYTGWGRLSRKLINGIRDKQSGKTILDFLKSDGFANRNFMQLIHDDSLTFKEDIQKAQVSGQGDSLHEHIANLAGSPAIKKGILQTVKVVDELVKVMGRHKPENIVIEMARENQTTQKGQKNSRERMKRIEEGIKELGSQILKEHPVENTQLQNEKLYLYYLQNGRDMYVDQELDINRLSDYDVDHIVPQSFLKDDSIDNKVLTRSDKARGKSDNVPSEEVVKKMKNYWRQLLNAKLITQRKFDNLTKAERGGLSELDKAGFIKRQLVETRQITKHVAQILDSRMNTKYDENDKLIREVKVITLKSKLVSDFRKDFQFYKVREINNYHHAHDAYLNAVVGTALIKKYPKLESEFVYGDYKVYDVRKMIAKSEQEIGKATAKYFFYSNIMNFFKTEITLANGEIRKRPLIETNGETGEIVWDKGRDFATVRKVLSMPQVNIVKKTEVQTGGFSKESILPKRNSDKLIARKKDWDPKKYGGFDSPTVAYSVLVVAKVEKGKSKKLKSVKELLGITIMERSSFEKNPIDFLEAKGYKEVKKDLIIKLPKYSLFELENGRKRMLASAGELQKGNELALPSKYVNFLYLASHYEKLKGSPEDNEQKQLFVEQHKHYLDEIIEQISEFSKRVILADANLDKVLSAYNKHRDKPIREQAENIIHLFTLTNLGAPAAFKYFDTTIDRKRYTSTKEVLDATLIHQSITGLYETRIDLSQLGGDGGGSSEAAAKPAPGGMDLLKPLTVERKGVKIKGYWNSQADITCVPKDLLQGEEPVRQQNVTTIHGTQEGDVYYVNLKIDGRRINTEVIGTTLDYAIITPGDVPWILKKPLELTIKLDLEEQQGTLLNNSILSKKGKEELKQLFEKYSALWQSWENQVGHRRIRPHKIATGTVKPTPQKQYHINPKAKPDIQIVINDLLKQGVLIQKESTMNTPVYPVPKPNGRWRMVLDYRAVNKVTPLIAVQNQHSYGILGSLFKGRYKTTIDLSNGFWAHPIVPEDYWITAFTWQGKQYCWTVLPQGFLNSPGLFTGDVVDLLQGIPNVEVYVDDVYISHDSEKEHLEYLDILFNRLKEAGYIISLKKSNIANSIVDFLGFQITNEGRGLTDTFKEKLENITAPTTLKQLQSILGLLNFARNFIPDFTELIAPLYALIPKSTKNYVPWQIEHSTTLETLITKLNGAEYLQGRKGDKTLIMKVNASYTTGYIRYYNEGEKKPISYVSIVFSKTELKFTELEKLLTTVHKGLLKALDLSMGQNIHVYSPIVSMQNIQKTPQTAKKALASRWLSWLSYLEDPRIRFFYDPQMPALKDLPAVDTGKDNKKHPSNFQHIFYTDGSAITSPTKEGHLNAGMGIVYFINKDGNLQKQQEWSISLGNHTAQFAEIAAFEFALKKCLPLGGNILVVTDSNYVAKAYNEELDVWASNGFVNNRKKPLKHISKWKSVADLKRLRPDVVVTHEPGHQKLDSSPHAYGNNLADQLATQASFKVHAGKRTADGSEFEKRTADGSEFESPKKKAKVE

SEQ ID NO: 728 - protein, 2173 aa, synthetic construct
  source 1..2173: note = Description of Artificial Sequence: Synthetic polypeptide
MPAAKRVKLDGGDKKYSIGLDIGTNSVGWAVITDEYKVPSKKFKVLGNTDRHSIKKNLIGALLFDSGETAEATRLKRTARRRYTRRKNRICYLQEIFSNEMAKVDDSFFHRLEESFLVEEDKKHERHPIFGNIVDEVAYHEKYPTIYHLRKKLVDSTDKADLRLIYLALAHMIKFRGHFLIEGDLNPDNSDVDKLFIQLVQTYNQLFEENPINASGVDAKAILSARLSKSRRLENLIAQLPGEKKNGLFGNLIALSLGLTPNFKSNFDLAEDAKLQLSKDTYDDDLDNLLAQIGDQYADLFLAAKNLSDAILLSDILRVNTEITKAPLSASMIKRYDEHHQDLTLLKALVRQQLPEKYKEIFFDQSKNGYAGYIDGGASQEEFYKFIKPILEKMDGTEELLVKLNREDLLRKQRTFDNGSIPHQIHLGELHAILRRQEDFYPFLKDNREKIEKILTFRIPYYVGPLARGNSRFAWMTRKSEETITPWNFEEVVDKGASAQSFIERMTNFDKNLPNEKVLPKHSLLYEYFTVYNELTKVKYVTEGMRKPAFLSGEQKKAIVDLLFKTNRKVTVKQLKEDYFKKIECFDSVEISGVEDRFNASLGTYHDLLKIIKDKDFLDNEENEDILEDIVLTLTLFEDREMIEERLKTYAHLFDDKVMKQLKRRRYTGWGRLSRKLINGIRDKQSGKTILDFLKSDGFANRNFMQLIHDDSLTFKEDIQKAQVSGQGDSLHEHIANLAGSPAIKKGILQTVKVVDELVKVMGRHKPENIVIEMARENQTTQKGQKNSRERMKRIEEGIKELGSQILKEHPVENTQLQNEKLYLYYLQNGRDMYVDQELDINRLSDYDVDHIVPQSFLKDDSIDNKVLTRSDKARGKSDNVPSEEVVKKMKNYWRQLLNAKLITQRKFDNLTKAERGGLSELDKAGFIKRQLVETRQITKHVAQILDSRMNTKYDENDKLIREVKVITLKSKLVSDFRKDFQFYKVREINNYHHAHDAYLNAVVGTALIKKYPKLESEFVYGDYKVYDVRKMIAKSEQEIGKATAKYFFYSNIMNFFKTEITLANGEIRKRPLIETNGETGEIVWDKGRDFATVRKVLSMPQVNIVKKTEVQTGGFSKESILPKRNSDKLIARKKDWDPKKYGGFDSPTVAYSVLVVAKVEKGKSKKLKSVKELLGITIMERSSFEKNPIDFLEAKGYKEVKKDLIIKLPKYSLFELENGRKRMLASAGELQKGNELALPSKYVNFLYLASHYEKLKGSPEDNEQKQLFVEQHKHYLDEIIEQISEFSKRVILADANLDKVLSAYNKHRDKPIREQAENIIHLFTLTNLGAPAAFKYFDTTIDRKRYTSTKEVLDATLIHQSITGLYETRIDLSQLGGDGGGSSGGGEAAAKGGMDLLKPLTVERKGVKIKGYWNSQADITCVPKDLLQGEEPVRQQNVTTIHGTQEGDVYYVNLKIDGRRINTEVIGTTLDYAIITPGDVPWILKKPLELTIKLDLEEQQGTLLNNSILSKKGKEELKQLFEKYSALWQSWENQVGHRRIRPHKIATGTVKPTPQKQYHINPKAKPDIQIVINDLLKQGVLIQKESTMNTPVYPVPKPNGRWRMVLDYRAVNKVTPLIAVQNQHSYGILGSLFKGRYKTTIDLSNGFWAHPIVPEDYWITAFTWQGKQYCWTVLPQGFLNSPGLFTGDVVDLLQGIPNVEVYVDDVYISHDSEKEHLEYLDILFNRLKEAGYIISLKKSNIANSIVDFLGFQITNEGRGLTDTFKEKLENITAPTTLKQLQSILGLLNFARNFIPDFTELIAPLYALIPKSTKNYVPWQIEHSTTLETLITKLNGAEYLQGRKGDKTLIMKVNASYTTGYIRYYNEGEKKPISYVSIVFSKTELKFTELEKLLTTVHKGLLKALDLSMGQNIHVYSPIVSMQNIQKTPQTAKKALASRWLSWLSYLEDPRIRFFYDPQMPALKDLPAVDTGKDNKKHPSNFQHIFYTDGSAITSPTKEGHLNAGMGIVYFINKDGNLQKQQEWSISLGNHTAQFAEIAAFEFALKKCLPLGGNILVVTDSNYVAKAYNEELDVWASNGFVNNRKKPLKHISKWKSVADLKRLRPDVVVTHEPGHQKLDSSPHAYGNNLADQLATQASFKVHAGKRTADGSEFEKRTADGSEFESPKKKAKVE

SEQ ID NO: 729 - protein, 2171 aa, synthetic construct
  source 1..2171: note = Description of Artificial Sequence: Synthetic polypeptide
MPAAKRVKLDGGDKKYSIGLDIGTNSVGWAVITDEYKVPSKKFKVLGNTDRHSIKKNLIGALLFDSGETAEATRLKRTARRRYTRRKNRICYLQEIFSNEMAKVDDSFFHRLEESFLVEEDKKHERHPIFGNIVDEVAYHEKYPTIYHLRKKLVDSTDKADLRLIYLALAHMIKFRGHFLIEGDLNPDNSDVDKLFIQLVQTYNQLFEENPINASGVDAKAILSARLSKSRRLENLIAQLPGEKKNGLFGNLIALSLGLTPNFKSNFDLAEDAKLQLSKDTYDDDLDNLLAQIGDQYADLFLAAKNLSDAILLSDILRVNTEITKAPLSASMIKRYDEHHQDLTLLKALVRQQLPEKYKEIFFDQSKNGYAGYIDGGASQEEFYKFIKPILEKMDGTEELLVKLNREDLLRKQRTFDNGSIPHQIHLGELHAILRRQEDFYPFLKDNREKIEKILTFRIPYYVGPLARGNSRFAWMTRKSEETITPWNFEEVVDKGASAQSFIERMTNFDKNLPNEKVLPKHSLLYEYFTVYNELTKVKYVTEGMRKPAFLSGEQKKAIVDLLFKTNRKVTVKQLKEDYFKKIECFDSVEISGVEDRFNASLGTYHDLLKIIKDKDFLDNEENEDILEDIVLTLTLFEDREMIEERLKTYAHLFDDKVMKQLKRRRYTGWGRLSRKLINGIRDKQSGKTILDFLKSDGFANRNFMQLIHDDSLTFKEDIQKAQVSGQGDSLHEHIANLAGSPAIKKGILQTVKVVDELVKVMGRHKPENIVIEMARENQTTQKGQKNSRERMKRIEEGIKELGSQILKEHPVENTQLQNEKLYLYYLQNGRDMYVDQELDINRLSDYDVDHIVPQSFLKDDSIDNKVLTRSDKARGKSDNVPSEEVVKKMKNYWRQLLNAKLITQRKFDNLTKAERGGLSELDKAGFIKRQLVETRQITKHVAQILDSRMNTKYDENDKLIREVKVITLKSKLVSDFRKDFQFYKVREINNYHHAHDAYLNAVVGTALIKKYPKLESEFVYGDYKVYDVRKMIAKSEQEIGKATAKYFFYSNIMNFFKTEITLANGEIRKRPLIETNGETGEIVWDKGRDFATVRKVLSMPQVNIVKKTEVQTGGFSKESILPKRNSDKLIARKKDWDPKKYGGFDSPTVAYSVLVVAKVEKGKSKKLKSVKELLGITIMERSSFEKNPIDFLEAKGYKEVKKDLIIKLPKYSLFELENGRKRMLASAGELQKGNELALPSKYVNFLYLASHYEKLKGSPEDNEQKQLFVEQHKHYLDEIIEQISEFSKRVILADANLDKVLSAYNKHRDKPIREQAENIIHLFTLTNLGAPAAFKYFDTTIDRKRYTSTKEVLDATLIHQSITGLYETRIDLSQLGGDGGGGSGSSGGGGGMDLLKPLTVERKGVKIKGYWNSQADITCVPKDLLQGEEPVRQQNVTTIHGTQEGDVYYVNLKIDGRRINTEVIGTTLDYAIITPGDVPWILKKPLELTIKLDLEEQQGTLLNNSILSKKGKEELKQLFEKYSALWQSWENQVGHRRIRPHKIATGTVKPTPQKQYHINPKAKPDIQIVINDLLKQGVLIQKESTMNTPVYPVPKPNGRWRMVLDYRAVNKVTPLIAVQNQHSYGILGSLFKGRYKTTIDLSNGFWAHPIVPEDYWITAFTWQGKQYCWTVLPQGFLNSPGLFTGDVVDLLQGIPNVEVYVDDVYISHDSEKEHLEYLDILFNRLKEAGYIISLKKSNIANSIVDFLGFQITNEGRGLTDTFKEKLENITAPTTLKQLQSILGLLNFARNFIPDFTELIAPLYALIPKSTKNYVPWQIEHSTTLETLITKLNGAEYLQGRKGDKTLIMKVNASYTTGYIRYYNEGEKKPISYVSIVFSKTELKFTELEKLLTTVHKGLLKALDLSMGQNIHVYSPIVSMQNIQKTPQTAKKALASRWLSWLSYLEDPRIRFFYDPQMPALKDLPAVDTGKDNKKHPSNFQHIFYTDGSAITSPTKEGHLNAGMGIVYFINKDGNLQKQQEWSISLGNHTAQFAEIAAFEFALKKCLPLGGNILVVTDSNYVAKAYNEELDVWASNGFVNNRKKPLKHISKWKSVADLKRLRPDVVVTHEPGHQKLDSSPHAYGNNLADQLATQASFKVHAGKRTADGSEFEKRTADGSEFESPKKKAKVE

SEQ ID NO: 730 - protein, 2173 aa, synthetic construct
  source 1..2173: note = Description of Artificial Sequence: Synthetic polypeptide
MPAAKRVKLDGGDKKYSIGLDIGTNSVGWAVITDEYKVPSKKFKVLGNTDRHSIKKNLIGALLFDSGETAEATRLKRTARRRYTRRKNRICYLQEIFSNEMAKVDDSFFHRLEESFLVEEDKKHERHPIFGNIVDEVAYHEKYPTIYHLRKKLVDSTDKADLRLIYLALAHMIKFRGHFLIEGDLNPDNSDVDKLFIQLVQTYNQLFEENPINASGVDAKAILSARLSKSRRLENLIAQLPGEKKNGLFGNLIALSLGLTPNFKSNFDLAEDAKLQLSKDTYDDDLDNLLAQIGDQYADLFLAAKNLSDAILLSDILRVNTEITKAPLSASMIKRYDEHHQDLTLLKALVRQQLPEKYKEIFFDQSKNGYAGYIDGGASQEEFYKFIKPILEKMDGTEELLVKLNREDLLRKQRTFDNGSIPHQIHLGELHAILRRQEDFYPFLKDNREKIEKILTFRIPYYVGPLARGNSRFAWMTRKSEETITPWNFEEVVDKGASAQSFIERMTNFDKNLPNEKVLPKHSLLYEYFTVYNELTKVKYVTEGMRKPAFLSGEQKKAIVDLLFKTNRKVTVKQLKEDYFKKIECFDSVEISGVEDRFNASLGTYHDLLKIIKDKDFLDNEENEDILEDIVLTLTLFEDREMIEERLKTYAHLFDDKVMKQLKRRRYTGWGRLSRKLINGIRDKQSGKTILDFLKSDGFANRNFMQLIHDDSLTFKEDIQKAQVSGQGDSLHEHIANLAGSPAIKKGILQTVKVVDELVKVMGRHKPENIVIEMARENQTTQKGQKNSRERMKRIEEGIKELGSQILKEHPVENTQLQNEKLYLYYLQNGRDMYVDQELDINRLSDYDVDHIVPQSFLKDDSIDNKVLTRSDKARGKSDNVPSEEVVKKMKNYWRQLLNAKLITQRKFDNLTKAERGGLSELDKAGFIKRQLVETRQITKHVAQILDSRMNTKYDENDKLIREVKVITLKSKLVSDFRKDFQFYKVREINNYHHAHDAYLNAVVGTALIKKYPKLESEFVYGDYKVYDVRKMIAKSEQEIGKATAKYFFYSNIMNFFKTEITLANGEIRKRPLIETNGETGEIVWDKGRDFATVRKVLSMPQVNIVKKTEVQTGGFSKESILPKRNSDKLIARKKDWDPKKYGGFDSPTVAYSVLVVAKVEKGKSKKLKSVKELLGITIMERSSFEKNPIDFLEAKGYKEVKKDLIIKLPKYSLFELENGRKRMLASAGELQKGNELALPSKYVNFLYLASHYEKLKGSPEDNEQKQLFVEQHKHYLDEIIEQISEFSKRVILADANLDKVLSAYNKHRDKPIREQAENIIHLFTLTNLGAPAAFKYFDTTIDRKRYTSTKEVLDATLIHQSITGLYETRIDLSQLGGDGGGSSGGSEAAAKGGMDLLKPLTVERKGVKIKGYWNSQADITCVPKDLLQGEEPVRQQNVTTIHGTQEGDVYYVNLKIDGRRINTEVIGTTLDYAIITPGDVPWILKKPLELTIKLDLEEQQGTLLNNSILSKKGKEELKQLFEKYSALWQSWENQVGHRRIRPHKIATGTVKPTPQKQYHINPKAKPDIQIVINDLLKQGVLIQKESTMNTPVYPVPKPNGRWRMVLDYRAVNKVTPLIAVQNQHSYGILGSLFKGRYKTTIDLSNGFWAHPIVPEDYWITAFTWQGKQYCWTVLPQGFLNSPGLFTGDVVDLLQGIPNVEVYVDDVYISHDSEKEHLEYLDILFNRLKEAGYIISLKKSNIANSIVDFLGFQITNEGRGLTDTFKEKLENITAPTTLKQLQSILGLLNFARNFIPDFTELIAPLYALIPKSTKNYVPWQIEHSTTLETLITKLNGAEYLQGRKGDKTLIMKVNASYTTGYIRYYNEGEKKPISYVSIVFSKTELKFTELEKLLTTVHKGLLKALDLSMGQNIHVYSPIVSMQNIQKTPQTAKKALASRWLSWLSYLEDPRIRFFYDPQMPALKDLPAVDTGKDNKKHPSNFQHIFYTDGSAITSPTKEGHLNAGMGIVYFINKDGNLQKQQEWSISLGNHTAQFAEIAAFEFALKKCLPLGGNILVVTDSNYVAKAYNEELDVWASNGFVNNRKKPLKHISKWKSVADLKRLRPDVVVTHEPGHQKLDSSPHAYGNNLADQLATQASFKVHAGKRTADGSEFEKRTADGSEFESPKKKAKVE

SEQ ID NO: 731 - protein, 2171 aa, synthetic construct
  source 1..2171: note = Description of Artificial Sequence: Synthetic polypeptide
MPAAKRVKLDGGDKKYSIGLDIGTNSVGWAVITDEYKVPSKKFKVLGNTDRHSIKKNLIGALLFDSGETAEATRLKRTARRRYTRRKNRICYLQEIFSNEMAKVDDSFFHRLEESFLVEEDKKHERHPIFGNIVDEVAYHEKYPTIYHLRKKLVDSTDKADLRLIYLALAHMIKFRGHFLIEGDLNPDNSDVDKLFIQLVQTYNQLFEENPINASGVDAKAILSARLSKSRRLENLIAQLPGEKKNGLFGNLIALSLGLTPNFKSNFDLAEDAKLQLSKDTYDDDLDNLLAQIGDQYADLFLAAKNLSDAILLSDILRVNTEITKAPLSASMIKRYDEHHQDLTLLKALVRQQLPEKYKEIFFDQSKNGYAGYIDGGASQEEFYKFIKPILEKMDGTEELLVKLNREDLLRKQRTFDNGSIPHQIHLGELHAILRRQEDFYPFLKDNREKIEKILTFRIPYYVGPLARGNSRFAWMTRKSEETITPWNFEEVVDKGASAQSFIERMTNFDKNLPNEKVLPKHSLLYEYFTVYNELTKVKYVTEGMRKPAFLSGEQKKAIVDLLFKTNRKVTVKQLKEDYFKKIECFDSVEISGVEDRFNASLGTYHDLLKIIKDKDFLDNEENEDILEDIVLTLTLFEDREMIEERLKTYAHLFDDKVMKQLKRRRYTGWGRLSRKLINGIRDKQSGKTILDFLKSDGFANRNFMQLIHDDSLTFKEDIQKAQVSGQGDSLHEHIANLAGSPAIKKGILQTVKVVDELVKVMGRHKPENIVIEMARENQTTQKGQKNSRERMKRIEEGIKELGSQILKEHPVENTQLQNEKLYLYYLQNGRDMYVDQELDINRLSDYDVDHIVPQSFLKDDSIDNKVLTRSDKARGKSDNVPSEEVVKKMKNYWRQLLNAKLITQRKFDNLTKAERGGLSELDKAGFIKRQLVETRQITKHVAQILDSRMNTKYDENDKLIREVKVITLKSKLVSDFRKDFQFYKVREINNYHHAHDAYLNAVVGTALIKKYPKLESEFVYGDYKVYDVRKMIAKSEQEIGKATAKYFFYSNIMNFFKTEITLANGEIRKRPLIETNGETGEIVWDKGRDFATVRKVLSMPQVNIVKKTEVQTGGFSKESILPKRNSDKLIARKKDWDPKKYGGFDSPTVAYSVLVVAKVEKGKSKKLKSVKELLGITIMERSSFEKNPIDFLEAKGYKEVKKDLIIKLPKYSLFELENGRKRMLASAGELQKGNELALPSKYVNFLYLASHYEKLKGSPEDNEQKQLFVEQHKHYLDEIIEQISEFSKRVILADANLDKVLSAYNKHRDKPIREQAENIIHLFTLTNLGAPAAFKYFDTTIDRKRYTSTKEVLDATLIHQSITGLYETRIDLSQLGGDGGGGSGGGPAPGGMDLLKPLTVERKGVKIKGYWNSQADITCVPKDLLQGEEPVRQQNVTTIHGTQEGDVYYVNLKIDGRRINTEVIGTTLDYAIITPGDVPWILKKPLELTIKLDLEEQQGTLLNNSILSKKGKEELKQLFEKYSALWQSWENQVGHRRIRPHKIATGTVKPTPQKQYHINPKAKPDIQIVINDLLKQGVLIQKESTMNTPVYPVPKPNGRWRMVLDYRAVNKVTPLIAVQNQHSYGILGSLFKGRYKTTIDLSNGFWAHPIVPEDYWITAFTWQGKQYCWTVLPQGFLNSPGLFTGDVVDLLQGIPNVEVYVDDVYISHDSEKEHLEYLDILFNRLKEAGYIISLKKSNIANSIVDFLGFQITNEGRGLTDTFKEKLENITAPTTLKQLQSILGLLNFARNFIPDFTELIAPLYALIPKSTKNYVPWQIEHSTTLETLITKLNGAEYLQGRKGDKTLIMKVNASYTTGYIRYYNEGEKKPISYVSIVFSKTELKFTELEKLLTTVHKGLLKALDLSMGQNIHVYSPIVSMQNIQKTPQTAKKALASRWLSWLSYLEDPRIRFFYDPQMPALKDLPAVDTGKDNKKHPSNFQHIFYTDGSAITSPTKEGHLNAGMGIVYFINKDGNLQKQQEWSISLGNHTAQFAEIAAFEFALKKCLPLGGNILVVTDSNYVAKAYNEELDVWASNGFVNNRKKPLKHISKWKSVADLKRLRPDVVVTHEPGHQKLDSSPHAYGNNLADQLATQASFKVHAGKRTADGSEFEKRTADGSEFESPKKKAKVE

SEQ ID NO: 732 - protein, 2173 aa, synthetic construct
  source 1..2173: note = Description of Artificial Sequence: Synthetic polypeptide
MPAAKRVKLDGGDKKYSIGLDIGTNSVGWAVITDEYKVPSKKFKVLGNTDRHSIKKNLIGALLFDSGETAEATRLKRTARRRYTRRKNRICYLQEIFSNEMAKVDDSFFHRLEESFLVEEDKKHERHPIFGNIVDEVAYHEKYPTIYHLRKKLVDSTDKADLRLIYLALAHMIKFRGHFLIEGDLNPDNSDVDKLFIQLVQTYNQLFEENPINASGVDAKAILSARLSKSRRLENLIAQLPGEKKNGLFGNLIALSLGLTPNFKSNFDLAEDAKLQLSKDTYDDDLDNLLAQIGDQYADLFLAAKNLSDAILLSDILRVNTEITKAPLSASMIKRYDEHHQDLTLLKALVRQQLPEKYKEIFFDQSKNGYAGYIDGGASQEEFYKFIKPILEKMDGTEELLVKLNREDLLRKQRTFDNGSIPHQIHLGELHAILRRQEDFYPFLKDNREKIEKILTFRIPYYVGPLARGNSRFAWMTRKSEETITPWNFEEVVDKGASAQSFIERMTNFDKNLPNEKVLPKHSLLYEYFTVYNELTKVKYVTEGMRKPAFLSGEQKKAIVDLLFKTNRKVTVKQLKEDYFKKIECFDSVEISGVEDRFNASLGTYHDLLKIIKDKDFLDNEENEDILEDIVLTLTLFEDREMIEERLKTYAHLFDDKVMKQLKRRRYTGWGRLSRKLINGIRDKQSGKTILDFLKSDGFANRNFMQLIHDDSLTFKEDIQKAQVSGQGDSLHEHIANLAGSPAIKKGILQTVKVVDELVKVMGRHKPENIVIEMARENQTTQKGQKNSRERMKRIEEGIKELGSQILKEHPVENTQLQNEKLYLYYLQNGRDMYVDQELDINRLSDYDVDHIVPQSFLKDDSIDNKVLTRSDKARGKSDNVPSEEVVKKMKNYWRQLLNAKLITQRKFDNLTKAERGGLSELDKAGFIKRQLVETRQITKHVAQILDSRMNTKYDENDKLIREVKVITLKSKLVSDFRKDFQFYKVREINNYHHAHDAYLNAVVGTALIKKYPKLESEFVYGDYKVYDVRKMIAKSEQEIGKATAKYFFYSNIMNFFKTEITLANGEIRKRPLIETNGETGEIVWDKGRDFATVRKVLSMPQVNIVKKTEVQTGGFSKESILPKRNSDKLIARKKDWDPKKYGGFDSPTVAYSVLVVAKVEKGKSKKLKSVKELLGITIMERSSFEKNPIDFLEAKGYKEVKKDLIIKLPKYSLFELENGRKRMLASAGELQKGNELALPSKYVNFLYLASHYEKLKGSPEDNEQKQLFVEQHKHYLDEIIEQISEFSKRVILADANLDKVLSAYNKHRDKPIREQAENIIHLFTLTNLGAPAAFKYFDTTIDRKRYTSTKEVLDATLIHQSITGLYETRIDLSQLGGDGGGGGEAAAKPAPGGMDLLKPLTVERKGVKIKGYWNSQADITCVPKDLLQGEEPVRQQNVTTIHGTQEGDVYYVNLKIDGRRINTEVIGTTLDYAIITPGDVPWILKKPLELTIKLDLEEQQGTLLNNSILSKKGKEELKQLFEKYSALWQSWENQVGHRRIRPHKIATGTVKPTPQKQYHINPKAKPDIQIVINDLLKQGVLIQKESTMNTPVYPVPKPNGRWRMVLDYRAVNKVTPLIAVQNQHSYGILGSLFKGRYKTTIDLSNGFWAHPIVPEDYWITAFTWQGKQYCWTVLPQGFLNSPGLFTGDVVDLLQGIPNVEVYVDDVYISHDSEKEHLEYLDILFNRLKEAGYIISLKKSNIANSIVDFLGFQITNEGRGLTDTFKEKLENITAPTTLKQLQSILGLLNFARNFIPDFTELIAPLYALIPKSTKNYVPWQIEHSTTLETLITKLNGAEYLQGRKGDKTLIMKVNASYTTGYIRYYNEGEKKPISYVSIVFSKTELKFTELEKLLTTVHKGLLKALDLSMGQNIHVYSPIVSMQNIQKTPQTAKKALASRWLSWLSYLEDPRIRFFYDPQMPALKDLPAVDTGKDNKKHPSNFQHIFYTDGSAITSPTKEGHLNAGMGIVYFINKDGNLQKQQEWSISLGNHTAQFAEIAAFEFALKKCLPLGGNILVVTDSNYVAKAYNEELDVWASNGFVNNRKKPLKHISKWKSVADLKRLRPDVVVTHEPGHQKLDSSPHAYGNNLADQLATQASFKVHAGKRTADGSEFEKRTADGSEFESPKKKAKVE

SEQ ID NO: 733 - protein, 2167 aa, synthetic construct
  source 1..2167: note = Description of Artificial Sequence: Synthetic polypeptide
MPAAKRVKLDGGDKKYSIGLDIGTNSVGWAVITDEYKVPSKKFKVLGNTDRHSIKKNLIGALLFDSGETAEATRLKRTARRRYTRRKNRICYLQEIFSNEMAKVDDSFFHRLEESFLVEEDKKHERHPIFGNIVDEVAYHEKYPTIYHLRKKLVDSTDKADLRLIYLALAHMIKFRGHFLIEGDLNPDNSDVDKLFIQLVQTYNQLFEENPINASGVDAKAILSARLSKSRRLENLIAQLPGEKKNGLFGNLIALSLGLTPNFKSNFDLAEDAKLQLSKDTYDDDLDNLLAQIGDQYADLFLAAKNLSDAILLSDILRVNTEITKAPLSASMIKRYDEHHQDLTLLKALVRQQLPEKYKEIFFDQSKNGYAGYIDGGASQEEFYKFIKPILEKMDGTEELLVKLNREDLLRKQRTFDNGSIPHQIHLGELHAILRRQEDFYPFLKDNREKIEKILTFRIPYYVGPLARGNSRFAWMTRKSEETITPWNFEEVVDKGASAQSFIERMTNFDKNLPNEKVLPKHSLLYEYFTVYNELTKVKYVTEGMRKPAFLSGEQKKAIVDLLFKTNRKVTVKQLKEDYFKKIECFDSVEISGVEDRFNASLGTYHDLLKIIKDKDFLDNEENEDILEDIVLTLTLFEDREMIEERLKTYAHLFDDKVMKQLKRRRYTGWGRLSRKLINGIRDKQSGKTILDFLKSDGFANRNFMQLIHDDSLTFKEDIQKAQVSGQGDSLHEHIANLAGSPAIKKGILQTVKVVDELVKVMGRHKPENIVIEMARENQTTQKGQKNSRERMKRIEEGIKELGSQILKEHPVENTQLQNEKLYLYYLQNGRDMYVDQELDINRLSDYDVDHIVPQSFLKDDSIDNKVLTRSDKARGKSDNVPSEEVVKKMKNYWRQLLNAKLITQRKFDNLTKAERGGLSELDKAGFIKRQLVETRQITKHVAQILDSRMNTKYDENDKLIREVKVITLKSKLVSDFRKDFQFYKVREINNYHHAHDAYLNAVVGTALIKKYPKLESEFVYGDYKVYDVRKMIAKSEQEIGKATAKYFFYSNIMNFFKTEITLANGEIRKRPLIETNGETGEIVWDKGRDFATVRKVLSMPQVNIVKKTEVQTGGFSKESILPKRNSDKLIARKKDWDPKKYGGFDSPTVAYSVLVVAKVEKGKSKKLKSVKELLGITIMERSSFEKNPIDFLEAKGYKEVKKDLIIKLPKYSLFELENGRKRMLASAGELQKGNELALPSKYVNFLYLASHYEKLKGSPEDNEQKQLFVEQHKHYLDEIIEQISEFSKRVILADANLDKVLSAYNKHRDKPIREQAENIIHLFTLTNLGAPAAFKYFDTTIDRKRYTSTKEVLDATLIHQSITGLYETRIDLSQLGGDGGGGGGGGGMDLLKPLTVERKGVKIKGYWNSQADITCVPKDLLQGEEPVRQQNVTTIHGTQEGDVYYVNLKIDGRRINTEVIGTTLDYAIITPGDVPWILKKPLELTIKLDLEEQQGTLLNNSILSKKGKEELKQLFEKYSALWQSWENQVGHRRIRPHKIATGTVKPTPQKQYHINPKAKPDIQIVINDLLKQGVLIQKESTMNTPVYPVPKPNGRWRMVLDYRAVNKVTPLIAVQNQHSYGILGSLFKGRYKTTIDLSNGFWAHPIVPEDYWITAFTWQGKQYCWTVLPQGFLNSPGLFTGDVVDLLQGIPNVEVYVDDVYISHDSEKEHLEYLDILFNRLKEAGYIISLKKSNIANSIVDFLGFQITNEGRGLTDTFKEKLENITAPTTLKQLQSILGLLNFARNFIPDFTELIAPLYALIPKSTKNYVPWQIEHSTTLETLITKLNGAEYLQGRKGDKTLIMKVNASYTTGYIRYYNEGEKKPISYVSIVFSKTELKFTELEKLLTTVHKGLLKALDLSMGQNIHVYSPIVSMQNIQKTPQTAKKALASRWLSWLSYLEDPRIRFFYDPQMPALKDLPAVDTGKDNKKHPSNFQHIFYTDGSAITSPTKEGHLNAGMGIVYFINKDGNLQKQQEWSISLGNHTAQFAEIAAFEFALKKCLPLGGNILVVTDSNYVAKAYNEELDVWASNGFVNNRKKPLKHISKWKSVADLKRLRPDVVVTHEPGHQKLDSSPHAYGNNLADQLATQASFKVHAGKRTADGSEFEKRTADGSEFESPKKKAKVE

SEQ ID NO: 734 - protein, 2165 aa, synthetic construct
  source 1..2165: note = Description of Artificial Sequence: Synthetic polypeptide
MPAAKRVKLDGGDKKYSIGLDIGTNSVGWAVITDEYKVPSKKFKVLGNTDRHSIKKNLIGALLFDSGETAEATRLKRTARRRYTRRKNRICYLQEIFSNEMAKVDDSFFHRLEESFLVEEDKKHERHPIFGNIVDEVAYHEKYPTIYHLRKKLVDSTDKADLRLIYLALAHMIKFRGHFLIEGDLNPDNSDVDKLFIQLVQTYNQLFEENPINASGVDAKAILSARLSKSRRLENLIAQLPGEKKNGLFGNLIALSLGLTPNFKSNFDLAEDAKLQLSKDTYDDDLDNLLAQIGDQYADLFLAAKNLSDAILLSDILRVNTEITKAPLSASMIKRYDEHHQDLTLLKALVRQQLPEKYKEIFFDQSKNGYAGYIDGGASQEEFYKFIKPILEKMDGTEELLVKLNREDLLRKQRTFDNGSIPHQIHLGELHAILRRQEDFYPFLKDNREKIEKILTFRIPYYVGPLARGNSRFAWMTRKSEETITPWNFEEVVDKGASAQSFIERMTNFDKNLPNEKVLPKHSLLYEYFTVYNELTKVKYVTEGMRKPAFLSGEQKKAIVDLLFKTNRKVTVKQLKEDYFKKIECFDSVEISGVEDRFNASLGTYHDLLKIIKDKDFLDNEENEDILEDIVLTLTLFEDREMIEERLKTYAHLFDDKVMKQLKRRRYTGWGRLSRKLINGIRDKQSGKTILDFLKSDGFANRNFMQLIHDDSLTFKEDIQKAQVSGQGDSLHEHIANLAGSPAIKKGILQTVKVVDELVKVMGRHKPENIVIEMARENQTTQKGQKNSRERMKRIEEGIKELGSQILKEHPVENTQLQNEKLYLYYLQNGRDMYVDQELDINRLSDYDVDHIVPQSFLKDDSIDNKVLTRSDKARGKSDNVPSEEVVKKMKNYWRQLLNAKLITQRKFDNLTKAERGGLSELDKAGFIKRQLVETRQITKHVAQILDSRMNTKYDENDKLIREVKVITLKSKLVSDFRKDFQFYKVREINNYHHAHDAYLNAVVGTALIKKYPKLESEFVYGDYKVYDVRKMIAKSEQEIGKATAKYFFYSNIMNFFKTEITLANGEIRKRPLIETNGETGEIVWDKGRDFATVRKVLSMPQVNIVKKTEVQTGGFSKESILPKRNSDKLIARKKDWDPKKYGGFDSPTVAYSVLVVAKVEKGKSKKLKSVKELLGITIMERSSFEKNPIDFLEAKGYKEVKKDLIIKLPKYSLFELENGRKRMLASAGELQKGNELALPSKYVNFLYLASHYEKLKGSPEDNEQKQLFVEQHKHYLDEIIEQISEFSKRVILADANLDKVLSAYNKHRDKPIREQAENIIHLFTLTNLGAPAAFKYFDTTIDRKRYTSTKEVLDATLIHQSITGLYETRIDLSQLGGDGGGGGGGMDLLKPLTVERKGVKIKGYWNSQADITCVPKDLLQGEEPVRQQNVTTIHGTQEGDVYYVNLKIDGRRINTEVIGTTLDYAIITPGDVPWILKKPLELTIKLDLEEQQGTLLNNSILSKKGKEELKQLFEKYSALWQSWENQVGHRRIRPHKIATGTVKPTPQKQYHINPKAKPDIQIVINDLLKQGVLIQKESTMNTPVYPVPKPNGRWRMVLDYRAVNKVTPLIAVQNQHSYGILGSLFKGRYKTTIDLSNGFWAHPIVPEDYWITAFTWQGKQYCWTVLPQGFLNSPGLFTGDVVDLLQGIPNVEVYVDDVYISHDSEKEHLEYLDILFNRLKEAGYIISLKKSNIANSIVDFLGFQITNEGRGLTDTFKEKLENITAPTTLKQLQSILGLLNFARNFIPDFTELIAPLYALIPKSTKNYVPWQIEHSTTLETLITKLNGAEYLQGRKGDKTLIMKVNASYTTGYIRYYNEGEKKPISYVSIVFSKTELKFTELEKLLTTVHKGLLKALDLSMGQNIHVYSPIVSMQNIQKTPQTAKKALASRWLSWLSYLEDPRIRFFYDPQMPALKDLPAVDTGKDNKKHPSNFQHIFYTDGSAITSPTKEGHLNAGMGIVYFINKDGNLQKQQEWSISLGNHTAQFAEIAAFEFALKKCLPLGGNILVVTDSNYVAKAYNEELDVWASNGFVNNRKKPLKHISKWKSVADLKRLRPDVVVTHEPGHQKLDSSPHAYGNNLADQLATQASFKVHAGKRTADGSEFEKRTADGSEFESPKKKAKVE

SEQ ID NO: 735 - protein, 2167 aa, synthetic construct
  source 1..2167: note = Description of Artificial Sequence: Synthetic polypeptide
MPAAKRVKLDGGDKKYSIGLDIGTNSVGWAVITDEYKVPSKKFKVLGNTDRHSIKKNLIGALLFDSGETAEATRLKRTARRRYTRRKNRICYLQEIFSNEMAKVDDSFFHRLEESFLVEEDKKHERHPIFGNIVDEVAYHEKYPTIYHLRKKLVDSTDKADLRLIYLALAHMIKFRGHFLIEGDLNPDNSDVDKLFIQLVQTYNQLFEENPINASGVDAKAILSARLSKSRRLENLIAQLPGEKKNGLFGNLIALSLGLTPNFKSNFDLAEDAKLQLSKDTYDDDLDNLLAQIGDQYADLFLAAKNLSDAILLSDILRVNTEITKAPLSASMIKRYDEHHQDLTLLKALVRQQLPEKYKEIFFDQSKNGYAGYIDGGASQEEFYKFIKPILEKMDGTEELLVKLNREDLLRKQRTFDNGSIPHQIHLGELHAILRRQEDFYPFLKDNREKIEKILTFRIPYYVGPLARGNSRFAWMTRKSEETITPWNFEEVVDKGASAQSFIERMTNFDKNLPNEKVLPKHSLLYEYFTVYNELTKVKYVTEGMRKPAFLSGEQKKAIVDLLFKTNRKVTVKQLKEDYFKKIECFDSVEISGVEDRFNASLGTYHDLLKIIKDKDFLDNEENEDILEDIVLTLTLFEDREMIEERLKTYAHLFDDKVMKQLKRRRYTGWGRLSRKLINGIRDKQSGKTILDFLKSDGFANRNFMQLIHDDSLTFKEDIQKAQVSGQGDSLHEHIANLAGSPAIKKGILQTVKVVDELVKVMGRHKPENIVIEMARENQTTQKGQKNSRERMKRIEEGIKELGSQILKEHPVENTQLQNEKLYLYYLQNGRDMYVDQELDINRLSDYDVDHIVPQSFLKDDSIDNKVLTRSDKARGKSDNVPSEEVVKKMKNYWRQLLNAKLITQRKFDNLTKAERGGLSELDKAGFIKRQLVETRQITKHVAQILDSRMNTKYDENDKLIREVKVITLKSKLVSDFRKDFQFYKVREINNYHHAHDAYLNAVVGTALIKKYPKLESEFVYGDYKVYDVRKMIAKSEQEIGKATAKYFFYSNIMNFFKTEITLANGEIRKRPLIETNGETGEIVWDKGRDFATVRKVLSMPQVNIVKKTEVQTGGFSKESILPKRNSDKLIARKKDWDPKKYGGFDSPTVAYSVLVVAKVEKGKSKKLKSVKELLGITIMERSSFEKNPIDFLEAKGYKEVKKDLIIKLPKYSLFELENGRKRMLASAGELQKGNELALPSKYVNFLYLASHYEKLKGSPEDNEQKQLFVEQHKHYLDEIIEQISEFSKRVILADANLDKVLSAYNKHRDKPIREQAENIIHLFTLTNLGAPAAFKYFDTTIDRKRYTSTKEVLDATLIHQSITGLYETRIDLSQLGGDGGPAPAPGGMDLLKPLTVERKGVKIKGYWNSQADITCVPKDLLQGEEPVRQQNVTTIHGTQEGDVYYVNLKIDGRRINTEVIGTTLDYAIITPGDVPWILKKPLELTIKLDLEEQQGTLLNNSILSKKGKEELKQLFEKYSALWQSWENQVGHRRIRPHKIATGTVKPTPQKQYHINPKAKPDIQIVINDLLKQGVLIQKESTMNTPVYPVPKPNGRWRMVLDYRAVNKVTPLIAVQNQHSYGILGSLFKGRYKTTIDLSNGFWAHPIVPEDYWITAFTWQGKQYCWTVLPQGFLNSPGLFTGDVVDLLQGIPNVEVYVDDVYISHDSEKEHLEYLDILFNRLKEAGYIISLKKSNIANSIVDFLGFQITNEGRGLTDTFKEKLENITAPTTLKQLQSILGLLNFARNFIPDFTELIAPLYALIPKSTKNYVPWQIEHSTTLETLITKLNGAEYLQGRKGDKTLIMKVNASYTTGYIRYYNEGEKKPISYVSIVFSKTELKFTELEKLLTTVHKGLLKALDLSMGQNIHVYSPIVSMQNIQKTPQTAKKALASRWLSWLSYLEDPRIRFFYDPQMPALKDLPAVDTGKDNKKHPSNFQHIFYTDGSAITSPTKEGHLNAGMGIVYFINKDGNLQKQQEWSISLGNHTAQFAEIAAFEFALKKCLPLGGNILVVTDSNYVAKAYNEELDVWASNGFVNNRKKPLKHISKWKSVADLKRLRPDVVVTHEPGHQKLDSSPHAYGNNLADQLATQASFKVHAGKRTADGSEFEKRTADGSEFESPKKKAKVE

SEQ ID NO: 736 - protein, 2171 aa, synthetic construct
  source 1..2171: note = Description of Artificial Sequence: Synthetic polypeptide
MPAAKRVKLDGGDKKYSIGLDIGTNSVGWAVITDEYKVPSKKFKVLGNTDRHSIKKNLIGALLFDSGETAEATRLKRTARRRYTRRKNRICYLQEIFSNEMAKVDDSFFHRLEESFLVEEDKKHERHPIFGNIVDEVAYHEKYPTIYHLRKKLVDSTDKADLRLIYLALAHMIKFRGHFLIEGDLNPDNSDVDKLFIQLVQTYNQLFEENPINASGVDAKAILSARLSKSRRLENLIAQLPGEKKNGLFGNLIALSLGLTPNFKSNFDLAEDAKLQLSKDTYDDDLDNLLAQIGDQYADLFLAAKNLSDAILLSDILRVNTEITKAPLSASMIKRYDEHHQDLTLLKALVRQQLPEKYKEIFFDQSKNGYAGYIDGGASQEEFYKFIKPILEKMDGTEELLVKLNREDLLRKQRTFDNGSIPHQIHLGELHAILRRQEDFYPFLKDNREKIEKILTFRIPYYVGPLARGNSRFAWMTRKSEETITPWNFEEVVDKGASAQSFIERMTNFDKNLPNEKVLPKHSLLYEYFTVYNELTKVKYVTEGMRKPAFLSGEQKKAIVDLLFKTNRKVTVKQLKEDYFKKIECFDSVEISGVEDRFNASLGTYHDLLKIIKDKDFLDNEENEDILEDIVLTLTLFEDREMIEERLKTYAHLFDDKVMKQLKRRRYTGWGRLSRKLINGIRDKQSGKTILDFLKSDGFANRNFMQLIHDDSLTFKEDIQKAQVSGQGDSLHEHIANLAGSPAIKKGILQTVKVVDELVKVMGRHKPENIVIEMARENQTTQKGQKNSRERMKRIEEGIKELGSQILKEHPVENTQLQNEKLYLYYLQNGRDMYVDQELDINRLSDYDVDHIVPQSFLKDDSIDNKVLTRSDKARGKSDNVPSEEVVKKMKNYWRQLLNAKLITQRKFDNLTKAERGGLSELDKAGFIKRQLVETRQITKHVAQILDSRMNTKYDENDKLIREVKVITLKSKLVSDFRKDFQFYKVREINNYHHAHDAYLNAVVGTALIKKYPKLESEFVYGDYKVYDVRKMIAKSEQEIGKATAKYFFYSNIMNFFKTEITLANGEIRKRPLIETNGETGEIVWDKGRDFATVRKVLSMPQVNIVKKTEVQTGGFSKESILPKRNSDKLIARKKDWDPKKYGGFDSPTVAYSVLVVAKVEKGKSKKLKSVKELLGITIMERSSFEKNPIDFLEAKGYKEVKKDLIIKLPKYSLFELENGRKRMLASAGELQKGNELALPSKYVNFLYLASHYEKLKGSPEDNEQKQLFVEQHKHYLDEIIEQISEFSKRVILADANLDKVLSAYNKHRDKPIREQAENIIHLFTLTNLGAPAAFKYFDTTIDRKRYTSTKEVLDATLIHQSITGLYETRIDLSQLGGDGGGSSGGGGGSGGMDLLKPLTVERKGVKIKGYWNSQADITCVPKDLLQGEEPVRQQNVTTIHGTQEGDVYYVNLKIDGRRINTEVIGTTLDYAIITPGDVPWILKKPLELTIKLDLEEQQGTLLNNSILSKKGKEELKQLFEKYSALWQSWENQVGHRRIRPHKIATGTVKPTPQKQYHINPKAKPDIQIVINDLLKQGVLIQKESTMNTPVYPVPKPNGRWRMVLDYRAVNKVTPLIAVQNQHSYGILGSLFKGRYKTTIDLSNGFWAHPIVPEDYWITAFTWQGKQYCWTVLPQGFLNSPGLFTGDVVDLLQGIPNVEVYVDDVYISHDSEKEHLEYLDILFNRLKEAGYIISLKKSNIANSIVDFLGFQITNEGRGLTDTFKEKLENITAPTTLKQLQSILGLLNFARNFIPDFTELIAPLYALIPKSTKNYVPWQIEHSTTLETLITKLNGAEYLQGRKGDKTLIMKVNASYTTGYIRYYNEGEKKPISYVSIVFSKTELKFTELEKLLTTVHKGLLKALDLSMGQNIHVYSPIVSMQNIQKTPQTAKKALASRWLSWLSYLEDPRIRFFYDPQMPALKDLPAVDTGKDNKKHPSNFQHIFYTDGSAITSPTKEGHLNAGMGIVYFINKDGNLQKQQEWSISLGNHTAQFAEIAAFEFALKKCLPLGGNILVVTDSNYVAKAYNEELDVWASNGFVNNRKKPLKHISKWKSVADLKRLRPDVVVTHEPGHQKLDSSPHAYGNNLADQLATQASFKVHAGKRTADGSEFEKRTADGSEFESPKKKAKVE

SEQ ID NO: 737 - protein, 2171 aa, synthetic construct
  source 1..2171: note = Description of Artificial Sequence: Synthetic polypeptide
MPAAKRVKLDGGDKKYSIGLDIGTNSVGWAVITDEYKVPSKKFKVLGNTDRHSIKKNLIGALLFDSGETAEATRLKRTARRRYTRRKNRICYLQEIFSNEMAKVDDSFFHRLEESFLVEEDKKHERHPIFGNIVDEVAYHEKYPTIYHLRKKLVDSTDKADLRLIYLALAHMIKFRGHFLIEGDLNPDNSDVDKLFIQLVQTYNQLFEENPINASGVDAKAILSARLSKSRRLENLIAQLPGEKKNGLFGNLIALSLGLTPNFKSNFDLAEDAKLQLSKDTYDDDLDNLLAQIGDQYADLFLAAKNLSDAILLSDILRVNTEITKAPLSASMIKRYDEHHQDLTLLKALVRQQLPEKYKEIFFDQSKNGYAGYIDGGASQEEFYKFIKPILEKMDGTEELLVKLNREDLLRKQRTFDNGSIPHQIHLGELHAILRRQEDFYPFLKDNREKIEKILTFRIPYYVGPLARGNSRFAWMTRKSEETITPWNFEEVVDKGASAQSFIERMTNFDKNLPNEKVLPKHSLLYEYFTVYNELTKVKYVTEGMRKPAFLSGEQKKAIVDLLFKTNRKVTVKQLKEDYFKKIECFDSVEISGVEDRFNASLGTYHDLLKIIKDKDFLDNEENEDILEDIVLTLTLFEDREMIEERLKTYAHLFDDKVMKQLKRRRYTGWGRLSRKLINGIRDKQSGKTILDFLKSDGFANRNFMQLIHDDSLTFKEDIQKAQVSGQGDSLHEHIANLAGSPAIKKGILQTVKVVDELVKVMGRHKPENIVIEMARENQTTQKGQKNSRERMKRIEEGIKELGSQILKEHPVENTQLQNEKLYLYYLQNGRDMYVDQELDINRLSDYDVDHIVPQSFLKDDSIDNKVLTRSDKARGKSDNVPSEEVVKKMKNYWRQLLNAKLITQRKFDNLTKAERGGLSELDKAGFIKRQLVETRQITKHVAQILDSRMNTKYDENDKLIREVKVITLKSKLVSDFRKDFQFYKVREINNYHHAHDAYLNAVVGTALIKKYPKLESEFVYGDYKVYDVRKMIAKSEQEIGKATAKYFFYSNIMNFFKTEITLANGEIRKRPLIETNGETGEIVWDKGRDFATVRKVLSMPQVNIVKKTEVQTGGFSKESILPKRNSDKLIARKKDWDPKKYGGFDSPTVAYSVLVVAKVEKGKSKKLKSVKELLGITIMERSSFEKNPIDFLEAKGYKEVKKDLIIKLPKYSLFELENGRKRMLASAGELQKGNELALPSKYVNFLYLASHYEKLKGSPEDNEQKQLFVEQHKHYLDEIIEQISEFSKRVILADANLDKVLSAYNKHRDKPIREQAENIIHLFTLTNLGAPAAFKYFDTTIDRKRYTSTKEVLDATLIHQSITGLYETRIDLSQLGGDGGPAPGGSGSSGGMDLLKPLTVERKGVKIKGYWNSQADITCVPKDLLQGEEPVRQQNVTTIHGTQEGDVYYVNLKIDGRRINTEVIGTTLDYAIITPGDVPWILKKPLELTIKLDLEEQQGTLLNNSILSKKGKEELKQLFEKYSALWQSWENQVGHRRIRPHKIATGTVKPTPQKQYHINPKAKPDIQIVINDLLKQGVLIQKESTMNTPVYPVPKPNGRWRMVLDYRAVNKVTPLIAVQNQHSYGILGSLFKGRYKTTIDLSNGFWAHPIVPEDYWITAFTWQGKQYCWTVLPQGFLNSPGLFTGDVVDLLQGIPNVEVYVDDVYISHDSEKEHLEYLDILFNRLKEAGYIISLKKSNIANSIVDFLGFQITNEGRGLTDTFKEKLENITAPTTLKQLQSILGLLNFARNFIPDFTELIAPLYALIPKSTKNYVPWQIEHSTTLETLITKLNGAEYLQGRKGDKTLIMKVNASYTTGYIRYYNEGEKKPISYVSIVFSKTELKFTELEKLLTTVHKGLLKALDLSMGQNIHVYSPIVSMQNIQKTPQTAKKALASRWLSWLSYLEDPRIRFFYDPQMPALKDLPAVDTGKDNKKHPSNFQHIFYTDGSAITSPTKEGHLNAGMGIVYFINKDGNLQKQQEWSISLGNHTAQFAEIAAFEFALKKCLPLGGNILVVTDSNYVAKAYNEELDVWASNGFVNNRKKPLKHISKWKSVADLKRLRPDVVVTHEPGHQKLDSSPHAYGNNLADQLATQASFKVHAGKRTADGSEFEKRTADGSEFESPKKKAKVE

SEQ ID NO: 738 - protein, 2185 aa, synthetic construct
  source 1..2185: note = Description of Artificial Sequence: Synthetic polypeptide
MPAAKRVKLDGGDKKYSIGLDIGTNSVGWAVITDEYKVPSKKFKVLGNTDRHSIKKNLIGALLFDSGETAEATRLKRTARRRYTRRKNRICYLQEIFSNEMAKVDDSFFHRLEESFLVEEDKKHERHPIFGNIVDEVAYHEKYPTIYHLRKKLVDSTDKADLRLIYLALAHMIKFRGHFLIEGDLNPDNSDVDKLFIQLVQTYNQLFEENPINASGVDAKAILSARLSKSRRLENLIAQLPGEKKNGLFGNLIALSLGLTPNFKSNFDLAEDAKLQLSKDTYDDDLDNLLAQIGDQYADLFLAAKNLSDAILLSDILRVNTEITKAPLSASMIKRYDEHHQDLTLLKALVRQQLPEKYKEIFFDQSKNGYAGYIDGGASQEEFYKFIKPILEKMDGTEELLVKLNREDLLRKQRTFDNGSIPHQIHLGELHAILRRQEDFYPFLKDNREKIEKILTFRIPYYVGPLARGNSRFAWMTRKSEETITPWNFEEVVDKGASAQSFIERMTNFDKNLPNEKVLPKHSLLYEYFTVYNELTKVKYVTEGMRKPAFLSGEQKKAIVDLLFKTNRKVTVKQLKEDYFKKIECFDSVEISGVEDRFNASLGTYHDLLKIIKDKDFLDNEENEDILEDIVLTLTLFEDREMIEERLKTYAHLFDDKVMKQLKRRRYTGWGRLSRKLINGIRDKQSGKTILDFLKSDGFANRNFMQLIHDDSLTFKEDIQKAQVSGQGDSLHEHIANLAGSPAIKKGILQTVKVVDELVKVMGRHKPENIVIEMARENQTTQKGQKNSRERMKRIEEGIKELGSQILKEHPVENTQLQNEKLYLYYLQNGRDMYVDQELDINRLSDYDVDHIVPQSFLKDDSIDNKVLTRSDKARGKSDNVPSEEVVKKMKNYWRQLLNAKLITQRKFDNLTKAERGGLSELDKAGFIKRQLVETRQITKHVAQILDSRMNTKYDENDKLIREVKVITLKSKLVSDFRKDFQFYKVREINNYHHAHDAYLNAVVGTALIKKYPKLESEFVYGDYKVYDVRKMIAKSEQEIGKATAKYFFYSNIMNFFKTEITLANGEIRKRPLIETNGETGEIVWDKGRDFATVRKVLSMPQVNIVKKTEVQTGGFSKESILPKRNSDKLIARKKDWDPKKYGGFDSPTVAYSVLVVAKVEKGKSKKLKSVKELLGITIMERSSFEKNPIDFLEAKGYKEVKKDLIIKLPKYSLFELENGRKRMLASAGELQKGNELALPSKYVNFLYLASHYEKLKGSPEDNEQKQLFVEQHKHYLDEIIEQISEFSKRVILADANLDKVLSAYNKHRDKPIREQAENIIHLFTLTNLGAPAAFKYFDTTIDRKRYTSTKEVLDATLIHQSITGLYETRIDLSQLGGDGGGGGGSGGGGSGGGGSGGGGSGGMNPLQLLQPLPAEVKGTKLLAHWNSGATITCIPESFLEDEQPIKQTLIKTIHGEKQQNVYYLTFKVKGRKVEAEVIASPYEYILLSPTDVPWLTQQPLQLTILVPLQEYQDRILNKTALPEEQKQQLKALFTKYDNLWQHWENQVGHRKIRPHNIATGDYPPRPQKQYPINPKAKPSIQIVIDDLLKQGVLTPQNSTMNTPVYPVPKPDGRWRMVLDYREVNKTIPLTAAQNQHSAGILATIVRQKYKTTLDLANGFWAHPITPDSYWLTAFTWQGKQYCWTRLPQGFLNSPALFNADAVDLLKEVPNVQVYVDDIYLSHDNPHEHIQQLEKVFQILLQAGYVVSLKKSEIGQRTVEFLGFNITKEGRGLTDTFKTKLLNVTPPKDLKQLQSILGKLNFARNFIPNFAELVQTLYNLIASSPGKYIEWTEDNTKQLNKVIEALNTASNLEERLPDQRLVIKVNTSPSAGYVRYYNESGKKPIMYLNYVFSKAELKFSMLEKLLTTMHKALIKAMDLAMGQEILVYSPIVSMTKIQKTPLPERKALPIRWITWMTYLEDPRIQFHYDKTLPELKHIPDVYTSSIPPLKHPSQYEGVFCTDGSAIKSPDPTKSNNAGMGIVHAIYNPEYKILNQWSIPLGHHTAQMAEIAAVEFACKKALKVPGPVLVITDSFYVAESANKELPYWKSNGFVNNKKEPLKHISKWKSIAECLSIKPDITIQHEKGHQPINTSIHTEGNALADKLATQGSYVVNAGKRTADGSEFEKRTADGSEFESPKKKAKVE

SEQ ID NO: 739 - protein, 2175 aa, synthetic construct
  source 1..2175: note = Description of Artificial Sequence: Synthetic polypeptide
MPAAKRVKLDGGDKKYSIGLDIGTNSVGWAVITDEYKVPSKKFKVLGNTDRHSIKKNLIGALLFDSGETAEATRLKRTARRRYTRRKNRICYLQEIFSNEMAKVDDSFFHRLEESFLVEEDKKHERHPIFGNIVDEVAYHEKYPTIYHLRKKLVDSTDKADLRLIYLALAHMIKFRGHFLIEGDLNPDNSDVDKLFIQLVQTYNQLFEENPINASGVDAKAILSARLSKSRRLENLIAQLPGEKKNGLFGNLIALSLGLTPNFKSNFDLAEDAKLQLSKDTYDDDLDNLLAQIGDQYADLFLAAKNLSDAILLSDILRVNTEITKAPLSASMIKRYDEHHQDLTLLKALVRQQLPEKYKEIFFDQSKNGYAGYIDGGASQEEFYKFIKPILEKMDGTEELLVKLNREDLLRKQRTFDNGSIPHQIHLGELHAILRRQEDFYPFLKDNREKIEKILTFRIPYYVGPLARGNSRFAWMTRKSEETITPWNFEEVVDKGASAQSFIERMTNFDKNLPNEKVLPKHSLLYEYFTVYNELTKVKYVTEGMRKPAFLSGEQKKAIVDLLFKTNRKVTVKQLKEDYFKKIECFDSVEISGVEDRFNASLGTYHDLLKIIKDKDFLDNEENEDILEDIVLTLTLFEDREMIEERLKTYAHLFDDKVMKQLKRRRYTGWGRLSRKLINGIRDKQSGKTILDFLKSDGFANRNFMQLIHDDSLTFKEDIQKAQVSGQGDSLHEHIANLAGSPAIKKGILQTVKVVDELVKVMGRHKPENIVIEMARENQTTQKGQKNSRERMKRIEEGIKELGSQILKEHPVENTQLQNEKLYLYYLQNGRDMYVDQELDINRLSDYDVDHIVPQSFLKDDSIDNKVLTRSDKARGKSDNVPSEEVVKKMKNYWRQLLNAKLITQRKFDNLTKAERGGLSELDKAGFIKRQLVETRQITKHVAQILDSRMNTKYDENDKLIREVKVITLKSKLVSDFRKDFQFYKVREINNYHHAHDAYLNAVVGTALIKKYPKLESEFVYGDYKVYDVRKMIAKSEQEIGKATAKYFFYSNIMNFFKTEITLANGEIRKRPLIETNGETGEIVWDKGRDFATVRKVLSMPQVNIVKKTEVQTGGFSKESILPKRNSDKLIARKKDWDPKKYGGFDSPTVAYSVLVVAKVEKGKSKKLKSVKELLGITIMERSSFEKNPIDFLEAKGYKEVKKDLIIKLPKYSLFELENGRKRMLASAGELQKGNELALPSKYVNFLYLASHYEKLKGSPEDNEQKQLFVEQHKHYLDEIIEQISEFSKRVILADANLDKVLSAYNKHRDKPIREQAENIIHLFTLTNLGAPAAFKYFDTTIDRKRYTSTKEVLDATLIHQSITGLYETRIDLSQLGGDGGGGGGSGGGGSGGMNPLQLLQPLPAEVKGTKLLAHWNSGATITCIPESFLEDEQPIKQTLIKTIHGEKQQNVYYLTFKVKGRKVEAEVIASPYEYILLSPTDVPWLTQQPLQLTILVPLQEYQDRILNKTALPEEQKQQLKALFTKYDNLWQHWENQVGHRKIRPHNIATGDYPPRPQKQYPINPKAKPSIQIVIDDLLKQGVLTPQNSTMNTPVYPVPKPDGRWRMVLDYREVNKTIPLTAAQNQHSAGILATIVRQKYKTTLDLANGFWAHPITPDSYWLTAFTWQGKQYCWTRLPQGFLNSPALFNADAVDLLKEVPNVQVYVDDIYLSHDNPHEHIQQLEKVFQILLQAGYVVSLKKSEIGQRTVEFLGFNITKEGRGLTDTFKTKLLNVTPPKDLKQLQSILGKLNFARNFIPNFAELVQTLYNLIASSPGKYIEWTEDNTKQLNKVIEALNTASNLEERLPDQRLVIKVNTSPSAGYVRYYNESGKKPIMYLNYVFSKAELKFSMLEKLLTTMHKALIKAMDLAMGQEILVYSPIVSMTKIQKTPLPERKALPIRWITWMTYLEDPRIQFHYDKTLPELKHIPDVYTSSIPPLKHPSQYEGVFCTDGSAIKSPDPTKSNNAGMGIVHAIYNPEYKILNQWSIPLGHHTAQMAEIAAVEFACKKALKVPGPVLVITDSFYVAESANKELPYWKSNGFVNNKKEPLKHISKWKSIAECLSIKPDITIQHEKGHQPINTSIHTEGNALADKLATQGSYVVNAGKRTADGSEFEKRTADGSEFESPKKKAKVE

SEQ ID NO: 740 - protein, 2176 aa, synthetic construct
  source 1..2176: note = Description of Artificial Sequence: Synthetic polypeptide
MPAAKRVKLDGGDKKYSIGLDIGTNSVGWAVITDEYKVPSKKFKVLGNTDRHSIKKNLIGALLFDSGETAEATRLKRTARRRYTRRKNRICYLQEIFSNEMAKVDDSFFHRLEESFLVEEDKKHERHPIFGNIVDEVAYHEKYPTIYHLRKKLVDSTDKADLRLIYLALAHMIKFRGHFLIEGDLNPDNSDVDKLFIQLVQTYNQLFEENPINASGVDAKAILSARLSKSRRLENLIAQLPGEKKNGLFGNLIALSLGLTPNFKSNFDLAEDAKLQLSKDTYDDDLDNLLAQIGDQYADLFLAAKNLSDAILLSDILRVNTEITKAPLSASMIKRYDEHHQDLTLLKALVRQQLPEKYKEIFFDQSKNGYAGYIDGGASQEEFYKFIKPILEKMDGTEELLVKLNREDLLRKQRTFDNGSIPHQIHLGELHAILRRQEDFYPFLKDNREKIEKILTFRIPYYVGPLARGNSRFAWMTRKSEETITPWNFEEVVDKGASAQSFIERMTNFDKNLPNEKVLPKHSLLYEYFTVYNELTKVKYVTEGMRKPAFLSGEQKKAIVDLLFKTNRKVTVKQLKEDYFKKIECFDSVEISGVEDRFNASLGTYHDLLKIIKDKDFLDNEENEDILEDIVLTLTLFEDREMIEERLKTYAHLFDDKVMKQLKRRRYTGWGRLSRKLINGIRDKQSGKTILDFLKSDGFANRNFMQLIHDDSLTFKEDIQKAQVSGQGDSLHEHIANLAGSPAIKKGILQTVKVVDELVKVMGRHKPENIVIEMARENQTTQKGQKNSRERMKRIEEGIKELGSQILKEHPVENTQLQNEKLYLYYLQNGRDMYVDQELDINRLSDYDVDHIVPQSFLKDDSIDNKVLTRSDKARGKSDNVPSEEVVKKMKNYWRQLLNAKLITQRKFDNLTKAERGGLSELDKAGFIKRQLVETRQITKHVAQILDSRMNTKYDENDKLIREVKVITLKSKLVSDFRKDFQFYKVREINNYHHAHDAYLNAVVGTALIKKYPKLESEFVYGDYKVYDVRKMIAKSEQEIGKATAKYFFYSNIMNFFKTEITLANGEIRKRPLIETNGETGEIVWDKGRDFATVRKVLSMPQVNIVKKTEVQTGGFSKESILPKRNSDKLIARKKDWDPKKYGGFDSPTVAYSVLVVAKVEKGKSKKLKSVKELLGITIMERSSFEKNPIDFLEAKGYKEVKKDLIIKLPKYSLFELENGRKRMLASAGELQKGNELALPSKYVNFLYLASHYEKLKGSPEDNEQKQLFVEQHKHYLDEIIEQISEFSKRVILADANLDKVLSAYNKHRDKPIREQAENIIHLFTLTNLGAPAAFKYFDTTIDRKRYTSTKEVLDATLIHQSITGLYETRIDLSQLGGDGGGGGEAAAKGGSGGMNPLQLLQPLPAEVKGTKLLAHWNSGATITCIPESFLEDEQPIKQTLIKTIHGEKQQNVYYLTFKVKGRKVEAEVIASPYEYILLSPTDVPWLTQQPLQLTILVPLQEYQDRILNKTALPEEQKQQLKALFTKYDNLWQHWENQVGHRKIRPHNIATGDYPPRPQKQYPINPKAKPSIQIVIDDLLKQGVLTPQNSTMNTPVYPVPKPDGRWRMVLDYREVNKTIPLTAAQNQHSAGILATIVRQKYKTTLDLANGFWAHPITPDSYWLTAFTWQGKQYCWTRLPQGFLNSPALFNADAVDLLKEVPNVQVYVDDIYLSHDNPHEHIQQLEKVFQILLQAGYVVSLKKSEIGQRTVEFLGFNITKEGRGLTDTFKTKLLNVTPPKDLKQLQSILGKLNFARNFIPNFAELVQTLYNLIASSPGKYIEWTEDNTKQLNKVIEALNTASNLEERLPDQRLVIKVNTSPSAGYVRYYNESGKKPIMYLNYVFSKAELKFSMLEKLLTTMHKALIKAMDLAMGQEILVYSPIVSMTKIQKTPLPERKALPIRWITWMTYLEDPRIQFHYDKTLPELKHIPDVYTSSIPPLKHPSQYEGVFCTDGSAIKSPDPTKSNNAGMGIVHAIYNPEYKILNQWSIPLGHHTAQMAEIAAVEFACKKALKVPGPVLVITDSFYVAESANKELPYWKSNGFVNNKKEPLKHISKWKSIAECLSIKPDITIQHEKGHQPINTSIHTEGNALADKLATQGSYVVNAGKRTADGSEFEKRTADGSEFESPKKKAKVE

SEQ ID NO: 741 - protein, 2012 aa, synthetic construct
  source 1..2012: note = Description of Artificial Sequence: Synthetic polypeptide
MPAAKRVKLDGGDKKYSIGLDIGTNSVGWAVITDEYKVPSKKFKVLGNTDRHSIKKNLIGALLFDSGETAEATRLKRTARRRYTRRKNRICYLQEIFSNEMAKVDDSFFHRLEESFLVEEDKKHERHPIFGNIVDEVAYHEKYPTIYHLRKKLVDSTDKADLRLIYLALAHMIKFRGHFLIEGDLNPDNSDVDKLFIQLVQTYNQLFEENPINASGVDAKAILSARLSKSRRLENLIAQLPGEKKNGLFGNLIALSLGLTPNFKSNFDLAEDAKLQLSKDTYDDDLDNLLAQIGDQYADLFLAAKNLSDAILLSDILRVNTEITKAPLSASMIKRYDEHHQDLTLLKALVRQQLPEKYKEIFFDQSKNGYAGYIDGGASQEEFYKFIKPILEKMDGTEELLVKLNREDLLRKQRTFDNGSIPHQIHLGELHAILRRQEDFYPFLKDNREKIEKILTFRIPYYVGPLARGNSRFAWMTRKSEETITPWNFEEVVDKGASAQSFIERMTNFDKNLPNEKVLPKHSLLYEYFTVYNELTKVKYVTEGMRKPAFLSGEQKKAIVDLLFKTNRKVTVKQLKEDYFKKIECFDSVEISGVEDRFNASLGTYHDLLKIIKDKDFLDNEENEDILEDIVLTLTLFEDREMIEERLKTYAHLFDDKVMKQLKRRRYTGWGRLSRKLINGIRDKQSGKTILDFLKSDGFANRNFMQLIHDDSLTFKEDIQKAQVSGQGDSLHEHIANLAGSPAIKKGILQTVKVVDELVKVMGRHKPENIVIEMARENQTTQKGQKNSRERMKRIEEGIKELGSQILKEHPVENTQLQNEKLYLYYLQNGRDMYVDQELDINRLSDYDVDHIVPQSFLKDDSIDNKVLTRSDKARGKSDNVPSEEVVKKMKNYWRQLLNAKLITQRKFDNLTKAERGGLSELDKAGFIKRQLVETRQITKHVAQILDSRMNTKYDENDKLIREVKVITLKSKLVSDFRKDFQFYKVREINNYHHAHDAYLNAVVGTALIKKYPKLESEFVYGDYKVYDVRKMIAKSEQEIGKATAKYFFYSNIMNFFKTEITLANGEIRKRPLIETNGETGEIVWDKGRDFATVRKVLSMPQVNIVKKTEVQTGGFSKESILPKRNSDKLIARKKDWDPKKYGGFDSPTVAYSVLVVAKVEKGKSKKLKSVKELLGITIMERSSFEKNPIDFLEAKGYKEVKKDLIIKLPKYSLFELENGRKRMLASAGELQKGNELALPSKYVNFLYLASHYEKLKGSPEDNEQKQLFVEQHKHYLDEIIEQISEFSKRVILADANLDKVLSAYNKHRDKPIREQAENIIHLFTLTNLGAPAAFKYFDTTIDRKRYTSTKEVLDATLIHQSITGLYETRIDLSQLGGDGGPAPGGGGGPRSRAIDIPVPHADKISWKITDPVWVDQWPLTYEKTLAAIALVQEQLAAGHIEPTNSPWNTPIFIIKKKSGSWRLLQDLRAVNKVMVPMGALQPGLPSPVAIPLNYHKIVIDLKDCFFTIPLHPEDRPYFAFSVPQINFQSPMPRYQWKVLPQGMANSPTLCQKFVAAAIAPVRSQWPEAYILHYMDDILLACDSAEAAKACYAHIISCLTSYGLKIAPDKVQVSEPFSYLGFELHHQQVFTPRVCLKTDHLKTLNDFQKLLGDIQWLRPYLKLPTSALVPLNNILKGDPNPLSVRALTPEAKQSLALINKAIQNQSVQQISYNLPLVLLLLPTPHTPTAVFWQPNGTDPTKNGSPLLWLHLPASPSKVLLTYPSLLAMLIIKGRYTGRQLFGRDPHSIIIPYTQDQLTWLLQTSDEWAIALSSFTGDIDNHYPSDPVIQFAKLHQFIFPKITKCAPIPQATLVFTDGSSNGIAAYVIDNQPISIKSPYLSAQLVELYAILQVFTVLAHQPFNLYTDSAYIAQSVPLLETVPFIKSSTNATPLFSKLQQLILNRQHPFFIGHLRAHLNLPGPLAEGNALADAATQIFPIISDAGKRTADGSEFEKRTADGSEFESPKKKAKVE

SEQ ID NO: 742 - protein, 2012 aa, synthetic construct
  source 1..2012: note = Description of Artificial Sequence: Synthetic polypeptide
MPAAKRVKLDGGDKKYSIGLDIGTNSVGWAVITDEYKVPSKKFKVLGNTDRHSIKKNLIGALLFDSGETAEATRLKRTARRRYTRRKNRICYLQEIFSNEMAKVDDSFFHRLEESFLVEEDKKHERHPIFGNIVDEVAYHEKYPTIYHLRKKLVDSTDKADLRLIYLALAHMIKFRGHFLIEGDLNPDNSDVDKLFIQLVQTYNQLFEENPINASGVDAKAILSARLSKSRRLENLIAQLPGEKKNGLFGNLIALSLGLTPNFKSNFDLAEDAKLQLSKDTYDDDLDNLLAQIGDQYADLFLAAKNLSDAILLSDILRVNTEITKAPLSASMIKRYDEHHQDLTLLKALVRQQLPEKYKEIFFDQSKNGYAGYIDGGASQEEFYKFIKPILEKMDGTEELLVKLNREDLLRKQRTFDNGSIPHQIHLGELHAILRRQEDFYPFLKDNREKIEKILTFRIPYYVGPLARGNSRFAWMTRKSEETITPWNFEEVVDKGASAQSFIERMTNFDKNLPNEKVLPKHSLLYEYFTVYNELTKVKYVTEGMRKPAFLSGEQKKAIVDLLFKTNRKVTVKQLKEDYFKKIECFDSVEISGVEDRFNASLGTYHDLLKIIKDKDFLDNEENEDILEDIVLTLTLFEDREMIEERLKTYAHLFDDKVMKQLKRRRYTGWGRLSRKLINGIRDKQSGKTILDFLKSDGFANRNFMQLIHDDSLTFKEDIQKAQVSGQGDSLHEHIANLAGSPAIKKGILQTVKVVDELVKVMGRHKPENIVIEMARENQTTQKGQKNSRERMKRIEEGIKELGSQILKEHPVENTQLQNEKLYLYYLQNGRDMYVDQELDINRLSDYDVDHIVPQSFLKDDSIDNKVLTRSDKARGKSDNVPSEEVVKKMKNYWRQLLNAKLITQRKFDNLTKAERGGLSELDKAGFIKRQLVETRQITKHVAQILDSRMNTKYDENDKLIREVKVITLKSKLVSDFRKDFQFYKVREINNYHHAHDAYLNAVVGTALIKKYPKLESEFVYGDYKVYDVRKMIAKSEQEIGKATAKYFFYSNIMNFFKTEITLANGEIRKRPLIETNGETGEIVWDKGRDFATVRKVLSMPQVNIVKKTEVQTGGFSKESILPKRNSDKLIARKKDWDPKKYGGFDSPTVAYSVLVVAKVEKGKSKKLKSVKELLGITIMERSSFEKNPIDFLEAKGYKEVKKDLIIKLPKYSLFELENGRKRMLASAGELQKGNELALPSKYVNFLYLASHYEKLKGSPEDNEQKQLFVEQHKHYLDEIIEQISEFSKRVILADANLDKVLSAYNKHRDKPIREQAENIIHLFTLTNLGAPAAFKYFDTTIDRKRYTSTKEVLDATLIHQSITGLYETRIDLSQLGGDGGGGGGGGGGPRSRAIDIPVPHADKISWKITDPVWVDQWPLTYEKTLAAIALVQEQLAAGHIEPTNSPWNTPIFIIKKKSGSWRLLQDLRAVNKVMVPMGALQPGLPSPVAIPLNYHKIVIDLKDCFFTIPLHPEDRPYFAFSVPQINFQSPMPRYQWKVLPQGMANSPTLCQKFVAAAIAPVRSQWPEAYILHYMDDILLACDSAEAAKACYAHIISCLTSYGLKIAPDKVQVSEPFSYLGFELHHQQVFTPRVCLKTDHLKTLNDFQKLLGDIQWLRPYLKLPTSALVPLNNILKPDPNPLSVRALTPEAKQSLALINKAIQNQSVQQISYNLPLVLLLLPTPHTPTAVFWQPNGTDPTKNGSPLLWLHLPASPSKVLLTYPSLLAMLIIKGRYTGRQLFGRDPHSIIIPYTQDQLTWLLQTSDEWAIALSSFTGDIDNHYPSDPVIQFAKLHQFIFPKITKCAPIPQATLVFTDGSSNGIAAYVIDNQPISIKSPYLSAQLVELYAILQVFTVLAHQPFNLYTDSAYIAQSVPLLETVPFIKSSTNATPLFSKLQQLILNRQHPFFIGHLRAHLNLPGPLAEGNALADAATQIFPIISDAGKRTADGSEFEKRTADGSEFESPKKKAKVE

SEQ ID NO: 743 - protein, 2021 aa, synthetic construct
  source 1..2021: note = Description of Artificial Sequence: Synthetic polypeptide
MPAAKRVKLDGGDKKYSIGLDIGTNSVGWAVITDEYKVPSKKFKVLGNTDRHSIKKNLIGALLFDSGETAEATRLKRTARRRYTRRKNRICYLQEIFSNEMAKVDDSFFHRLEESFLVEEDKKHERHPIFGNIVDEVAYHEKYPTIYHLRKKLVDSTDKADLRLIYLALAHMIKFRGHFLIEGDLNPDNSDVDKLFIQLVQTYNQLFEENPINASGVDAKAILSARLSKSRRLENLIAQLPGEKKNGLFGNLIALSLGLTPNFKSNFDLAEDAKLQLSKDTYDDDLDNLLAQIGDQYADLFLAAKNLSDAILLSDILRVNTEITKAPLSASMIKRYDEHHQDLTLLKALVRQQLPEKYKEIFFDQSKNGYAGYIDGGASQEEFYKFIKPILEKMDGTEELLVKLNREDLLRKQRTFDNGSIPHQIHLGELHAILRRQEDFYPFLKDNREKIEKILTFRIPYYVGPLARGNSRFAWMTRKSEETITPWNFEEVVDKGASAQSFIERMTNFDKNLPNEKVLPKHSLLYEYFTVYNELTKVKYVTEGMRKPAFLSGEQKKAIVDLLFKTNRKVTVKQLKEDYFKKIECFDSVEISGVEDRFNASLGTYHDLLKIIKDKDFLDNEENEDILEDIVLTLTLFEDREMIEERLKTYAHLFDDKVMKQLKRRRYTGWGRLSRKLINGIRDKQSGKTILDFLKSDGFANRNFMQLIHDDSLTFKEDIQKAQVSGQGDSLHEHIANLAGSPAIKKGILQTVKVVDELVKVMGRHKPENIVIEMARENQTTQKGQKNSRERMKRIEEGIKELGSQILKEHPVENTQLQNEKLYLYYLQNGRDMYVDQELDINRLSDYDVDHIVPQSFLKDDSIDNKVLTRSDKARGKSDNVPSEEVVKKMKNYWRQLLNAKLITQRKFDNLTKAERGGLSELDKAGFIKRQLVETRQITKHVAQILDSRMNTKYDENDKLIREVKVITLKSKLVSDFRKDFQFYKVREINNYHHAHDAYLNAVVGTALIKKYPKLESEFVYGDYKVYDVRKMIAKSEQEIGKATAKYFFYSNIMNFFKTEITLANGEIRKRPLIETNGETGEIVWDKGRDFATVRKVLSMPQVNIVKKTEVQTGGFSKESILPKRNSDKLIARKKDWDPKKYGGFDSPTVAYSVLVVAKVEKGKSKKLKSVKELLGITIMERSSFEKNPIDFLEAKGYKEVKKDLIIKLPKYSLFELENGRKRMLASAGELQKGNELALPSKYVNFLYLASHYEKLKGSPEDNEQKQLFVEQHKHYLDEIIEQISEFSKRVILADANLDKVLSAYNKHRDKPIREQAENIIHLFTLTNLGAPAAFKYFDTTIDRKRYTSTKEVLDATLIHQSITGLYETRIDLSQLGGDGGGGSGGSGGSGGSGGSGGPRSRAIDIPVPHADKISWKITDPVWVDQWPLTYEKTLAAIALVQEQLAAGHIEPTNSPWNTPIFIIKKKSGSWRLLQDLRAVNKVMVPMGALQPGLPSPVAPPLNYHKIVIDLKDCFFTIPLHPEDRPYFAFSVPQINFQSPMPRYQWKVLPQGMANSPTLCQKFVAAAIAPVRSQWPEAYILHYMDDILLACDSAEAAKACYAHIISCLTSYGLKIAPDKVQVSEPFSYLGFELHHQQVFTPRVCLKTDHLKTLNDFQKLLGDIQWLRPYLKLPTSALVPLNNILKPDPNPLSVRALTPEAKQSLALINKAIQNQSVQQISYNLPLVLLLLPTPHTPTAVFWQPNGTDPTKNGSPLLWLHLPASPSKVLLTYPSLLAMLIIKGRYTGRQLFGRDPHSIIIPYTQDQLTWLLQTSDEWAIALSSFTGDIDNHYPSDPVIQFAKLHQFIFPKITKCAPIPQATLVFTDGSSNGIAAYVIDNQPISIKSPYLSAQLVELYAILQVFTVLAHQPFNLYTDSAYIAQSVPLLETVPFIKSSTNATPLFSKLQQLILNRQHPFFIGHLRAHLNLPGPLAEGNALADAATQIFPIISDAGKRTADGSEFEKRTADGSEFESPKKKAKVE

SEQ ID NO: 744 - protein, 2017 aa, synthetic construct
  source 1..2017: note = Description of Artificial Sequence: Synthetic polypeptide
MPAAKRVKLDGGDKKYSIGLDIGTNSVGWAVITDEYKVPSKKFKVLGNTDRHSIKKNLIGALLFDSGETAEATRLKRTARRRYTRRKNRICYLQEIFSNEMAKVDDSFFHRLEESFLVEEDKKHERHPIFGNIVDEVAYHEKYPTIYHLRKKLVDSTDKADLRLIYLALAHMIKFRGHFLIEGDLNPDNSDVDKLFIQLVQTYNQLFEENPINASGVDAKAILSARLSKSRRLENLIAQLPGEKKNGLFGNLIALSLGLTPNFKSNFDLAEDAKLQLSKDTYDDDLDNLLAQIGDQYADLFLAAKNLSDAILLSDILRVNTEITKAPLSASMIKRYDEHHQDLTLLKALVRQQLPEKYKEIFFDQSKNGYAGYIDGGASQEEFYKFIKPILEKMDGTEELLVKLNREDLLRKQRTFDNGSIPHQIHLGELHAILRRQEDFYPFLKDNREKIEKILTFRIPYYVGPLARGNSRFAWMTRKSEETITPWNFEEVVDKGASAQSFIERMTNFDKNLPNEKVLPKHSLLYEYFTVYNELTKVKYVTEGMRKPAFLSGEQKKAIVDLLFKTNRKVTVKQLKEDYFKKIECFDSVEISGVEDRFNASLGTYHDLLKIIKDKDFLDNEENEDILEDIVLTLTLFEDREMIEERLKTYAHLFDDKVMKQLKRRRYTGWGRLSRKLINGIRDKQSGKTILDFLKSDGFANRNFMQLIHDDSLTFKEDIQKAQVSGQGDSLHEHIANLAGSPAIKKGILQTVKVVDELVKVMGRHKPENIVIEMARENQTTQKGQKNSRERMKRIEEGIKELGSQILKEHPVENTQLQNEKLYLYYLQNGRDMYVDQELDINRLSDYDVDHIVPQSFLKDDSIDNKVLTRSDKARGKSDNVPSEEVVKKMKNYWRQLLNAKLITQRKFDNLTKAERGGLSELDKAGFIKRQLVETRQITKHVAQILDSRMNTKYDENDKLIREVKVITLKSKLVSDFRKDFQFYKVREINNYHHAHDAYLNAVVGTALIKKYPKLESEFVYGDYKVYDVRKMIAKSEQEIGKATAKYFFYSNIMNFFKTEITLANGEIRKRPLIETNGETGEIVWDKGRDFATVRKVLSMPQVNIVKKTEVQTGGFSKESILPKRNSDKLIARKKDWDPKKYGGFDSPTVAYSVLVVAKVEKGKSKKLKSVKELLGITIMERSSFEKNPIDFLEAKGYKEVKKDLIIKLPKYSLFELENGRKRMLASAGELQKGNELALPSKYVNFLYLASHYEKLKGSPEDNEQKQLFVEQHKHYLDEIIEQISEFSKRVILADANLDKVLSAYNKHRDKPIREQAENIIHLFTLTNLGAPAAFKYFDTTIDRKRYTSTKEVLDATLIHQSITGLYETRIDLSQLGGDGGGSSPAPEAAAKGGPRSRAIDIPVPHADKISWKITDPVWVDQWPLTYEKTLAAIALVQEQLAAGHIEPTNSPWNTPIFIIKKKSGSWRLLQDLRAVNKVMVPMGALQPGLPSPVAPPLNYHKIVIDLKDCFFTIPLHPEDRPYFAFSVPQINFQSPMPRYQWKVLPQGMANSPTLCQKFVAAAIAPVRSQWPEAYILHYMDDILLACDSAEAAKACYAHIISCLTSYGLKIAPDKVQVSEPFSYLGFELHHQQVFTPRVCLKTDHLKTLNDFQKLLGDIQWLRPYLKLPTSALVPLNNILKPDPNPLSVRALTPEAKQSLALINKAIQNQSVQQISYNLPLVLLLLPTPHTPTAVFWQPNGTDPTKNGSPLLWLHLPASPSKVLLTYPSLLAMLIIKGRYTGRQLFGRDPHSIIIPYTQDQLTWLLQTSDEWAIALSSFTGDIDNHYPSDPVIQFAKLHQFIFPKITKCAPIPQATLVFTDGSSNGIAAYVIDNQPISIKSPYLSAQLVELYAILQVFTVLAHQPFNLYTDSAYIAQSVPLLETVPFIKSSTNATPLFSKLQQLILNRQHPFFIGHLRAHLNLPGPLAEGNALADAATQIFPIISDAGKRTADGSEFEKRTADGSEFESPKKKAKVE

SEQ ID NO: 745 - protein, 2032 aa, synthetic construct
  source 1..2032: note = Description of Artificial Sequence: Synthetic polypeptide
MPAAKRVKLDGGDKKYSIGLDIGTNSVGWAVITDEYKVPSKKFKVLGNTDRHSIKKNLIGALLFDSGETAEATRLKRTARRRYTRRKNRICYLQEIFSNEMAKVDDSFFHRLEESFLVEEDKKHERHPIFGNIVDEVAYHEKYPTIYHLRKKLVDSTDKADLRLIYLALAHMIKFRGHFLIEGDLNPDNSDVDKLFIQLVQTYNQLFEENPINASGVDAKAILSARLSKSRRLENLIAQLPGEKKNGLFGNLIALSLGLTPNFKSNFDLAEDAKLQLSKDTYDDDLDNLLAQIGDQYADLFLAAKNLSDAILLSDILRVNTEITKAPLSASMIKRYDEHHQDLTLLKALVRQQLPEKYKEIFFDQSKNGYAGYIDGGASQEEFYKFIKPILEKMDGTEELLVKLNREDLLRKQRTFDNGSIPHQIHLGELHAILRRQEDFYPFLKDNREKIEKILTFRIPYYVGPLARGNSRFAWMTRKSEETITPWNFEEVVDKGASAQSFIERMTNFDKNLPNEKVLPKHSLLYEYFTVYNELTKVKYVTEGMRKPAFLSGEQKKAIVDLLFKTNRKVTVKQLKEDYFKKIECFDSVEISGVEDRFNASLGTYHDLLKIIKDKDFLDNEENEDILEDIVLTLTLFEDREMIEERLKTYAHLFDDKVMKQLKRRRYTGWGRLSRKLINGIRDKQSGKTILDFLKSDGFANRNFMQLIHDDSLTFKEDIQKAQVSGQGDSLHEHIANLAGSPAIKKGILQTVKVVDELVKVMGRHKPENIVIEMARENQTTQKGQKNSRERMKRIEEGIKELGSQILKEHPVENTQLQNEKLYLYYLQNGRDMYVDQELDINRLSDYDVDHIVPQSFLKDDSIDNKVLTRSDKARGKSDNVPSEEVVKKMKNYWRQLLNAKLITQRKFDNLTKAERGGLSELDKAGFIKRQLVETRQITKHVAQILDSRMNTKYDENDKLIREVKVITLKSKLVSDFRKDFQFYKVREINNYHHAHDAYLNAVVGTALIKKYPKLESEFVYGDYKVYDVRKMIAKSEQEIGKATAKYFFYSNIMNFFKTEITLANGEIRKRPLIETNGETGEIVWDKGRDFATVRKVLSMPQVNIVKKTEVQTGGFSKESILPKRNSDKLIARKKDWDPKKYGGFDSPTVAYSVLVVAKVEKGKSKKLKSVKELLGITIMERSSFEKNPIDFLEAKGYKEVKKDLIIKLPKYSLFELENGRKRMLASAGELQKGNELALPSKYVNFLYLASHYEKLKGSPEDNEQKQLFVEQHKHYLDEIIEQISEFSKRVILADANLDKVLSAYNKHRDKPIREQAENIIHLFTLTNLGAPAAFKYFDTTIDRKRYTSTKEVLDATLIHQSITGLYETRIDLSQLGGDGGSGGSSGGSSGSETPGTSESATPESSGGSSGGSSGGLATAVDILAPQRYADPITWKSDEPVWVDQWPLTQEKLAAAQQLVQEQLQAGHIIESNSPWNTPIFVIKKKSGKWRLLQDLRAVNATMVLMGALQPGLPSPVAIPQGYFKIVIDLKDCFFTIPLQPVDQKRFAFSLPSTNFKQPMKRYQWKVLPQGMANSPTLCQKYVAAAIEPVRKSWAQMYIIHYMDDILIAGKLGEQVLQCFAQLKQALTTTGLQIAPEKVQLQDPYTYLGFQINGPKITNQKAVIRRDKLQTLNDFQKLLGDINWLRPYLHLTTGDLKPLFDILKGDSNPNSPRSLSEAALASLQKVETAIAEQFVTQIDYTQPLTFLIFNTTLTPTGLFWQNNPVMWVHLPASPKKVLLPYYDAIADLIILGRDNSKKYFGLEPSTIIQPYSKSQIHWLMQNTETWPIACASYAGNIDNHYPPNKLIQFCKLHAVVFPRIISKTPLDNALLVFTDGSSTGIAAYTFEKTTVRFKTSHTSAQLVELQALIAVLSAFPHRALNVYTDSAYLAHSIPLLETVSHIKHISDTAKFFLQCQQLIYNRSIPFYLGHIRAHSGLPGPLSQGNHITDLATKVVATTLTTAGKRTADGSEFEKRTADGSEFESPKKKAKVE

SEQ ID NO: 746 - protein, 2045 aa, synthetic construct
  source 1..2045: note = Description of Artificial Sequence: Synthetic polypeptide
MPAAKRVKLDGGDKKYSIGLDIGTNSVGWAVITDEYKVPSKKFKVLGNTDRHSIKKNLIGALLFDSGETAEATRLKRTARRRYTRRKNRICYLQEIFSNEMAKVDDSFFHRLEESFLVEEDKKHERHPIFGNIVDEVAYHEKYPTIYHLRKKLVDSTDKADLRLIYLALAHMIKFRGHFLIEGDLNPDNSDVDKLFIQLVQTYNQLFEENPINASGVDAKAILSARLSKSRRLENLIAQLPGEKKNGLFGNLIALSLGLTPNFKSNFDLAEDAKLQLSKDTYDDDLDNLLAQIGDQYADLFLAAKNLSDAILLSDILRVNTEITKAPLSASMIKRYDEHHQDLTLLKALVRQQLPEKYKEIFFDQSKNGYAGYIDGGASQEEFYKFIKPILEKMDGTEELLVKLNREDLLRKQRTFDNGSIPHQIHLGELHAILRRQEDFYPFLKDNREKIEKILTFRIPYYVGPLARGNSRFAWMTRKSEETITPWNFEEVVDKGASAQSFIERMTNFDKNLPNEKVLPKHSLLYEYFTVYNELTKVKYVTEGMRKPAFLSGEQKKAIVDLLFKTNRKVTVKQLKEDYFKKIECFDSVEISGVEDRFNASLGTYHDLLKIIKDKDFLDNEENEDILEDIVLTLTLFEDREMIEERLKTYAHLFDDKVMKQLKRRRYTGWGRLSRKLINGIRDKQSGKTILDFLKSDGFANRNFMQLIHDDSLTFKEDIQKAQVSGQGDSLHEHIANLAGSPAIKKGILQTVKVVDELVKVMGRHKPENIVIEMARENQTTQKGQKNSRERMKRIEEGIKELGSQILKEHPVENTQLQNEKLYLYYLQNGRDMYVDQELDINRLSDYDVDHIVPQSFLKDDSIDNKVLTRSDKARGKSDNVPSEEVVKKMKNYWRQLLNAKLITQRKFDNLTKAERGGLSELDKAGFIKRQLVETRQITKHVAQILDSRMNTKYDENDKLIREVKVITLKSKLVSDFRKDFQFYKVREINNYHHAHDAYLNAVVGTALIKKYPKLESEFVYGDYKVYDVRKMIAKSEQEIGKATAKYFFYSNIMNFFKTEITLANGEIRKRPLIETNGETGEIVWDKGRDFATVRKVLSMPQVNIVKKTEVQTGGFSKESILPKRNSDKLIARKKDWDPKKYGGFDSPTVAYSVLVVAKVEKGKSKKLKSVKELLGITIMERSSFEKNPIDFLEAKGYKEVKKDLIIKLPKYSLFELENGRKRMLASAGELQKGNELALPSKYVNFLYLASHYEKLKGSPEDNEQKQLFVEQHKHYLDEIIEQISEFSKRVILADANLDKVLSAYNKHRDKPIREQAENIIHLFTLTNLGAPAAFKYFDTTIDRKRYTSTKEVLDATLIHQSITGLYETRIDLSQLGGDGGAEAAAKEAAAKEAAAKEAAAKALEAEAAAKEAAAKEAAAKEAAAKAGGLATAVDILAPQRYADPITWKSDEPVWVDQWPLTQEKLAAAQQLVQEQLQAGHIIESNSPWNTPIFVIKKKSGKWRLLQDLRAVNATMVLMGALQPGLPSPVAIPQGYFKIVIDLKDCFFTIPLQPVDQKRFAFSLPSTNFKQPMKRYQWKVLPQGMANSPTLCQKYVAAAIEPVRKSWAQMYIIHYMDDILIAGKLGEQVLQCFAQLKQALTTTGLQIAPEKVQLQDPYTYLGFQINGPKITNQKAVIRRDKLQTLNDFQKLLGDINWLRPYLHLTTGDLKPLFDILKGDSNPNSPRSLSEAALASLQKVETAIAEQFVTQIDYTQPLTFLIFNTTLTPTGLFWQNNPVMWVHLPASPKKVLLPYYDAIADLIILGRDNSKKYFGLEPSTIIQPYSKSQIHWLMQNTETWPIACASYAGNIDNHYPPNKLIQFCKLHAVVFPRIISKTPLDNALLVFTDGSSTGIAAYTFEKTTVRFKTSHTSAQLVELQALIAVLSAFPHRALNVYTDSAYLAHSIPLLETVSHIKHISDTAKFFLQCQQLIYNRSIPFYLGHIRAHSGLPGPLSQGNHITDLATKVVATTLTTAGKRTADGSEFEKRTADGSEFESPKKKAKVE

SEQ ID NO: 747 - protein, 2029 aa, synthetic construct
  source 1..2029: note = Description of Artificial Sequence: Synthetic polypeptide
MPAAKRVKLDGGDKKYSIGLDIGTNSVGWAVITDEYKVPSKKFKVLGNTDRHSIKKNLIGALLFDSGETAEATRLKRTARRRYTRRKNRICYLQEIFSNEMAKVDDSFFHRLEESFLVEEDKKHERHPIFGNIVDEVAYHEKYPTIYHLRKKLVDSTDKADLRLIYLALAHMIKFRGHFLIEGDLNPDNSDVDKLFIQLVQTYNQLFEENPINASGVDAKAILSARLSKSRRLENLIAQLPGEKKNGLFGNLIALSLGLTPNFKSNFDLAEDAKLQLSKDTYDDDLDNLLAQIGDQYADLFLAAKNLSDAILLSDILRVNTEITKAPLSASMIKRYDEHHQDLTLLKALVRQQLPEKYKEIFFDQSKNGYAGYIDGGASQEEFYKFIKPILEKMDGTEELLVKLNREDLLRKQRTFDNGSIPHQIHLGELHAILRRQEDFYPFLKDNREKIEKILTFRIPYYVGPLARGNSRFAWMTRKSEETITPWNFEEVVDKGASAQSFIERMTNFDKNLPNEKVLPKHSLLYEYFTVYNELTKVKYVTEGMRKPAFLSGEQKKAIVDLLFKTNRKVTVKQLKEDYFKKIECFDSVEISGVEDRFNASLGTYHDLLKIIKDKDFLDNEENEDILEDIVLTLTLFEDREMIEERLKTYAHLFDDKVMKQLKRRRYTGWGRLSRKLINGIRDKQSGKTILDFLKSDGFANRNFMQLIHDDSLTFKEDIQKAQVSGQGDSLHEHIANLAGSPAIKKGILQTVKVVDELVKVMGRHKPENIVIEMARENQTTQKGQKNSRERMKRIEEGIKELGSQILKEHPVENTQLQNEKLYLYYLQNGRDMYVDQELDINRLSDYDVDHIVPQSFLKDDSIDNKVLTRSDKARGKSDNVPSEEVVKKMKNYWRQLLNAKLITQRKFDNLTKAERGGLSELDKAGFIKRQLVETRQITKHVAQILDSRMNTKYDENDKLIREVKVITLKSKLVSDFRKDFQFYKVREINNYHHAHDAYLNAVVGTALIKKYPKLESEFVYGDYKVYDVRKMIAKSEQEIGKATAKYFFYSNIMNFFKTEITLANGEIRKRPLIETNGETGEIVWDKGRDFATVRKVLSMPQVNIVKKTEVQTGGFSKESILPKRNSDKLIARKKDWDPKKYGGFDSPTVAYSVLVVAKVEKGKSKKLKSVKELLGITIMERSSFEKNPIDFLEAKGYKEVKKDLIIKLPKYSLFELENGRKRMLASAGELQKGNELALPSKYVNFLYLASHYEKLKGSPEDNEQKQLFVEQHKHYLDEIIEQISEFSKRVILADANLDKVLSAYNKHRDKPIREQAENIIHLFTLTNLGAPAAFKYFDTTIDRKRYTSTKEVLDATLIHQSITGLYETRIDLSQLGGDGGEAAAKEAAAKEAAAKEAAAKEAAAKEAAAKGGLATAVDILAPQRYADPITWKSDEPVWVDQWPLTQEKLAAAQQLVQEQLQAGHIIESNSPWNTPIFVIKKKSGKWRLLQDLRAVNATMVLMGALQPGLPSPVAIPQGYFKIVIDLKDCFFTIPLQPVDQKRFAFSLPSTNFKQPMKRYQWKVLPQGMANSPTLCQKYVAAAIEPVRKSWAQMYIIHYMDDILIAGKLGEQVLQCFAQLKQALTTTGLQIAPEKVQLQDPYTYLGFQINGPKITNQKAVIRRDKLQTLNDFQKLLGDINWLRPYLHLTTGDLKPLFDILKGDSNPNSPRSLSEAALASLQKVETAIAEQFVTQIDYTQPLTFLIFNTTLTPTGLFWQNNPVMWVHLPASPKKVLLPYYDAIADLIILGRDNSKKYFGLEPSTIIQPYSKSQIHWLMQNTETWPIACASYAGNIDNHYPPNKLIQFCKLHAVVFPRIISKTPLDNALLVFTDGSSTGIAAYTFEKTTVRFKTSHTSAQLVELQALIAVLSAFPHRALNVYTDSAYLAHSIPLLETVSHIKHISDTAKFFLQCQQLIYNRSIPFYLGHIRAHSGLPGPLSQGNHITDLATKVVATTLTTAGKRTADGSEFEKRTADGSEFESPKKKAKVE

SEQ ID NO: 748 - protein, 2024 aa, synthetic construct
  source 1..2024: note = Description of Artificial Sequence: Synthetic polypeptide
MPAAKRVKLDGGDKKYSIGLDIGTNSVGWAVITDEYKVPSKKFKVLGNTDRHSIKKNLIGALLFDSGETAEATRLKRTARRRYTRRKNRICYLQEIFSNEMAKVDDSFFHRLEESFLVEEDKKHERHPIFGNIVDEVAYHEKYPTIYHLRKKLVDSTDKADLRLIYLALAHMIKFRGHFLIEGDLNPDNSDVDKLFIQLVQTYNQLFEENPINASGVDAKAILSARLSKSRRLENLIAQLPGEKKNGLFGNLIALSLGLTPNFKSNFDLAEDAKLQLSKDTYDDDLDNLLAQIGDQYADLFLAAKNLSDAILLSDILRVNTEITKAPLSASMIKRYDEHHQDLTLLKALVRQQLPEKYKEIFFDQSKNGYAGYIDGGASQEEFYKFIKPILEKMDGTEELLVKLNREDLLRKQRTFDNGSIPHQIHLGELHAILRRQEDFYPFLKDNREKIEKILTFRIPYYVGPLARGNSRFAWMTRKSEETITPWNFEEVVDKGASAQSFIERMTNFDKNLPNEKVLPKHSLLYEYFTVYNELTKVKYVTEGMRKPAFLSGEQKKAIVDLLFKTNRKVTVKQLKEDYFKKIECFDSVEISGVEDRFNASLGTYHDLLKIIKDKDFLDNEENEDILEDIVLTLTLFEDREMIEERLKTYAHLFDDKVMKQLKRRRYTGWGRLSRKLINGIRDKQSGKTILDFLKSDGFANRNFMQLIHDDSLTFKEDIQKAQVSGQGDSLHEHIANLAGSPAIKKGILQTVKVVDELVKVMGRHKPENIVIEMARENQTTQKGQKNSRERMKRIEEGIKELGSQILKEHPVENTQLQNEKLYLYYLQNGRDMYVDQELDINRLSDYDVDHIVPQSFLKDDSIDNKVLTRSDKARGKSDNVPSEEVVKKMKNYWRQLLNAKLITQRKFDNLTKAERGGLSELDKAGFIKRQLVETRQITKHVAQILDSRMNTKYDENDKLIREVKVITLKSKLVSDFRKDFQFYKVREINNYHHAHDAYLNAVVGTALIKKYPKLESEFVYGDYKVYDVRKMIAKSEQEIGKATAKYFFYSNIMNFFKTEITLANGEIRKRPLIETNGETGEIVWDKGRDFATVRKVLSMPQVNIVKKTEVQTGGFSKESILPKRNSDKLIARKKDWDPKKYGGFDSPTVAYSVLVVAKVEKGKSKKLKSVKELLGITIMERSSFEKNPIDFLEAKGYKEVKKDLIIKLPKYSLFELENGRKRMLASAGELQKGNELALPSKYVNFLYLASHYEKLKGSPEDNEQKQLFVEQHKHYLDEIIEQISEFSKRVILADANLDKVLSAYNKHRDKPIREQAENIIHLFTLTNLGAPAAFKYFDTTIDRKRYTSTKEVLDATLIHQSITGLYETRIDLSQLGGDGGEAAAKEAAAKEAAAKEAAAKEAAAKGGLATAVDILAPQRYADPITWKSDEPVWVDQWPLTQEKLAAAQQLVQEQLQAGHIIESNSPWNTPIFVIKKKSGKWRLLQDLRAVNATMVLMGALQPGLPSPVAIPQGYFKIVIDLKDCFFTIPLQPVDQKRFAFSLPSTNFKQPMKRYQWKVLPQGMANSPTLCQKYVAAAIEPVRKSWAQMYIIHYMDDILIAGKLGEQVLQCFAQLKQALTTTGLQIAPEKVQLQDPYTYLGFQINGPKITNQKAVIRRDKLQTLNDFQKLLGDINWLRPYLHLTTGDLKPLFDILKGDSNPNSPRSLSEAALASLQKVETAIAEQFVTQIDYTQPLTFLIFNTTLTPTGLFWQNNPVMWVHLPASPKKVLLPYYDAIADLIILGRDNSKKYFGLEPSTIIQPYSKSQIHWLMQNTETWPIACASYAGNIDNHYPPNKLIQFCKLHAVVFPRIISKTPLDNALLVFTDGSSTGIAAYTFEKTTVRFKTSHTSAQLVELQALIAVLSAFPHRALNVYTDSAYLAHSIPLLETVSHIKHISDTAKFFLQCQQLIYNRSIPFYLGHIRAHSGLPGPLSQGNHITDLATKVVATTLTTAGKRTADGSEFEKRTADGSEFESPKKKAKVE

SEQ ID NO: 749 - protein, 2012 aa, synthetic construct
  source 1..2012: note = Description of Artificial Sequence: Synthetic polypeptide
MPAAKRVKLDGGDKKYSIGLDIGTNSVGWAVITDEYKVPSKKFKVLGNTDRHSIKKNLIGALLFDSGETAEATRLKRTARRRYTRRKNRICYLQEIFSNEMAKVDDSFFHRLEESFLVEEDKKHERHPIFGNIVDEVAYHEKYPTIYHLRKKLVDSTDKADLRLIYLALAHMIKFRGHFLIEGDLNPDNSDVDKLFIQLVQTYNQLFEENPINASGVDAKAILSARLSKSRRLENLIAQLPGEKKNGLFGNLIALSLGLTPNFKSNFDLAEDAKLQLSKDTYDDDLDNLLAQIGDQYADLFLAAKNLSDAILLSDILRVNTEITKAPLSASMIKRYDEHHQDLTLLKALVRQQLPEKYKEIFFDQSKNGYAGYIDGGASQEEFYKFIKPILEKMDGTEELLVKLNREDLLRKQRTFDNGSIPHQIHLGELHAILRRQEDFYPFLKDNREKIEKILTFRIPYYVGPLARGNSRFAWMTRKSEETITPWNFEEVVDKGASAQSFIERMTNFDKNLPNEKVLPKHSLLYEYFTVYNELTKVKYVTEGMRKPAFLSGEQKKAIVDLLFKTNRKVTVKQLKEDYFKKIECFDSVEISGVEDRFNASLGTYHDLLKIIKDKDFLDNEENEDILEDIVLTLTLFEDREMIEERLKTYAHLFDDKVMKQLKRRRYTGWGRLSRKLINGIRDKQSGKTILDFLKSDGFANRNFMQLIHDDSLTFKEDIQKAQVSGQGDSLHEHIANLAGSPAIKKGILQTVKVVDELVKVMGRHKPENIVIEMARENQTTQKGQKNSRERMKRIEEGIKELGSQILKEHPVENTQLQNEKLYLYYLQNGRDMYVDQELDINRLSDYDVDHIVPQSFLKDDSIDNKVLTRSDKARGKSDNVPSEEVVKKMKNYWRQLLNAKLITQRKFDNLTKAERGGLSELDKAGFIKRQLVETRQITKHVAQILDSRMNTKYDENDKLIREVKVITLKSKLVSDFRKDFQFYKVREINNYHHAHDAYLNAVVGTALIKKYPKLESEFVYGDYKVYDVRKMIAKSEQEIGKATAKYFFYSNIMNFFKTEITLANGEIRKRPLIETNGETGEIVWDKGRDFATVRKVLSMPQVNIVKKTEVQTGGFSKESILPKRNSDKLIARKKDWDPKKYGGFDSPTVAYSVLVVAKVEKGKSKKLKSVKELLGITIMERSSFEKNPIDFLEAKGYKEVKKDLIIKLPKYSLFELENGRKRMLASAGELQKGNELALPSKYVNFLYLASHYEKLKGSPEDNEQKQLFVEQHKHYLDEIIEQISEFSKRVILADANLDKVLSAYNKHRDKPIREQAENIIHLFTLTNLGAPAAFKYFDTTIDRKRYTSTKEVLDATLIHQSITGLYETRIDLSQLGGDGGPAPAPAPAPAPAPGGLATAVDILAPQRYADPITWKSDEPVWVDQWPLTQEKLAAAQQLVQEQLQAGHIIESNSPWNTPIFVIKKKSGKWRLLQDLRAVNATMVLMGALQPGLPSPVAIPQGYFKIVIDLKDCFFTIPLQPVDQKRFAFSLPSTNFKQPMKRYQWKVLPQGMANSPTLCQKYVAAAIEPVRKSWAQMYIIHYMDDILIAGKLGEQVLQCFAQLKQALTTTGLQIAPEKVQLQDPYTYLGFQINGPKITNQKAVIRRDKLQTLNDFQKLLGDINWLRPYLHLTTGDLKPLFDILKGDSNPNSPRSLSEAALASLQKVETAIAEQFVTQIDYTQPLTFLIFNTTLTPTGLFWQNNPVMWVHLPASPKKVLLPYYDAIADLIILGRDNSKKYFGLEPSTIIQPYSKSQIHWLMQNTETWPIACASYAGNIDNHYPPNKLIQFCKLHAVVFPRIISKTPLDNALLVFTDGSSTGIAAYTFEKTTVRFKTSHTSAQLVELQALIAVLSAFPHRALNVYTDSAYLAHSIPLLETVSHIKHISDTAKFFLQCQQLIYNRSIPFYLGHIRAHSGLPGPLSQGNHITDLATKVVATTLTTAGKRTADGSEFEKRTADGSEFESPKKKAKVE

SEQ ID NO: 750 - protein, 2010 aa, synthetic construct
  source 1..2010: note = Description of Artificial Sequence: Synthetic polypeptide
MPAAKRVKLDGGDKKYSIGLDIGTNSVGWAVITDEYKVPSKKFKVLGNTDRHSIKKNLIGALLFDSGETAEATRLKRTARRRYTRRKNRICYLQEIFSNEMAKVDDSFFHRLEESFLVEEDKKHERHPIFGNIVDEVAYHEKYPTIYHLRKKLVDSTDKADLRLIYLALAHMIKFRGHFLIEGDLNPDNSDVDKLFIQLVQTYNQLFEENPINASGVDAKAILSARLSKSRRLENLIAQLPGEKKNGLFGNLIALSLGLTPNFKSNFDLAEDAKLQLSKDTYDDDLDNLLAQIGDQYADLFLAAKNLSDAILLSDILRVNTEITKAPLSASMIKRYDEHHQDLTLLKALVRQQLPEKYKEIFFDQSKNGYAGYIDGGASQEEFYKFIKPILEKMDGTEELLVKLNREDLLRKQRTFDNGSIPHQIHLGELHAILRRQEDFYPFLKDNREKIEKILTFRIPYYVGPLARGNSRFAWMTRKSEETITPWNFEEVVDKGASAQSFIERMTNFDKNLPNEKVLPKHSLLYEYFTVYNELTKVKYVTEGMRKPAFLSGEQKKAIVDLLFKTNRKVTVKQLKEDYFKKIECFDSVEISGVEDRFNASLGTYHDLLKIIKDKDFLDNEENEDILEDIVLTLTLFEDREMIEERLKTYAHLFDDKVMKQLKRRRYTGWGRLSRKLINGIRDKQSGKTILDFLKSDGFANRNFMQLIHDDSLTFKEDIQKAQVSGQGDSLHEHIANLAGSPAIKKGILQTVKVVDELVKVMGRHKPENIVIEMARENQTTQKGQKNSRERMKRIEEGIKELGSQILKEHPVENTQLQNEKLYLYYLQNGRDMYVDQELDINRLSDYDVDHIVPQSFLKDDSIDNKVLTRSDKARGKSDNVPSEEVVKKMKNYWRQLLNAKLITQRKFDNLTKAERGGLSELDKAGFIKRQLVETRQITKHVAQILDSRMNTKYDENDKLIREVKVITLKSKLVSDFRKDFQFYKVREINNYHHAHDAYLNAVVGTALIKKYPKLESEFVYGDYKVYDVRKMIAKSEQEIGKATAKYFFYSNIMNFFKTEITLANGEIRKRPLIETNGETGEIVWDKGRDFATVRKVLSMPQVNIVKKTEVQTGGFSKESILPKRNSDKLIARKKDWDPKKYGGFDSPTVAYSVLVVAKVEKGKSKKLKSVKELLGITIMERSSFEKNPIDFLEAKGYKEVKKDLIIKLPKYSLFELENGRKRMLASAGELQKGNELALPSKYVNFLYLASHYEKLKGSPEDNEQKQLFVEQHKHYLDEIIEQISEFSKRVILADANLDKVLSAYNKHRDKPIREQAENIIHLFTLTNLGAPAAFKYFDTTIDRKRYTSTKEVLDATLIHQSITGLYETRIDLSQLGGDGGPAPAPAPAPAPGGLATAVDILAPQRYADPITWKSDEPVWVDQWPLTQEKLAAAQQLVQEQLQAGHIIESNSPWNTPIFVIKKKSGKWRLLQDLRAVNATMVLMGALQPGLPSPVAIPQGYFKIVIDLKDCFFTIPLQPVDQKRFAFSLPSTNFKQPMKRYQWKVLPQGMANSPTLCQKYVAAAIEPVRKSWAQMYIIHYMDDILIAGKLGEQVLQCFAQLKQALTTTGLQIAPEKVQLQDPYTYLGFQINGPKITNQKAVIRRDKLQTLNDFQKLLGDINWLRPYLHLTTGDLKPLFDILKGDSNPNSPRSLSEAALASLQKVETAIAEQFVTQIDYTQPLTFLIFNTTLTPTGLFWQNNPVMWVHLPASPKKVLLPYYDAIADLIILGRDNSKKYFGLEPSTIIQPYSKSQIHWLMQNTETWPIACASYAGNIDNHYPPNKLIQFCKLHAVVFPRIISKTPLDNALLVFTDGSSTGIAAYTFEKTTVRFKTSHTSAQLVELQALIAVLSAFPHRALNVYTDSAYLAHSIPLLETVSHIKHISDTAKFFLQCQQLIYNRSIPFYLGHIRAHSGLPGPLSQGNHITDLATKVVATTLTTAGKRTADGSEFEKRTADGSEFESPKKKAKVE

SEQ ID NO: 751 - protein, 2014 aa, synthetic construct
  source 1..2014: note = Description of Artificial Sequence: Synthetic polypeptide
MPAAKRVKLDGGDKKYSIGLDIGTNSVGWAVITDEYKVPSKKFKVLGNTDRHSIKKNLIGALLFDSGETAEATRLKRTARRRYTRRKNRICYLQEIFSNEMAKVDDSFFHRLEESFLVEEDKKHERHPIFGNIVDEVAYHEKYPTIYHLRKKLVDSTDKADLRLIYLALAHMIKFRGHFLIEGDLNPDNSDVDKLFIQLVQTYNQLFEENPINASGVDAKAILSARLSKSRRLENLIAQLPGEKKNGLFGNLIALSLGLTPNFKSNFDLAEDAKLQLSKDTYDDDLDNLLAQIGDQYADLFLAAKNLSDAILLSDILRVNTEITKAPLSASMIKRYDEHHQDLTLLKALVRQQLPEKYKEIFFDQSKNGYAGYIDGGASQEEFYKFIKPILEKMDGTEELLVKLNREDLLRKQRTFDNGSIPHQIHLGELHAILRRQEDFYPFLKDNREKIEKILTFRIPYYVGPLARGNSRFAWMTRKSEETITPWNFEEVVDKGASAQSFIERMTNFDKNLPNEKVLPKHSLLYEYFTVYNELTKVKYVTEGMRKPAFLSGEQKKAIVDLLFKTNRKVTVKQLKEDYFKKIECFDSVEISGVEDRFNASLGTYHDLLKIIKDKDFLDNEENEDILEDIVLTLTLFEDREMIEERLKTYAHLFDDKVMKQLKRRRYTGWGRLSRKLINGIRDKQSGKTILDFLKSDGFANRNFMQLIHDDSLTFKEDIQKAQVSGQGDSLHEHIANLAGSPAIKKGILQTVKVVDELVKVMGRHKPENIVIEMARENQTTQKGQKNSRERMKRIEEGIKELGSQILKEHPVENTQLQNEKLYLYYLQNGRDMYVDQELDINRLSDYDVDHIVPQSFLKDDSIDNKVLTRSDKARGKSDNVPSEEVVKKMKNYWRQLLNAKLITQRKFDNLTKAERGGLSELDKAGFIKRQLVETRQITKHVAQILDSRMNTKYDENDKLIREVKVITLKSKLVSDFRKDFQFYKVREINNYHHAHDAYLNAVVGTALIKKYPKLESEFVYGDYKVYDVRKMIAKSEQEIGKATAKYFFYSNIMNFFKTEITLANGEIRKRPLIETNGETGEIVWDKGRDFATVRKVLSMPQVNIVKKTEVQTGGFSKESILPKRNSDKLIARKKDWDPKKYGGFDSPTVAYSVLVVAKVEKGKSKKLKSVKELLGITIMERSSFEKNPIDFLEAKGYKEVKKDLIIKLPKYSLFELENGRKRMLASAGELQKGNELALPSKYVNFLYLASHYEKLKGSPEDNEQKQLFVEQHKHYLDEIIEQISEFSKRVILADANLDKVLSAYNKHRDKPIREQAENIIHLFTLTNLGAPAAFKYFDTTIDRKRYTSTKEVLDATLIHQSITGLYETRIDLSQLGGDGGGSSGSSGSSGSSGSSGGLATAVDILAPQRYADPITWKSDEPVWVDQWPLTQEKLAAAQQLVQEQLQAGHIIESNSPWNTPIFVIKKKSGKWRLLQDLRAVNATMVLMGALQPGLPSPVAIPQGYFKIVIDLKDCFFTIPLQPVDQKRFAFSLPSTNFKQPMKRYQWKVLPQGMANSPTLCQKYVAAAIEPVRKSWAQMYIIHYMDDILIAGKLGEQVLQCFAQLKQALTTTGLQIAPEKVQLQDPYTYLGFQINGPKITNQKAVIRRDKLQTLNDFQKLLGDINWLRPYLHLTTGDLKPLFDILKGDSNPNSPRSLSEAALASLQKVETAIAEQFVTQIDYTQPLTFLIFNTTLTPTGLFWQNNPVMWVHLPASPKKVLLPYYDAIADLIILGRDNSKKYFGLEPSTIIQPYSKSQIHWLMQNTETWPIACASYAGNIDNHYPPNKLIQFCKLHAVVFPRIISKTPLDNALLVFTDGSSTGIAAYTFEKTTVRFKTSHTSAQLVELQALIAVLSAFPHRALNVYTDSAYLAHSIPLLETVSHIKHISDTAKFFLQCQQLIYNRSIPFYLGHIRAHSGLPGPLSQGNHITDLATKVVATTLTTAGKRTADGSEFEKRTADGSEFESPKKKAKVE

SEQ ID NO: 752 - protein, 2015 aa, synthetic construct
  source 1..2015: note = Description of Artificial Sequence: Synthetic polypeptide
MPAAKRVKLDGGDKKYSIGLDIGTNSVGWAVITDEYKVPSKKFKVLGNTDRHSIKKNLIGALLFDSGETAEATRLKRTARRRYTRRKNRICYLQEIFSNEMAKVDDSFFHRLEESFLVEEDKKHERHPIFGNIVDEVAYHEKYPTIYHLRKKLVDSTDKADLRLIYLALAHMIKFRGHFLIEGDLNPDNSDVDKLFIQLVQTYNQLFEENPINASGVDAKAILSARLSKSRRLENLIAQLPGEKKNGLFGNLIALSLGLTPNFKSNFDLAEDAKLQLSKDTYDDDLDNLLAQIGDQYADLFLAAKNLSDAILLSDILRVNTEITKAPLSASMIKRYDEHHQDLTLLKALVRQQLPEKYKEIFFDQSKNGYAGYIDGGASQEEFYKFIKPILEKMDGTEELLVKLNREDLLRKQRTFDNGSIPHQIHLGELHAILRRQEDFYPFLKDNREKIEKILTFRIPYYVGPLARGNSRFAWMTRKSEETITPWNFEEVVDKGASAQSFIERMTNFDKNLPNEKVLPKHSLLYEYFTVYNELTKVKYVTEGMRKPAFLSGEQKKAIVDLLFKTNRKVTVKQLKEDYFKKIECFDSVEISGVEDRFNASLGTYHDLLKIIKDKDFLDNEENEDILEDIVLTLTLFEDREMIEERLKTYAHLFDDKVMKQLKRRRYTGWGRLSRKLINGIRDKQSGKTILDFLKSDGFANRNFMQLIHDDSLTFKEDIQKAQVSGQGDSLHEHIANLAGSPAIKKGILQTVKVVDELVKVMGRHKPENIVIEMARENQTTQKGQKNSRERMKRIEEGIKELGSQILKEHPVENTQLQNEKLYLYYLQNGRDMYVDQELDINRLSDYDVDHIVPQSFLKDDSIDNKVLTRSDKARGKSDNVPSEEVVKKMKNYWRQLLNAKLITQRKFDNLTKAERGGLSELDKAGFIKRQLVETRQITKHVAQILDSRMNTKYDENDKLIREVKVITLKSKLVSDFRKDFQFYKVREINNYHHAHDAYLNAVVGTALIKKYPKLESEFVYGDYKVYDVRKMIAKSEQEIGKATAKYFFYSNIMNFFKTEITLANGEIRKRPLIETNGETGEIVWDKGRDFATVRKVLSMPQVNIVKKTEVQTGGFSKESILPKRNSDKLIARKKDWDPKKYGGFDSPTVAYSVLVVAKVEKGKSKKLKSVKELLGITIMERSSFEKNPIDFLEAKGYKEVKKDLIIKLPKYSLFELENGRKRMLASAGELQKGNELALPSKYVNFLYLASHYEKLKGSPEDNEQKQLFVEQHKHYLDEIIEQISEFSKRVILADANLDKVLSAYNKHRDKPIREQAENIIHLFTLTNLGAPAAFKYFDTTIDRKRYTSTKEVLDATLIHQSITGLYETRIDLSQLGGDGGSGSETPGTSESATPESGGLATAVDILAPQRYADPITWKSDEPVWVDQWPLTQEKLAAAQQLVQEQLQAGHIIESNSPWNTPIFVIKKKSGKWRLLQDLRAVNATMVLMGALQPGLPSPVAIPQGYFKIVIDLKDCFFTIPLQPVDQKRFAFSLPSTNFKQPMKRYQWKVLPQGMANSPTLCQKYVAAAIEPVRKSWAQMYIIHYMDDILIAGKLGEQVLQCFAQLKQALTTTGLQIAPEKVQLQDPYTYLGFQINGPKITNQKAVIRRDKLQTLNDFQKLLGDINWLRPYLHLTTGDLKPLFDILKGDSNPNSPRSLSEAALASLQKVETAIAEQFVTQIDYTQPLTFLIFNTTLTPTGLFWQNNPVMWVHLPASPKKVLLPYYDAIADLIILGRDNSKKYFGLEPSTIIQPYSKSQIHWLMQNTETWPIACASYAGNIDNHYPPNKLIQFCKLHAVVFPRIISKTPLDNALLVFTDGSSTGIAAYTFEKTTVRFKTSHTSAQLVELQALIAVLSAFPHRALNVYTDSAYLAHSIPLLETVSHIKHISDTAKFFLQCQQLIYNRSIPFYLGHIRAHSGLPGPLSQGNHITDLATKVVATTLTTAGKRTADGSEFEKRTADGSEFESPKKKAKVE

SEQ ID NO: 753 - protein, 2010 aa, synthetic construct
  source 1..2010: note = Description of Artificial Sequence: Synthetic polypeptide
MPAAKRVKLDGGDKKYSIGLDIGTNSVGWAVITDEYKVPSKKFKVLGNTDRHSIKKNLIGALLFDSGETAEATRLKRTARRRYTRRKNRICYLQEIFSNEMAKVDDSFFHRLEESFLVEEDKKHERHPIFGNIVDEVAYHEKYPTIYHLRKKLVDSTDKADLRLIYLALAHMIKFRGHFLIEGDLNPDNSDVDKLFIQLVQTYNQLFEENPINASGVDAKAILSARLSKSRRLENLIAQLPGEKKNGLFGNLIALSLGLTPNFKSNFDLAEDAKLQLSKDTYDDDLDNLLAQIGDQYADLFLAAKNLSDAILLSDILRVNTEITKAPLSASMIKRYDEHHQDLTLLKALVRQQLPEKYKEIFFDQSKNGYAGYIDGGASQEEFYKFIKPILEKMDGTEELLVKLNREDLLRKQRTFDNGSIPHQIHLGELHAILRRQEDFYPFLKDNREKIEKILTFRIPYYVGPLARGNSRFAWMTRKSEETITPWNFEEVVDKGASAQSFIERMTNFDKNLPNEKVLPKHSLLYEYFTVYNELTKVKYVTEGMRKPAFLSGEQKKAIVDLLFKTNRKVTVKQLKEDYFKKIECFDSVEISGVEDRFNASLGTYHDLLKIIKDKDFLDNEENEDILEDIVLTLTLFEDREMIEERLKTYAHLFDDKVMKQLKRRRYTGWGRLSRKLINGIRDKQSGKTILDFLKSDGFANRNFMQLIHDDSLTFKEDIQKAQVSGQGDSLHEHIANLAGSPAIKKGILQTVKVVDELVKVMGRHKPENIVIEMARENQTTQKGQKNSRERMKRIEEGIKELGSQILKEHPVENTQLQNEKLYLYYLQNGRDMYVDQELDINRLSDYDVDHIVPQSFLKDDSIDNKVLTRSDKARGKSDNVPSEEVVKKMKNYWRQLLNAKLITQRKFDNLTKAERGGLSELDKAGFIKRQLVETRQITKHVAQILDSRMNTKYDENDKLIREVKVITLKSKLVSDFRKDFQFYKVREINNYHHAHDAYLNAVVGTALIKKYPKLESEFVYGDYKVYDVRKMIAKSEQEIGKATAKYFFYSNIMNFFKTEITLANGEIRKRPLIETNGETGEIVWDKGRDFATVRKVLSMPQVNIVKKTEVQTGGFSKESILPKRNSDKLIARKKDWDPKKYGGFDSPTVAYSVLVVAKVEKGKSKKLKSVKELLGITIMERSSFEKNPIDFLEAKGYKEVKKDLIIKLPKYSLFELENGRKRMLASAGELQKGNELALPSKYVNFLYLASHYEKLKGSPEDNEQKQLFVEQHKHYLDEIIEQISEFSKRVILADANLDKVLSAYNKHRDKPIREQAENIIHLFTLTNLGAPAAFKYFDTTIDRKRYTSTKEVLDATLIHQSITGLYETRIDLSQLGGDGGGSSPAPEAAAKGGLATAVDILAPQRYADPITWKSDEPVWVDQWPLTQEKLAAAQQLVQEQLQAGHIIESNSPWNTPIFVIKKKSGKWRLLQDLRAVNATMVLMGALQPGLPSPVAIPQGYFKIVIDLKDCFFTIPLQPVDQKRFAFSLPSTNFKQPMKRYQWKVLPQGMANSPTLCQKYVAAAIEPVRKSWAQMYIIHYMDDILIAGKLGEQVLQCFAQLKQALTTTGLQIAPEKVQLQDPYTYLGFQINGPKITNQKAVIRRDKLQTLNDFQKLLGDINWLRPYLHLTTGDLKPLFDILKGDSNPNSPRSLSEAALASLQKVETAIAEQFVTQIDYTQPLTFLIFNTTLTPTGLFWQNNPVMWVHLPASPKKVLLPYYDAIADLIILGRDNSKKYFGLEPSTIIQPYSKSQIHWLMQNTETWPIACASYAGNIDNHYPPNKLIQFCKLHAVVFPRIISKTPLDNALLVFTDGSSTGIAAYTFEKTTVRFKTSHTSAQLVELQALIAVLSAFPHRALNVYTDSAYLAHSIPLLETVSHIKHISDTAKFFLQCQQLIYNRSIPFYLGHIRAHSGLPGPLSQGNHITDLATKVVATTLTTAGKRTADGSEFEKRTADGSEFESPKKKAKVE

SEQ ID NO: 754 - protein, 2010 aa, synthetic construct
  source 1..2010: note = Description of Artificial Sequence: Synthetic polypeptide
MPAAKRVKLDGGDKKYSIGLDIGTNSVGWAVITDEYKVPSKKFKVLGNTDRHSIKKNLIGALLFDSGETAEATRLKRTARRRYTRRKNRICYLQEIFSNEMAKVDDSFFHRLEESFLVEEDKKHERHPIFGNIVDEVAYHEKYPTIYHLRKKLVDSTDKADLRLIYLALAHMIKFRGHFLIEGDLNPDNSDVDKLFIQLVQTYNQLFEENPINASGVDAKAILSARLSKSRRLENLIAQLPGEKKNGLFGNLIALSLGLTPNFKSNFDLAEDAKLQLSKDTYDDDLDNLLAQIGDQYADLFLAAKNLSDAILLSDILRVNTEITKAPLSASMIKRYDEHHQDLTLLKALVRQQLPEKYKEIFFDQSKNGYAGYIDGGASQEEFYKFIKPILEKMDGTEELLVKLNREDLLRKQRTFDNGSIPHQIHLGELHAILRRQEDFYPFLKDNREKIEKILTFRIPYYVGPLARGNSRFAWMTRKSEETITPWNFEEVVDKGASAQSFIERMTNFDKNLPNEKVLPKHSLLYEYFTVYNELTKVKYVTEGMRKPAFLSGEQKKAIVDLLFKTNRKVTVKQLKEDYFKKIECFDSVEISGVEDRFNASLGTYHDLLKIIKDKDFLDNEENEDILEDIVLTLTLFEDREMIEERLKTYAHLFDDKVMKQLKRRRYTGWGRLSRKLINGIRDKQSGKTILDFLKSDGFANRNFMQLIHDDSLTFKEDIQKAQVSGQGDSLHEHIANLAGSPAIKKGILQTVKVVDELVKVMGRHKPENIVIEMARENQTTQKGQKNSRERMKRIEEGIKELGSQILKEHPVENTQLQNEKLYLYYLQNGRDMYVDQELDINRLSDYDVDHIVPQSFLKDDSIDNKVLTRSDKARGKSDNVPSEEVVKKMKNYWRQLLNAKLITQRKFDNLTKAERGGLSELDKAGFIKRQLVETRQITKHVAQILDSRMNTKYDENDKLIREVKVITLKSKLVSDFRKDFQFYKVREINNYHHAHDAYLNAVVGTALIKKYPKLESEFVYGDYKVYDVRKMIAKSEQEIGKATAKYFFYSNIMNFFKTEITLANGEIRKRPLIETNGETGEIVWDKGRDFATVRKVLSMPQVNIVKKTEVQTGGFSKESILPKRNSDKLIARKKDWDPKKYGGFDSPTVAYSVLVVAKVEKGKSKKLKSVKELLGITIMERSSFEKNPIDFLEAKGYKEVKKDLIIKLPKYSLFELENGRKRMLASAGELQKGNELALPSKYVNFLYLASHYEKLKGSPEDNEQKQLFVEQHKHYLDEIIEQISEFSKRVILADANLDKVLSAYNKHRDKPIREQAENIIHLFTLTNLGAPAAFKYFDTTIDRKRYTSTKEVLDATLIHQSITGLYETRIDLSQLGGDGGGSSGGSEAAAKGGLATAVDILAPQRYADPITWKSDEPVWVDQWPLTQEKLAAAQQLVQEQLQAGHIIESNSPWNTPIFVIKKKSGKWRLLQDLRAVNATMVLMGALQPGLPSPVAIPQGYFKIVIDLKDCFFTIPLQPVDQKRFAFSLPSTNFKQPMKRYQWKVLPQGMANSPTLCQKYVAAAIEPVRKSWAQMYIIHYMDDILIAGKLGEQVLQCFAQLKQALTTTGLQIAPEKVQLQDPYTYLGFQINGPKITNQKAVIRRDKLQTLNDFQKLLGDINWLRPYLHLTTGDLKPLFDILKGDSNPNSPRSLSEAALASLQKVETAIAEQFVTQIDYTQPLTFLIFNTTLTPTGLFWQNNPVMWVHLPASPKKVLLPYYDAIADLIILGRDNSKKYFGLEPSTIIQPYSKSQIHWLMQNTETWPIACASYAGNIDNHYPPNKLIQFCKLHAVVFPRIISKTPLDNALLVFTDGSSTGIAAYTFEKTTVRFKTSHTSAQLVELQALIAVLSAFPHRALNVYTDSAYLAHSIPLLETVSHIKHISDTAKFFLQCQQLIYNRSIPFYLGHIRAHSGLPGPLSQGNHITDLATKVVATTLTTAGKRTADGSEFEKRTADGSEFESPKKKAKVE

SEQ ID NO: 755 - protein, 2008 aa, synthetic construct
  source 1..2008: note = Description of Artificial Sequence: Synthetic polypeptide
MPAAKRVKLDGGDKKYSIGLDIGTNSVGWAVITDEYKVPSKKFKVLGNTDRHSIKKNLIGALLFDSGETAEATRLKRTARRRYTRRKNRICYLQEIFSNEMAKVDDSFFHRLEESFLVEEDKKHERHPIFGNIVDEVAYHEKYPTIYHLRKKLVDSTDKADLRLIYLALAHMIKFRGHFLIEGDLNPDNSDVDKLFIQLVQTYNQLFEENPINASGVDAKAILSARLSKSRRLENLIAQLPGEKKNGLFGNLIALSLGLTPNFKSNFDLAEDAKLQLSKDTYDDDLDNLLAQIGDQYADLFLAAKNLSDAILLSDILRVNTEITKAPLSASMIKRYDEHHQDLTLLKALVRQQLPEKYKEIFFDQSKNGYAGYIDGGASQEEFYKFIKPILEKMDGTEELLVKLNREDLLRKQRTFDNGSIPHQIHLGELHAILRRQEDFYPFLKDNREKIEKILTFRIPYYVGPLARGNSRFAWMTRKSEETITPWNFEEVVDKGASAQSFIERMTNFDKNLPNEKVLPKHSLLYEYFTVYNELTKVKYVTEGMRKPAFLSGEQKKAIVDLLFKTNRKVTVKQLKEDYFKKIECFDSVEISGVEDRFNASLGTYHDLLKIIKDKDFLDNEENEDILEDIVLTLTLFEDREMIEERLKTYAHLFDDKVMKQLKRRRYTGWGRLSRKLINGIRDKQSGKTILDFLKSDGFANRNFMQLIHDDSLTFKEDIQKAQVSGQGDSLHEHIANLAGSPAIKKGILQTVKVVDELVKVMGRHKPENIVIEMARENQTTQKGQKNSRERMKRIEEGIKELGSQILKEHPVENTQLQNEKLYLYYLQNGRDMYVDQELDINRLSDYDVDHIVPQSFLKDDSIDNKVLTRSDKARGKSDNVPSEEVVKKMKNYWRQLLNAKLITQRKFDNLTKAERGGLSELDKAGFIKRQLVETRQITKHVAQILDSRMNTKYDENDKLIREVKVITLKSKLVSDFRKDFQFYKVREINNYHHAHDAYLNAVVGTALIKKYPKLESEFVYGDYKVYDVRKMIAKSEQEIGKATAKYFFYSNIMNFFKTEITLANGEIRKRPLIETNGETGEIVWDKGRDFATVRKVLSMPQVNIVKKTEVQTGGFSKESILPKRNSDKLIARKKDWDPKKYGGFDSPTVAYSVLVVAKVEKGKSKKLKSVKELLGITIMERSSFEKNPIDFLEAKGYKEVKKDLIIKLPKYSLFELENGRKRMLASAGELQKGNELALPSKYVNFLYLASHYEKLKGSPEDNEQKQLFVEQHKHYLDEIIEQISEFSKRVILADANLDKVLSAYNKHRDKPIREQAENIIHLFTLTNLGAPAAFKYFDTTIDRKRYTSTKEVLDATLIHQSITGLYETRIDLSQLGGDGGPAPGGGGGSGGLATAVDILAPQRYADPITWKSDEPVWVDQWPLTQEKLAAAQQLVQEQLQAGHIIESNSPWNTPIFVIKKKSGKWRLLQDLRAVNATMVLMGALQPGLPSPVAIPQGYFKIVIDLKDCFFTIPLQPVDQKRFAFSLPSTNFKQPMKRYQWKVLPQGMANSPTLCQKYVAAAIEPVRKSWAQMYIIHYMDDILIAGKLGEQVLQCFAQLKQALTTTGLQIAPEKVQLQDPYTYLGFQINGPKITNQKAVIRRDKLQTLNDFQKLLGDINWLRPYLHLTTGDLKPLFDILKGDSNPNSPRSLSEAALASLQKVETAIAEQFVTQIDYTQPLTFLIFNTTLTPTGLFWQNNPVMWVHLPASPKKVLLPYYDAIADLIILGRDNSKKYFGLEPSTIIQPYSKSQIHWLMQNTETWPIACASYAGNIDNHYPPNKLIQFCKLHAVVFPRIISKTPLDNALLVFTDGSSTGIAAYTFEKTTVRFKTSHTSAQLVELQALIAVLSAFPHRALNVYTDSAYLAHSIPLLETVSHIKHISDTAKFFLQCQQLIYNRSIPFYLGHIRAHSGLPGPLSQGNHITDLATKVVATTLTTAGKRTADGSEFEKRTADGSEFESPKKKAKVE

SEQ ID NO: 756 - protein, 2005 aa, synthetic construct
  source 1..2005: note = Description of Artificial Sequence: Synthetic polypeptide
MPAAKRVKLDGGDKKYSIGLDIGTNSVGWAVITDEYKVPSKKFKVLGNTDRHSIKKNLIGALLFDSGETAEATRLKRTARRRYTRRKNRICYLQEIFSNEMAKVDDSFFHRLEESFLVEEDKKHERHPIFGNIVDEVAYHEKYPTIYHLRKKLVDSTDKADLRLIYLALAHMIKFRGHFLIEGDLNPDNSDVDKLFIQLVQTYNQLFEENPINASGVDAKAILSARLSKSRRLENLIAQLPGEKKNGLFGNLIALSLGLTPNFKSNFDLAEDAKLQLSKDTYDDDLDNLLAQIGDQYADLFLAAKNLSDAILLSDILRVNTEITKAPLSASMIKRYDEHHQDLTLLKALVRQQLPEKYKEIFFDQSKNGYAGYIDGGASQEEFYKFIKPILEKMDGTEELLVKLNREDLLRKQRTFDNGSIPHQIHLGELHAILRRQEDFYPFLKDNREKIEKILTFRIPYYVGPLARGNSRFAWMTRKSEETITPWNFEEVVDKGASAQSFIERMTNFDKNLPNEKVLPKHSLLYEYFTVYNELTKVKYVTEGMRKPAFLSGEQKKAIVDLLFKTNRKVTVKQLKEDYFKKIECFDSVEISGVEDRFNASLGTYHDLLKIIKDKDFLDNEENEDILEDIVLTLTLFEDREMIEERLKTYAHLFDDKVMKQLKRRRYTGWGRLSRKLINGIRDKQSGKTILDFLKSDGFANRNFMQLIHDDSLTFKEDIQKAQVSGQGDSLHEHIANLAGSPAIKKGILQTVKVVDELVKVMGRHKPENIVIEMARENQTTQKGQKNSRERMKRIEEGIKELGSQILKEHPVENTQLQNEKLYLYYLQNGRDMYVDQELDINRLSDYDVDHIVPQSFLKDDSIDNKVLTRSDKARGKSDNVPSEEVVKKMKNYWRQLLNAKLITQRKFDNLTKAERGGLSELDKAGFIKRQLVETRQITKHVAQILDSRMNTKYDENDKLIREVKVITLKSKLVSDFRKDFQFYKVREINNYHHAHDAYLNAVVGTALIKKYPKLESEFVYGDYKVYDVRKMIAKSEQEIGKATAKYFFYSNIMNFFKTEITLANGEIRKRPLIETNGETGEIVWDKGRDFATVRKVLSMPQVNIVKKTEVQTGGFSKESILPKRNSDKLIARKKDWDPKKYGGFDSPTVAYSVLVVAKVEKGKSKKLKSVKELLGITIMERSSFEKNPIDFLEAKGYKEVKKDLIIKLPKYSLFELENGRKRMLASAGELQKGNELALPSKYVNFLYLASHYEKLKGSPEDNEQKQLFVEQHKHYLDEIIEQISEFSKRVILADANLDKVLSAYNKHRDKPIREQAENIIHLFTLTNLGAPAAFKYFDTTIDRKRYTSTKEVLDATLIHQSITGLYETRIDLSQLGGDGGGGGGGSGGLATAVDILAPQRYADPITWKSDEPVWVDQWPLTQEKLAAAQQLVQEQLQAGHIIESNSPWNTPIFVIKKKSGKWRLLQDLRAVNATMVLMGALQPGLPSPVAIPQGYFKIVIDLKDCFFTIPLQPVDQKRFAFSLPSTNFKQPMKRYQWKVLPQGMANSPTLCQKYVAAAIEPVRKSWAQMYIIHYMDDILIAGKLGEQVLQCFAQLKQALTTTGLQIAPEKVQLQDPYTYLGFQINGPKITNQKAVIRRDKLQTLNDFQKLLGDINWLRPYLHLTTGDLKPLFDILKGDSNPNSPRSLSEAALASLQKVETAIAEQFVTQIDYTQPLTFLIFNTTLTPTGLFWQNNPVMWVHLPASPKKVLLPYYDAIADLIILGRDNSKKYFGLEPSTIIQPYSKSQIHWLMQNTETWPIACASYAGNIDNHYPPNKLIQFCKLHAVVFPRIISKTPLDNALLVFTDGSSTGIAAYTFEKTTVRFKTSHTSAQLVELQALIAVLSAFPHRALNVYTDSAYLAHSIPLLETVSHIKHISDTAKFFLQCQQLIYNRSIPFYLGHIRAHSGLPGPLSQGNHITDLATKVVATTLTTAGKRTADGSEFEKRTADGSEFESPKKKAKVE

SEQ ID NO: 757 - protein, 2014 aa, synthetic construct
  source 1..2014: note = Description of Artificial Sequence: Synthetic polypeptide
MPAAKRVKLDGGDKKYSIGLDIGTNSVGWAVITDEYKVPSKKFKVLGNTDRHSIKKNLIGALLFDSGETAEATRLKRTARRRYTRRKNRICYLQEIFSNEMAKVDDSFFHRLEESFLVEEDKKHERHPIFGNIVDEVAYHEKYPTIYHLRKKLVDSTDKADLRLIYLALAHMIKFRGHFLIEGDLNPDNSDVDKLFIQLVQTYNQLFEENPINASGVDAKAILSARLSKSRRLENLIAQLPGEKKNGLFGNLIALSLGLTPNFKSNFDLAEDAKLQLSKDTYDDDLDNLLAQIGDQYADLFLAAKNLSDAILLSDILRVNTEITKAPLSASMIKRYDEHHQDLTLLKALVRQQLPEKYKEIFFDQSKNGYAGYIDGGASQEEFYKFIKPILEKMDGTEELLVKLNREDLLRKQRTFDNGSIPHQIHLGELHAILRRQEDFYPFLKDNREKIEKILTFRIPYYVGPLARGNSRFAWMTRKSEETITPWNFEEVVDKGASAQSFIERMTNFDKNLPNEKVLPKHSLLYEYFTVYNELTKVKYVTEGMRKPAFLSGEQKKAIVDLLFKTNRKVTVKQLKEDYFKKIECFDSVEISGVEDRFNASLGTYHDLLKIIKDKDFLDNEENEDILEDIVLTLTLFEDREMIEERLKTYAHLFDDKVMKQLKRRRYTGWGRLSRKLINGIRDKQSGKTILDFLKSDGFANRNFMQLIHDDSLTFKEDIQKAQVSGQGDSLHEHIANLAGSPAIKKGILQTVKVVDELVKVMGRHKPENIVIEMARENQTTQKGQKNSRERMKRIEEGIKELGSQILKEHPVENTQLQNEKLYLYYLQNGRDMYVDQELDINRLSDYDVDHIVPQSFLKDDSIDNKVLTRSDKARGKSDNVPSEEVVKKMKNYWRQLLNAKLITQRKFDNLTKAERGGLSELDKAGFIKRQLVETRQITKHVAQILDSRMNTKYDENDKLIREVKVITLKSKLVSDFRKDFQFYKVREINNYHHAHDAYLNAVVGTALIKKYPKLESEFVYGDYKVYDVRKMIAKSEQEIGKATAKYFFYSNIMNFFKTEITLANGEIRKRPLIETNGETGEIVWDKGRDFATVRKVLSMPQVNIVKKTEVQTGGFSKESILPKRNSDKLIARKKDWDPKKYGGFDSPTVAYSVLVVAKVEKGKSKKLKSVKELLGITIMERSSFEKNPIDFLEAKGYKEVKKDLIIKLPKYSLFELENGRKRMLASAGELQKGNELALPSKYVNFLYLASHYEKLKGSPEDNEQKQLFVEQHKHYLDEIIEQISEFSKRVILADANLDKVLSAYNKHRDKPIREQAENIIHLFTLTNLGAPAAFKYFDTTIDRKRYTSTKEVLDATLIHQSITGLYETRIDLSQLGGDGGGSSGSSGSSGSSGSSGGLATAVDILAPQRYADPITWKSDEPVWVDQWPLTQEKLAAAQQLVQEQLQAGHIIESNSPWNTPIFVIKKKSGKWRLLQDLRAVNATMVLMGALQPGLPSPVAPPQGYFKIVIDLKDCFFTIPLQPVDQKRFAFSLPSTNFKQPMKRYQWKVLPQGMANSPTLCQKYVAAAIEPVRKSWAQMYIIHYMDDILIAGKLGEQVLQCFAQLKQALTTTGLQIAPEKVQLQDPYTYLGFQINGPKITNQKAVIRRDKLQTLNDFQKLLGDINWLRPYLHLTTGDLKPLFDILKGDSNPNSPRSLSEAALASLQKVETAIAEQFVTQIDYTQPLTFLIFNTTLTPTGLFWQNNPVMWVHLPASPKKVLLPYYDAIADLIILGRDNSKKYFGLEPSTIIQPYSKSQIHWLMQNTETWPIACASYAGNIDNHYPPNKLIQFCKLHAVVFPRIISKTPLDNALLVFTDGSSTGIAAYTFEKTTVRFKTSHTSAQLVELQALIAVLSAFPHRALNVYTDSAYLAHSIPLLETVSHIKHISDTAKFFLQCQQLIYNRSIPFYLGHIRAHSGLPGPLSQGNHITDLATKVVATTLTTAGKRTADGSEFEKRTADGSEFESPKKKAKVE

SEQ ID NO: 758 - protein, 2010 aa, synthetic construct
  source 1..2010: note = Description of Artificial Sequence: Synthetic polypeptide
MPAAKRVKLDGGDKKYSIGLDIGTNSVGWAVITDEYKVPSKKFKVLGNTDRHSIKKNLIGALLFDSGETAEATRLKRTARRRYTRRKNRICYLQEIFSNEMAKVDDSFFHRLEESFLVEEDKKHERHPIFGNIVDEVAYHEKYPTIYHLRKKLVDSTDKADLRLIYLALAHMIKFRGHFLIEGDLNPDNSDVDKLFIQLVQTYNQLFEENPINASGVDAKAILSARLSKSRRLENLIAQLPGEKKNGLFGNLIALSLGLTPNFKSNFDLAEDAKLQLSKDTYDDDLDNLLAQIGDQYADLFLAAKNLSDAILLSDILRVNTEITKAPLSASMIKRYDEHHQDLTLLKALVRQQLPEKYKEIFFDQSKNGYAGYIDGGASQEEFYKFIKPILEKMDGTEELLVKLNREDLLRKQRTFDNGSIPHQIHLGELHAILRRQEDFYPFLKDNREKIEKILTFRIPYYVGPLARGNSRFAWMTRKSEETITPWNFEEVVDKGASAQSFIERMTNFDKNLPNEKVLPKHSLLYEYFTVYNELTKVKYVTEGMRKPAFLSGEQKKAIVDLLFKTNRKVTVKQLKEDYFKKIECFDSVEISGVEDRFNASLGTYHDLLKIIKDKDFLDNEENEDILEDIVLTLTLFEDREMIEERLKTYAHLFDDKVMKQLKRRRYTGWGRLSRKLINGIRDKQSGKTILDFLKSDGFANRNFMQLIHDDSLTFKEDIQKAQVSGQGDSLHEHIANLAGSPAIKKGILQTVKVVDELVKVMGRHKPENIVIEMARENQTTQKGQKNSRERMKRIEEGIKELGSQILKEHPVENTQLQNEKLYLYYLQNGRDMYVDQELDINRLSDYDVDHIVPQSFLKDDSIDNKVLTRSDKARGKSDNVPSEEVVKKMKNYWRQLLNAKLITQRKFDNLTKAERGGLSELDKAGFIKRQLVETRQITKHVAQILDSRMNTKYDENDKLIREVKVITLKSKLVSDFRKDFQFYKVREINNYHHAHDAYLNAVVGTALIKKYPKLESEFVYGDYKVYDVRKMIAKSEQEIGKATAKYFFYSNIMNFFKTEITLANGEIRKRPLIETNGETGEIVWDKGRDFATVRKVLSMPQVNIVKKTEVQTGGFSKESILPKRNSDKLIARKKDWDPKKYGGFDSPTVAYSVLVVAKVEKGKSKKLKSVKELLGITIMERSSFEKNPIDFLEAKGYKEVKKDLIIKLPKYSLFELENGRKRMLASAGELQKGNELALPSKYVNFLYLASHYEKLKGSPEDNEQKQLFVEQHKHYLDEIIEQISEFSKRVILADANLDKVLSAYNKHRDKPIREQAENIIHLFTLTNLGAPAAFKYFDTTIDRKRYTSTKEVLDATLIHQSITGLYETRIDLSQLGGDGGGSSPAPEAAAKGGLATAVDILAPQRYADPITWKSDEPVWVDQWPLTQEKLAAAQQLVQEQLQAGHIIESNSPWNTPIFVIKKKSGKWRLLQDLRAVNATMVLMGALQPGLPSPVAPPQGYFKIVIDLKDCFFTIPLQPVDQKRFAFSLPSTNFKQPMKRYQWKVLPQGMANSPTLCQKYVAAAIEPVRKSWAQMYIIHYMDDILIAGKLGEQVLQCFAQLKQALTTTGLQIAPEKVQLQDPYTYLGFQINGPKITNQKAVIRRDKLQTLNDFQKLLGDINWLRPYLHLTTGDLKPLFDILKGDSNPNSPRSLSEAALASLQKVETAIAEQFVTQIDYTQPLTFLIFNTTLTPTGLFWQNNPVMWVHLPASPKKVLLPYYDAIADLIILGRDNSKKYFGLEPSTIIQPYSKSQIHWLMQNTETWPIACASYAGNIDNHYPPNKLIQFCKLHAVVFPRIISKTPLDNALLVFTDGSSTGIAAYTFEKTTVRFKTSHTSAQLVELQALIAVLSAFPHRALNVYTDSAYLAHSIPLLETVSHIKHISDTAKFFLQCQQLIYNRSIPFYLGHIRAHSGLPGPLSQGNHITDLATKVVATTLTTAGKRTADGSEFEKRTADGSEFESPKKKAKVE

SEQ ID NO: 759 - protein, 2072 aa, synthetic construct
  source 1..2072: note = Description of Artificial Sequence: Synthetic polypeptide
MPAAKRVKLDGGDKKYSIGLDIGTNSVGWAVITDEYKVPSKKFKVLGNTDRHSIKKNLIGALLFDSGETAEATRLKRTARRRYTRRKNRICYLQEIFSNEMAKVDDSFFHRLEESFLVEEDKKHERHPIFGNIVDEVAYHEKYPTIYHLRKKLVDSTDKADLRLIYLALAHMIKFRGHFLIEGDLNPDNSDVDKLFIQLVQTYNQLFEENPINASGVDAKAILSARLSKSRRLENLIAQLPGEKKNGLFGNLIALSLGLTPNFKSNFDLAEDAKLQLSKDTYDDDLDNLLAQIGDQYADLFLAAKNLSDAILLSDILRVNTEITKAPLSASMIKRYDEHHQDLTLLKALVRQQLPEKYKEIFFDQSKNGYAGYIDGGASQEEFYKFIKPILEKMDGTEELLVKLNREDLLRKQRTFDNGSIPHQIHLGELHAILRRQEDFYPFLKDNREKIEKILTFRIPYYVGPLARGNSRFAWMTRKSEETITPWNFEEVVDKGASAQSFIERMTNFDKNLPNEKVLPKHSLLYEYFTVYNELTKVKYVTEGMRKPAFLSGEQKKAIVDLLFKTNRKVTVKQLKEDYFKKIECFDSVEISGVEDRFNASLGTYHDLLKIIKDKDFLDNEENEDILEDIVLTLTLFEDREMIEERLKTYAHLFDDKVMKQLKRRRYTGWGRLSRKLINGIRDKQSGKTILDFLKSDGFANRNFMQLIHDDSLTFKEDIQKAQVSGQGDSLHEHIANLAGSPAIKKGILQTVKVVDELVKVMGRHKPENIVIEMARENQTTQKGQKNSRERMKRIEEGIKELGSQILKEHPVENTQLQNEKLYLYYLQNGRDMYVDQELDINRLSDYDVDHIVPQSFLKDDSIDNKVLTRSDKARGKSDNVPSEEVVKKMKNYWRQLLNAKLITQRKFDNLTKAERGGLSELDKAGFIKRQLVETRQITKHVAQILDSRMNTKYDENDKLIREVKVITLKSKLVSDFRKDFQFYKVREINNYHHAHDAYLNAVVGTALIKKYPKLESEFVYGDYKVYDVRKMIAKSEQEIGKATAKYFFYSNIMNFFKTEITLANGEIRKRPLIETNGETGEIVWDKGRDFATVRKVLSMPQVNIVKKTEVQTGGFSKESILPKRNSDKLIARKKDWDPKKYGGFDSPTVAYSVLVVAKVEKGKSKKLKSVKELLGITIMERSSFEKNPIDFLEAKGYKEVKKDLIIKLPKYSLFELENGRKRMLASAGELQKGNELALPSKYVNFLYLASHYEKLKGSPEDNEQKQLFVEQHKHYLDEIIEQISEFSKRVILADANLDKVLSAYNKHRDKPIREQAENIIHLFTLTNLGAPAAFKYFDTTIDRKRYTSTKEVLDATLIHQSITGLYETRIDLSQLGGDGGPAPEAAAKGGSCQTKNTLNIDEYLLQFPDQLWASLPTDIGRMLVPPITIKIKDNASLPSIRQYPLPKDKTEGLRPLISSLENQGILIKCHSPCNTPIFPIKKAGRDEYRMIHDLRAINNIVAPLTAVVASPTTVLSNLAPSLHWFTVIDLSNAFFSVPIHKDSQYLFAFTFEGHQYTWTVLPQGFIHSPTLFSQALYQSLHKIKFKISSEICIYMDDVLIASKDRDTNLKDTAVMLQHLASEGHKVSKKKLQLCQQEVVYLGQLLTPEGRKILPDRKVTVSQFQQPTTIRQIRAFLGLVGYCRHWIPEFSIHSKFLEKQLKKDTAEPFQLDDQQVEAFNKLKHAITTAPVLVVPDPAKPFQLYTSHSEHASIAVLTQKHAGRTRPIAFLSSKFDAIESGLPPCLKACASIHRSLTQADSFILGAPLIIYTTHAICTLLQRDRSQLVTASRFSKWEADLLRPELTFVACSAVSPAHLYMQSCENNIPPHDCVLLTHTISRPRPDLSDLPIPDPDMTLFSDGSYTTGRGGAAVVMHRPVTDDFIIIHQQPGGASAQTAELLALAAACHLATDKTVNIYTDSRYAYGVVHDFGHLWMHRGFVTSAGTPIKNHKEIEYLLKQIMKPKQVSVIKIEAHTKGVSMEVRGNAAADEAAKNAVFLVQRAGKRTADGSEFEKRTADGSEFESPKKKAKVE

SEQ ID NO: 760 - protein, 2070 aa, synthetic construct
  source 1..2070: note = Description of Artificial Sequence: Synthetic polypeptide
MPAAKRVKLDGGDKKYSIGLDIGTNSVGWAVITDEYKVPSKKFKVLGNTDRHSIKKNLIGALLFDSGETAEATRLKRTARRRYTRRKNRICYLQEIFSNEMAKVDDSFFHRLEESFLVEEDKKHERHPIFGNIVDEVAYHEKYPTIYHLRKKLVDSTDKADLRLIYLALAHMIKFRGHFLIEGDLNPDNSDVDKLFIQLVQTYNQLFEENPINASGVDAKAILSARLSKSRRLENLIAQLPGEKKNGLFGNLIALSLGLTPNFKSNFDLAEDAKLQLSKDTYDDDLDNLLAQIGDQYADLFLAAKNLSDAILLSDILRVNTEITKAPLSASMIKRYDEHHQDLTLLKALVRQQLPEKYKEIFFDQSKNGYAGYIDGGASQEEFYKFIKPILEKMDGTEELLVKLNREDLLRKQRTFDNGSIPHQIHLGELHAILRRQEDFYPFLKDNREKIEKILTFRIPYYVGPLARGNSRFAWMTRKSEETITPWNFEEVVDKGASAQSFIERMTNFDKNLPNEKVLPKHSLLYEYFTVYNELTKVKYVTEGMRKPAFLSGEQKKAIVDLLFKTNRKVTVKQLKEDYFKKIECFDSVEISGVEDRFNASLGTYHDLLKIIKDKDFLDNEENEDILEDIVLTLTLFEDREMIEERLKTYAHLFDDKVMKQLKRRRYTGWGRLSRKLINGIRDKQSGKTILDFLKSDGFANRNFMQLIHDDSLTFKEDIQKAQVSGQGDSLHEHIANLAGSPAIKKGILQTVKVVDELVKVMGRHKPENIVIEMARENQTTQKGQKNSRERMKRIEEGIKELGSQILKEHPVENTQLQNEKLYLYYLQNGRDMYVDQELDINRLSDYDVDHIVPQSFLKDDSIDNKVLTRSDKARGKSDNVPSEEVVKKMKNYWRQLLNAKLITQRKFDNLTKAERGGLSELDKAGFIKRQLVETRQITKHVAQILDSRMNTKYDENDKLIREVKVITLKSKLVSDFRKDFQFYKVREINNYHHAHDAYLNAVVGTALIKKYPKLESEFVYGDYKVYDVRKMIAKSEQEIGKATAKYFFYSNIMNFFKTEITLANGEIRKRPLIETNGETGEIVWDKGRDFATVRKVLSMPQVNIVKKTEVQTGGFSKESILPKRNSDKLIARKKDWDPKKYGGFDSPTVAYSVLVVAKVEKGKSKKLKSVKELLGITIMERSSFEKNPIDFLEAKGYKEVKKDLIIKLPKYSLFELENGRKRMLASAGELQKGNELALPSKYVNFLYLASHYEKLKGSPEDNEQKQLFVEQHKHYLDEIIEQISEFSKRVILADANLDKVLSAYNKHRDKPIREQAENIIHLFTLTNLGAPAAFKYFDTTIDRKRYTSTKEVLDATLIHQSITGLYETRIDLSQLGGDGGGGGGGGGGSCQTKNTLNIDEYLLQFPDQLWASLPTDIGRMLVPPITIKIKDNASLPSIRQYPLPKDKTEGLRPLISSLENQGILIKCHSPCNTPIFPIKKAGRDEYRMIHDLRAINNIVAPLTAVVASPTTVLSNLAPSLHWFTVIDLSNAFFSVPIHKDSQYLFAFTFEGHQYTWTVLPQGFIHSPTLFSQALYQSLHKIKFKISSEICIYMDDVLIASKDRDTNLKDTAVMLQHLASEGHKVSKKKLQLCQQEVVYLGQLLTPEGRKILPDRKVTVSQFQQPTTIRQIRAFLGLVGYCRHWIPEFSIHSKFLEKQLKKDTAEPFQLDDQQVEAFNKLKHAITTAPVLVVPDPAKPFQLYTSHSEHASIAVLTQKHAGRTRPIAFLSSKFDAIESGLPPCLKACASIHRSLTQADSFILGAPLIIYTTHAICTLLQRDRSQLVTASRFSKWEADLLRPELTFVACSAVSPAHLYMQSCENNIPPHDCVLLTHTISRPRPDLSDLPIPDPDMTLFSDGSYTTGRGGAAVVMHRPVTDDFIIIHQQPGGASAQTAELLALAAACHLATDKTVNIYTDSRYAYGVVHDFGHLWMHRGFVTSAGTPIKNHKEIEYLLKQIMKPKQVSVIKIEAHTKGVSMEVRGNAAADEAAKNAVFLVQRAGKRTADGSEFEKRTADGSEFESPKKKAKVE

SEQ ID NO: 761 - protein, 2077 aa, synthetic construct
  source 1..2077: note = Description of Artificial Sequence: Synthetic polypeptide
MPAAKRVKLDGGDKKYSIGLDIGTNSVGWAVITDEYKVPSKKFKVLGNTDRHSIKKNLIGALLFDSGETAEATRLKRTARRRYTRRKNRICYLQEIFSNEMAKVDDSFFHRLEESFLVEEDKKHERHPIFGNIVDEVAYHEKYPTIYHLRKKLVDSTDKADLRLIYLALAHMIKFRGHFLIEGDLNPDNSDVDKLFIQLVQTYNQLFEENPINASGVDAKAILSARLSKSRRLENLIAQLPGEKKNGLFGNLIALSLGLTPNFKSNFDLAEDAKLQLSKDTYDDDLDNLLAQIGDQYADLFLAAKNLSDAILLSDILRVNTEITKAPLSASMIKRYDEHHQDLTLLKALVRQQLPEKYKEIFFDQSKNGYAGYIDGGASQEEFYKFIKPILEKMDGTEELLVKLNREDLLRKQRTFDNGSIPHQIHLGELHAILRRQEDFYPFLKDNREKIEKILTFRIPYYVGPLARGNSRFAWMTRKSEETITPWNFEEVVDKGASAQSFIERMTNFDKNLPNEKVLPKHSLLYEYFTVYNELTKVKYVTEGMRKPAFLSGEQKKAIVDLLFKTNRKVTVKQLKEDYFKKIECFDSVEISGVEDRFNASLGTYHDLLKIIKDKDFLDNEENEDILEDIVLTLTLFEDREMIEERLKTYAHLFDDKVMKQLKRRRYTGWGRLSRKLINGIRDKQSGKTILDFLKSDGFANRNFMQLIHDDSLTFKEDIQKAQVSGQGDSLHEHIANLAGSPAIKKGILQTVKVVDELVKVMGRHKPENIVIEMARENQTTQKGQKNSRERMKRIEEGIKELGSQILKEHPVENTQLQNEKLYLYYLQNGRDMYVDQELDINRLSDYDVDHIVPQSFLKDDSIDNKVLTRSDKARGKSDNVPSEEVVKKMKNYWRQLLNAKLITQRKFDNLTKAERGGLSELDKAGFIKRQLVETRQITKHVAQILDSRMNTKYDENDKLIREVKVITLKSKLVSDFRKDFQFYKVREINNYHHAHDAYLNAVVGTALIKKYPKLESEFVYGDYKVYDVRKMIAKSEQEIGKATAKYFFYSNIMNFFKTEITLANGEIRKRPLIETNGETGEIVWDKGRDFATVRKVLSMPQVNIVKKTEVQTGGFSKESILPKRNSDKLIARKKDWDPKKYGGFDSPTVAYSVLVVAKVEKGKSKKLKSVKELLGITIMERSSFEKNPIDFLEAKGYKEVKKDLIIKLPKYSLFELENGRKRMLASAGELQKGNELALPSKYVNFLYLASHYEKLKGSPEDNEQKQLFVEQHKHYLDEIIEQISEFSKRVILADANLDKVLSAYNKHRDKPIREQAENIIHLFTLTNLGAPAAFKYFDTTIDRKRYTSTKEVLDATLIHQSITGLYETRIDLSQLGGDGGPAPAPAPAPAPAPGGSCQTKNTLNIDEYLLQFPDQLWASLPTDIGRMLVPPITIKIKDNASLPSIRQYPLPKDKTEGLRPLISSLENQGILIKCHSPCNTPIFPIKKAGRDEYRMIHDLRAINNIVAPLTAVVASPTTVLSNLAPSLHWFTVIDLSNAFFSVPIHKDSQYLFAFTFEGHQYTWTVLPQGFIHSPTLFSQALYQSLHKIKFKISSEICIYMDDVLIASKDRDTNLKDTAVMLQHLASEGHKVSKKKLQLCQQEVVYLGQLLTPEGRKILPDRKVTVSQFQQPTTIRQIRAFLGLVGYCRHWIPEFSIHSKFLEKQLKKDTAEPFQLDDQQVEAFNKLKHAITTAPVLVVPDPAKPFQLYTSHSEHASIAVLTQKHAGRTRPIAFLSSKFDAIESGLPPCLKACASIHRSLTQADSFILGAPLIIYTTHAICTLLQRDRSQLVTASRFSKWEADLLRPELTFVACSAVSPAHLYMQSCENNIPPHDCVLLTHTISRPRPDLSDLPIPDPDMTLFSDGSYTTGRGGAAVVMHRPVTDDFIIIHQQPGGASAQTAELLALAAACHLATDKTVNIYTDSRYAYGVVHDFGHLWMHRGFVTSAGTPIKNHKEIEYLLKQIMKPKQVSVIKIEAHTKGVSMEVRGNAAADEAAKNAVFLVQRAGKRTADGSEFEKRTADGSEFESPKKKAKVE

SEQ ID NO: 762 - protein, 2079 aa, synthetic construct
  source 1..2079: note = Description of Artificial Sequence: Synthetic polypeptide
MPAAKRVKLDGGDKKYSIGLDIGTNSVGWAVITDEYKVPSKKFKVLGNTDRHSIKKNLIGALLFDSGETAEATRLKRTARRRYTRRKNRICYLQEIFSNEMAKVDDSFFHRLEESFLVEEDKKHERHPIFGNIVDEVAYHEKYPTIYHLRKKLVDSTDKADLRLIYLALAHMIKFRGHFLIEGDLNPDNSDVDKLFIQLVQTYNQLFEENPINASGVDAKAILSARLSKSRRLENLIAQLPGEKKNGLFGNLIALSLGLTPNFKSNFDLAEDAKLQLSKDTYDDDLDNLLAQIGDQYADLFLAAKNLSDAILLSDILRVNTEITKAPLSASMIKRYDEHHQDLTLLKALVRQQLPEKYKEIFFDQSKNGYAGYIDGGASQEEFYKFIKPILEKMDGTEELLVKLNREDLLRKQRTFDNGSIPHQIHLGELHAILRRQEDFYPFLKDNREKIEKILTFRIPYYVGPLARGNSRFAWMTRKSEETITPWNFEEVVDKGASAQSFIERMTNFDKNLPNEKVLPKHSLLYEYFTVYNELTKVKYVTEGMRKPAFLSGEQKKAIVDLLFKTNRKVTVKQLKEDYFKKIECFDSVEISGVEDRFNASLGTYHDLLKIIKDKDFLDNEENEDILEDIVLTLTLFEDREMIEERLKTYAHLFDDKVMKQLKRRRYTGWGRLSRKLINGIRDKQSGKTILDFLKSDGFANRNFMQLIHDDSLTFKEDIQKAQVSGQGDSLHEHIANLAGSPAIKKGILQTVKVVDELVKVMGRHKPENIVIEMARENQTTQKGQKNSRERMKRIEEGIKELGSQILKEHPVENTQLQNEKLYLYYLQNGRDMYVDQELDINRLSDYDVDHIVPQSFLKDDSIDNKVLTRSDKARGKSDNVPSEEVVKKMKNYWRQLLNAKLITQRKFDNLTKAERGGLSELDKAGFIKRQLVETRQITKHVAQILDSRMNTKYDENDKLIREVKVITLKSKLVSDFRKDFQFYKVREINNYHHAHDAYLNAVVGTALIKKYPKLESEFVYGDYKVYDVRKMIAKSEQEIGKATAKYFFYSNIMNFFKTEITLANGEIRKRPLIETNGETGEIVWDKGRDFATVRKVLSMPQVNIVKKTEVQTGGFSKESILPKRNSDKLIARKKDWDPKKYGGFDSPTVAYSVLVVAKVEKGKSKKLKSVKELLGITIMERSSFEKNPIDFLEAKGYKEVKKDLIIKLPKYSLFELENGRKRMLASAGELQKGNELALPSKYVNFLYLASHYEKLKGSPEDNEQKQLFVEQHKHYLDEIIEQISEFSKRVILADANLDKVLSAYNKHRDKPIREQAENIIHLFTLTNLGAPAAFKYFDTTIDRKRYTSTKEVLDATLIHQSITGLYETRIDLSQLGGDGGGGGGSEAAAKGGGGSGGSCQTKNTLNIDEYLLQFPDQLWASLPTDIGRMLVPPITIKIKDNASLPSIRQYPLPKDKTEGLRPLISSLENQGILIKCHSPCNTPIFPIKKAGRDEYRMIHDLRAINNIVAPLTAVVASPTTVLSNLAPSLHWFTVIDLSNAFFSVPIHKDSQYLFAFTFEGHQYTWTVLPQGFIHSPTLFNQALYQSLHKIKFKISSEICIYMDDVLIASKDRDTNLKDTAVMLQHLASEGHKVSKKKLQLCQQEVVYLGQLLTPEGRKILPDRKVTVSQFQQPTTIRQIRAFLGLVGYCRHWIPEFSIHSKFLEKQLKPDTAEPFQLDDQQVEAFNKLKHAITTAPVLVVPDPAKPFQLYTSHSEHASIAVLTQKHAGRTRPIAFLSSKFDAIESGLPPCLKACASIHRSLTQADSFILGAPLIIYTTHAICTLLQRDRSQLVTASRFSKWEADLLRPELTFVACSAVSPAHLYMQSCENNIPPHDCVLLTHTISRPRPDLSDLPIPDPDMTLFSDGSYTTGRGGAAVVMHRPVTDDFIIIHQQPGGASAQTAELLALAAACHLATDKTVNIYTDSRYAYGVVHDFGHLWMHRGFVTSAGTPIKNHKEIEYLLKQIMKPKQVSVIKIEAHTKGVSMEVRGNAAADEAAKNAVFLVQRAGKRTADGSEFEKRTADGSEFESPKKKAKVE

SEQ ID NO: 763 - protein, 2110 aa, synthetic construct
  source 1..2110: note = Description of Artificial Sequence: Synthetic polypeptide
MPAAKRVKLDGGDKKYSIGLDIGTNSVGWAVITDEYKVPSKKFKVLGNTDRHSIKKNLIGALLFDSGETAEATRLKRTARRRYTRRKNRICYLQEIFSNEMAKVDDSFFHRLEESFLVEEDKKHERHPIFGNIVDEVAYHEKYPTIYHLRKKLVDSTDKADLRLIYLALAHMIKFRGHFLIEGDLNPDNSDVDKLFIQLVQTYNQLFEENPINASGVDAKAILSARLSKSRRLENLIAQLPGEKKNGLFGNLIALSLGLTPNFKSNFDLAEDAKLQLSKDTYDDDLDNLLAQIGDQYADLFLAAKNLSDAILLSDILRVNTEITKAPLSASMIKRYDEHHQDLTLLKALVRQQLPEKYKEIFFDQSKNGYAGYIDGGASQEEFYKFIKPILEKMDGTEELLVKLNREDLLRKQRTFDNGSIPHQIHLGELHAILRRQEDFYPFLKDNREKIEKILTFRIPYYVGPLARGNSRFAWMTRKSEETITPWNFEEVVDKGASAQSFIERMTNFDKNLPNEKVLPKHSLLYEYFTVYNELTKVKYVTEGMRKPAFLSGEQKKAIVDLLFKTNRKVTVKQLKEDYFKKIECFDSVEISGVEDRFNASLGTYHDLLKIIKDKDFLDNEENEDILEDIVLTLTLFEDREMIEERLKTYAHLFDDKVMKQLKRRRYTGWGRLSRKLINGIRDKQSGKTILDFLKSDGFANRNFMQLIHDDSLTFKEDIQKAQVSGQGDSLHEHIANLAGSPAIKKGILQTVKVVDELVKVMGRHKPENIVIEMARENQTTQKGQKNSRERMKRIEEGIKELGSQILKEHPVENTQLQNEKLYLYYLQNGRDMYVDQELDINRLSDYDVDHIVPQSFLKDDSIDNKVLTRSDKARGKSDNVPSEEVVKKMKNYWRQLLNAKLITQRKFDNLTKAERGGLSELDKAGFIKRQLVETRQITKHVAQILDSRMNTKYDENDKLIREVKVITLKSKLVSDFRKDFQFYKVREINNYHHAHDAYLNAVVGTALIKKYPKLESEFVYGDYKVYDVRKMIAKSEQEIGKATAKYFFYSNIMNFFKTEITLANGEIRKRPLIETNGETGEIVWDKGRDFATVRKVLSMPQVNIVKKTEVQTGGFSKESILPKRNSDKLIARKKDWDPKKYGGFDSPTVAYSVLVVAKVEKGKSKKLKSVKELLGITIMERSSFEKNPIDFLEAKGYKEVKKDLIIKLPKYSLFELENGRKRMLASAGELQKGNELALPSKYVNFLYLASHYEKLKGSPEDNEQKQLFVEQHKHYLDEIIEQISEFSKRVILADANLDKVLSAYNKHRDKPIREQAENIIHLFTLTNLGAPAAFKYFDTTIDRKRYTSTKEVLDATLIHQSITGLYETRIDLSQLGGDGGAEAAAKEAAAKEAAAKEAAAKALEAEAAAKEAAAKEAAAKEAAAKAGGSCQTKNTLNIDEYLLQFPDQLWASLPTDIGRMLVPPITIKIKDNASLPSIRQYPLPKDKTEGLRPLISSLENQGILIKCHSPCNTPIFPIKKAGRDEYRMIHDLRAINNIVAPLTAVVASPTTVLSNLAPSLHWFTVIDLSNAFFSVPIHKDSQYLFAFTFEGHQYTWTVLPQGFIHSPTLFNQALYQSLHKIKFKISSEICIYMDDVLIASKDRDTNLKDTAVMLQHLASEGHKVSKKKLQLCQQEVVYLGQLLTPEGRKILPDRKVTVSQFQQPTTIRQIRAFLGLVGYCRHWIPEFSIHSKFLEKQLKPDTAEPFQLDDQQVEAFNKLKHAITTAPVLVVPDPAKPFQLYTSHSEHASIAVLTQKHAGRTRPIAFLSSKFDAIESGLPPCLKACASIHRSLTQADSFILGAPLIIYTTHAICTLLQRDRSQLVTASRFSKWEADLLRPELTFVACSAVSPAHLYMQSCENNIPPHDCVLLTHTISRPRPDLSDLPIPDPDMTLFSDGSYTTGRGGAAVVMHRPVTDDFIIIHQQPGGASAQTAELLALAAACHLATDKTVNIYTDSRYAYGVVHDFGHLWMHRGFVTSAGTPIKNHKEIEYLLKQIMKPKQVSVIKIEAHTKGVSMEVRGNAAADEAAKNAVFLVQRAGKRTADGSEFEKRTADGSEFESPKKKAKVE

SEQ ID NO: 764 - protein, 2073 aa, synthetic construct
  source 1..2073: note = Description of Artificial Sequence: Synthetic polypeptide
MPAAKRVKLDGGDKKYSIGLDIGTNSVGWAVITDEYKVPSKKFKVLGNTDRHSIKKNLIGALLFDSGETAEATRLKRTARRRYTRRKNRICYLQEIFSNEMAKVDDSFFHRLEESFLVEEDKKHERHPIFGNIVDEVAYHEKYPTIYHLRKKLVDSTDKADLRLIYLALAHMIKFRGHFLIEGDLNPDNSDVDKLFIQLVQTYNQLFEENPINASGVDAKAILSARLSKSRRLENLIAQLPGEKKNGLFGNLIALSLGLTPNFKSNFDLAEDAKLQLSKDTYDDDLDNLLAQIGDQYADLFLAAKNLSDAILLSDILRVNTEITKAPLSASMIKRYDEHHQDLTLLKALVRQQLPEKYKEIFFDQSKNGYAGYIDGGASQEEFYKFIKPILEKMDGTEELLVKLNREDLLRKQRTFDNGSIPHQIHLGELHAILRRQEDFYPFLKDNREKIEKILTFRIPYYVGPLARGNSRFAWMTRKSEETITPWNFEEVVDKGASAQSFIERMTNFDKNLPNEKVLPKHSLLYEYFTVYNELTKVKYVTEGMRKPAFLSGEQKKAIVDLLFKTNRKVTVKQLKEDYFKKIECFDSVEISGVEDRFNASLGTYHDLLKIIKDKDFLDNEENEDILEDIVLTLTLFEDREMIEERLKTYAHLFDDKVMKQLKRRRYTGWGRLSRKLINGIRDKQSGKTILDFLKSDGFANRNFMQLIHDDSLTFKEDIQKAQVSGQGDSLHEHIANLAGSPAIKKGILQTVKVVDELVKVMGRHKPENIVIEMARENQTTQKGQKNSRERMKRIEEGIKELGSQILKEHPVENTQLQNEKLYLYYLQNGRDMYVDQELDINRLSDYDVDHIVPQSFLKDDSIDNKVLTRSDKARGKSDNVPSEEVVKKMKNYWRQLLNAKLITQRKFDNLTKAERGGLSELDKAGFIKRQLVETRQITKHVAQILDSRMNTKYDENDKLIREVKVITLKSKLVSDFRKDFQFYKVREINNYHHAHDAYLNAVVGTALIKKYPKLESEFVYGDYKVYDVRKMIAKSEQEIGKATAKYFFYSNIMNFFKTEITLANGEIRKRPLIETNGETGEIVWDKGRDFATVRKVLSMPQVNIVKKTEVQTGGFSKESILPKRNSDKLIARKKDWDPKKYGGFDSPTVAYSVLVVAKVEKGKSKKLKSVKELLGITIMERSSFEKNPIDFLEAKGYKEVKKDLIIKLPKYSLFELENGRKRMLASAGELQKGNELALPSKYVNFLYLASHYEKLKGSPEDNEQKQLFVEQHKHYLDEIIEQISEFSKRVILADANLDKVLSAYNKHRDKPIREQAENIIHLFTLTNLGAPAAFKYFDTTIDRKRYTSTKEVLDATLIHQSITGLYETRIDLSQLGGDGGGSSGGSGGGGGSCQTKNTLNIDEYLLQFPDQLWASLPTDIGRMLVPPITIKIKDNASLPSIRQYPLPKDKTEGLRPLISSLENQGILIKCHSPCNTPIFPIKKAGRDEYRMIHDLRAINNIVAPLTAVVASPTTVLSNLAPSLHWFTVIDLSNAFFSVPIHKDSQYLFAFTFEGHQYTWTVLPQGFIHSPTLFNQALYQSLHKIKFKISSEICIYMDDVLIASKDRDTNLKDTAVMLQHLASEGHKVSKKKLQLCQQEVVYLGQLLTPEGRKILPDRKVTVSQFQQPTTIRQIRAFLGLVGYCRHWIPEFSIHSKFLEKQLKPDTAEPFQLDDQQVEAFNKLKHAITTAPVLVVPDPAKPFQLYTSHSEHASIAVLTQKHAGRTRPIAFLSSKFDAIESGLPPCLKACASIHRSLTQADSFILGAPLIIYTTHAICTLLQRDRSQLVTASRFSKWEADLLRPELTFVACSAVSPAHLYMQSCENNIPPHDCVLLTHTISRPRPDLSDLPIPDPDMTLFSDGSYTTGRGGAAVVMHRPVTDDFIIIHQQPGGASAQTAELLALAAACHLATDKTVNIYTDSRYAYGVVHDFGHLWMHRGFVTSAGTPIKNHKEIEYLLKQIMKPKQVSVIKIEAHTKGVSMEVRGNAAADEAAKNAVFLVQRAGKRTADGSEFEKRTADGSEFESPKKKAKVE

SEQ ID NO: 765 - protein, 2087 aa, synthetic construct
  source 1..2087: note = Description of Artificial Sequence: Synthetic polypeptide
MPAAKRVKLDGGDKKYSIGLDIGTNSVGWAVITDEYKVPSKKFKVLGNTDRHSIKKNLIGALLFDSGETAEATRLKRTARRRYTRRKNRICYLQEIFSNEMAKVDDSFFHRLEESFLVEEDKKHERHPIFGNIVDEVAYHEKYPTIYHLRKKLVDSTDKADLRLIYLALAHMIKFRGHFLIEGDLNPDNSDVDKLFIQLVQTYNQLFEENPINASGVDAKAILSARLSKSRRLENLIAQLPGEKKNGLFGNLIALSLGLTPNFKSNFDLAEDAKLQLSKDTYDDDLDNLLAQIGDQYADLFLAAKNLSDAILLSDILRVNTEITKAPLSASMIKRYDEHHQDLTLLKALVRQQLPEKYKEIFFDQSKNGYAGYIDGGASQEEFYKFIKPILEKMDGTEELLVKLNREDLLRKQRTFDNGSIPHQIHLGELHAILRRQEDFYPFLKDNREKIEKILTFRIPYYVGPLARGNSRFAWMTRKSEETITPWNFEEVVDKGASAQSFIERMTNFDKNLPNEKVLPKHSLLYEYFTVYNELTKVKYVTEGMRKPAFLSGEQKKAIVDLLFKTNRKVTVKQLKEDYFKKIECFDSVEISGVEDRFNASLGTYHDLLKIIKDKDFLDNEENEDILEDIVLTLTLFEDREMIEERLKTYAHLFDDKVMKQLKRRRYTGWGRLSRKLINGIRDKQSGKTILDFLKSDGFANRNFMQLIHDDSLTFKEDIQKAQVSGQGDSLHEHIANLAGSPAIKKGILQTVKVVDELVKVMGRHKPENIVIEMARENQTTQKGQKNSRERMKRIEEGIKELGSQILKEHPVENTQLQNEKLYLYYLQNGRDMYVDQELDINRLSDYDVDHIVPQSFLKDDSIDNKVLTRSDKARGKSDNVPSEEVVKKMKNYWRQLLNAKLITQRKFDNLTKAERGGLSELDKAGFIKRQLVETRQITKHVAQILDSRMNTKYDENDKLIREVKVITLKSKLVSDFRKDFQFYKVREINNYHHAHDAYLNAVVGTALIKKYPKLESEFVYGDYKVYDVRKMIAKSEQEIGKATAKYFFYSNIMNFFKTEITLANGEIRKRPLIETNGETGEIVWDKGRDFATVRKVLSMPQVNIVKKTEVQTGGFSKESILPKRNSDKLIARKKDWDPKKYGGFDSPTVAYSVLVVAKVEKGKSKKLKSVKELLGITIMERSSFEKNPIDFLEAKGYKEVKKDLIIKLPKYSLFELENGRKRMLASAGELQKGNELALPSKYVNFLYLASHYEKLKGSPEDNEQKQLFVEQHKHYLDEIIEQISEFSKRVILADANLDKVLSAYNKHRDKPIREQAENIIHLFTLTNLGAPAAFKYFDTTIDRKRYTSTKEVLDATLIHQSITGLYETRIDLSQLGGDGGEAAAKGGSPAPGGVPWILKKPLELTIKLDLEEQQGTLLNNSILSKKGKEELKQLFEKYSALWQSWENQVGHRRIRPHKIATGTVKPTPQKQYHINPKAKPDIQIVINDLLKQGVLIQKESTMNTPVYPVPKPNGRWRMVLDYRAVNKVTPLIAVQNQHSYGILGSLFKGRYKTTIDLSNGFWAHPIVPEDYWITAFTWQGKQYCWTVLPQGFLNSPGLFTGDVVDLLQGIPNVEVYVDDVYISHDSEKEHLEYLDILFNRLKEAGYIISLKKSNIANSIVDFLGFQITNEGRGLTDTFKEKLENITAPTTLKQLQSILGLLNFARNFIPDFTELIAPLYALIPKSTKNYVPWQIEHSTTLETLITKLNGAEYLQGRKGDKTLIMKVNASYTTGYIRYYNEGEKKPISYVSIVFSKTELKFTELEKLLTTVHKGLLKALDLSMGQNIHVYSPIVSMQNIQKTPQTAKKALASRWLSWLSYLEDPRIRFFYDPQMPALKDLPAVDTGKDNKKHPSNFQHIFYTDGSAITSPTKEGHLNAGMGIVYFINKDGNLQKQQEWSISLGNHTAQFAEIAAFEFALKKCLPLGGNILVVTDSNYVAKAYNEELDVWASNGFVNNRKKPLKHISKWKSVADLKRLRPDVVVTHEPGHQKLDSSPHAYGNNLADQLATQASFKVHAGKRTADGSEFEKRTADGSEFESPKKKAKVE

SEQ ID NO: 766 - protein, 2085 aa, synthetic construct
  source 1..2085: note = Description of Artificial Sequence: Synthetic polypeptide
MPAAKRVKLDGGDKKYSIGLDIGTNSVGWAVITDEYKVPSKKFKVLGNTDRHSIKKNLIGALLFDSGETAEATRLKRTARRRYTRRKNRICYLQEIFSNEMAKVDDSFFHRLEESFLVEEDKKHERHPIFGNIVDEVAYHEKYPTIYHLRKKLVDSTDKADLRLIYLALAHMIKFRGHFLIEGDLNPDNSDVDKLFIQLVQTYNQLFEENPINASGVDAKAILSARLSKSRRLENLIAQLPGEKKNGLFGNLIALSLGLTPNFKSNFDLAEDAKLQLSKDTYDDDLDNLLAQIGDQYADLFLAAKNLSDAILLSDILRVNTEITKAPLSASMIKRYDEHHQDLTLLKALVRQQLPEKYKEIFFDQSKNGYAGYIDGGASQEEFYKFIKPILEKMDGTEELLVKLNREDLLRKQRTFDNGSIPHQIHLGELHAILRRQEDFYPFLKDNREKIEKILTFRIPYYVGPLARGNSRFAWMTRKSEETITPWNFEEVVDKGASAQSFIERMTNFDKNLPNEKVLPKHSLLYEYFTVYNELTKVKYVTEGMRKPAFLSGEQKKAIVDLLFKTNRKVTVKQLKEDYFKKIECFDSVEISGVEDRFNASLGTYHDLLKIIKDKDFLDNEENEDILEDIVLTLTLFEDREMIEERLKTYAHLFDDKVMKQLKRRRYTGWGRLSRKLINGIRDKQSGKTILDFLKSDGFANRNFMQLIHDDSLTFKEDIQKAQVSGQGDSLHEHIANLAGSPAIKKGILQTVKVVDELVKVMGRHKPENIVIEMARENQTTQKGQKNSRERMKRIEEGIKELGSQILKEHPVENTQLQNEKLYLYYLQNGRDMYVDQELDINRLSDYDVDHIVPQSFLKDDSIDNKVLTRSDKARGKSDNVPSEEVVKKMKNYWRQLLNAKLITQRKFDNLTKAERGGLSELDKAGFIKRQLVETRQITKHVAQILDSRMNTKYDENDKLIREVKVITLKSKLVSDFRKDFQFYKVREINNYHHAHDAYLNAVVGTALIKKYPKLESEFVYGDYKVYDVRKMIAKSEQEIGKATAKYFFYSNIMNFFKTEITLANGEIRKRPLIETNGETGEIVWDKGRDFATVRKVLSMPQVNIVKKTEVQTGGFSKESILPKRNSDKLIARKKDWDPKKYGGFDSPTVAYSVLVVAKVEKGKSKKLKSVKELLGITIMERSSFEKNPIDFLEAKGYKEVKKDLIIKLPKYSLFELENGRKRMLASAGELQKGNELALPSKYVNFLYLASHYEKLKGSPEDNEQKQLFVEQHKHYLDEIIEQISEFSKRVILADANLDKVLSAYNKHRDKPIREQAENIIHLFTLTNLGAPAAFKYFDTTIDRKRYTSTKEVLDATLIHQSITGLYETRIDLSQLGGDGGGSSGGGGGSGGVPWILKKPLELTIKLDLEEQQGTLLNNSILSKKGKEELKQLFEKYSALWQSWENQVGHRRIRPHKIATGTVKPTPQKQYHINPKAKPDIQIVINDLLKQGVLIQKESTMNTPVYPVPKPNGRWRMVLDYRAVNKVTPLIAVQNQHSYGILGSLFKGRYKTTIDLSNGFWAHPIVPEDYWITAFTWQGKQYCWTVLPQGFLNSPGLFTGDVVDLLQGIPNVEVYVDDVYISHDSEKEHLEYLDILFNRLKEAGYIISLKKSNIANSIVDFLGFQITNEGRGLTDTFKEKLENITAPTTLKQLQSILGLLNFARNFIPDFTELIAPLYALIPKSTKNYVPWQIEHSTTLETLITKLNGAEYLQGRKGDKTLIMKVNASYTTGYIRYYNEGEKKPISYVSIVFSKTELKFTELEKLLTTVHKGLLKALDLSMGQNIHVYSPIVSMQNIQKTPQTAKKALASRWLSWLSYLEDPRIRFFYDPQMPALKDLPAVDTGKDNKKHPSNFQHIFYTDGSAITSPTKEGHLNAGMGIVYFINKDGNLQKQQEWSISLGNHTAQFAEIAAFEFALKKCLPLGGNILVVTDSNYVAKAYNEELDVWASNGFVNNRKKPLKHISKWKSVADLKRLRPDVVVTHEPGHQKLDSSPHAYGNNLADQLATQASFKVHAGKRTADGSEFEKRTADGSEFESPKKKAKVE

SEQ ID NO: 767 - protein, 2087 aa, synthetic construct
  source 1..2087: note = Description of Artificial Sequence: Synthetic polypeptide
MPAAKRVKLDGGDKKYSIGLDIGTNSVGWAVITDEYKVPSKKFKVLGNTDRHSIKKNLIGALLFDSGETAEATRLKRTARRRYTRRKNRICYLQEIFSNEMAKVDDSFFHRLEESFLVEEDKKHERHPIFGNIVDEVAYHEKYPTIYHLRKKLVDSTDKADLRLIYLALAHMIKFRGHFLIEGDLNPDNSDVDKLFIQLVQTYNQLFEENPINASGVDAKAILSARLSKSRRLENLIAQLPGEKKNGLFGNLIALSLGLTPNFKSNFDLAEDAKLQLSKDTYDDDLDNLLAQIGDQYADLFLAAKNLSDAILLSDILRVNTEITKAPLSASMIKRYDEHHQDLTLLKALVRQQLPEKYKEIFFDQSKNGYAGYIDGGASQEEFYKFIKPILEKMDGTEELLVKLNREDLLRKQRTFDNGSIPHQIHLGELHAILRRQEDFYPFLKDNREKIEKILTFRIPYYVGPLARGNSRFAWMTRKSEETITPWNFEEVVDKGASAQSFIERMTNFDKNLPNEKVLPKHSLLYEYFTVYNELTKVKYVTEGMRKPAFLSGEQKKAIVDLLFKTNRKVTVKQLKEDYFKKIECFDSVEISGVEDRFNASLGTYHDLLKIIKDKDFLDNEENEDILEDIVLTLTLFEDREMIEERLKTYAHLFDDKVMKQLKRRRYTGWGRLSRKLINGIRDKQSGKTILDFLKSDGFANRNFMQLIHDDSLTFKEDIQKAQVSGQGDSLHEHIANLAGSPAIKKGILQTVKVVDELVKVMGRHKPENIVIEMARENQTTQKGQKNSRERMKRIEEGIKELGSQILKEHPVENTQLQNEKLYLYYLQNGRDMYVDQELDINRLSDYDVDHIVPQSFLKDDSIDNKVLTRSDKARGKSDNVPSEEVVKKMKNYWRQLLNAKLITQRKFDNLTKAERGGLSELDKAGFIKRQLVETRQITKHVAQILDSRMNTKYDENDKLIREVKVITLKSKLVSDFRKDFQFYKVREINNYHHAHDAYLNAVVGTALIKKYPKLESEFVYGDYKVYDVRKMIAKSEQEIGKATAKYFFYSNIMNFFKTEITLANGEIRKRPLIETNGETGEIVWDKGRDFATVRKVLSMPQVNIVKKTEVQTGGFSKESILPKRNSDKLIARKKDWDPKKYGGFDSPTVAYSVLVVAKVEKGKSKKLKSVKELLGITIMERSSFEKNPIDFLEAKGYKEVKKDLIIKLPKYSLFELENGRKRMLASAGELQKGNELALPSKYVNFLYLASHYEKLKGSPEDNEQKQLFVEQHKHYLDEIIEQISEFSKRVILADANLDKVLSAYNKHRDKPIREQAENIIHLFTLTNLGAPAAFKYFDTTIDRKRYTSTKEVLDATLIHQSITGLYETRIDLSQLGGDGGPAPEAAAKGSSGGVPWILKKPLELTIKLDLEEQQGTLLNNSILSKKGKEELKQLFEKYSALWQSWENQVGHRRIRPHKIATGTVKPTPQKQYHINPKAKPDIQIVINDLLKQGVLIQKESTMNTPVYPVPKPNGRWRMVLDYRAVNKVTPLIAVQNQHSYGILGSLFKGRYKTTIDLSNGFWAHPIVPEDYWITAFTWQGKQYCWTVLPQGFLNSPGLFTGDVVDLLQGIPNVEVYVDDVYISHDSEKEHLEYLDILFNRLKEAGYIISLKKSNIANSIVDFLGFQITNEGRGLTDTFKEKLENITAPTTLKQLQSILGLLNFARNFIPDFTELIAPLYALIPKSTKNYVPWQIEHSTTLETLITKLNGAEYLQGRKGDKTLIMKVNASYTTGYIRYYNEGEKKPISYVSIVFSKTELKFTELEKLLTTVHKGLLKALDLSMGQNIHVYSPIVSMQNIQKTPQTAKKALASRWLSWLSYLEDPRIRFFYDPQMPALKDLPAVDTGKDNKKHPSNFQHIFYTDGSAITSPTKEGHLNAGMGIVYFINKDGNLQKQQEWSISLGNHTAQFAEIAAFEFALKKCLPLGGNILVVTDSNYVAKAYNEELDVWASNGFVNNRKKPLKHISKWKSVADLKRLRPDVVVTHEPGHQKLDSSPHAYGNNLADQLATQASFKVHAGKRTADGSEFEKRTADGSEFESPKKKAKVE

SEQ ID NO: 768 - protein, 2091 aa, synthetic construct
  source 1..2091: note = Description of Artificial Sequence: Synthetic polypeptide
MPAAKRVKLDGGDKKYSIGLDIGTNSVGWAVITDEYKVPSKKFKVLGNTDRHSIKKNLIGALLFDSGETAEATRLKRTARRRYTRRKNRICYLQEIFSNEMAKVDDSFFHRLEESFLVEEDKKHERHPIFGNIVDEVAYHEKYPTIYHLRKKLVDSTDKADLRLIYLALAHMIKFRGHFLIEGDLNPDNSDVDKLFIQLVQTYNQLFEENPINASGVDAKAILSARLSKSRRLENLIAQLPGEKKNGLFGNLIALSLGLTPNFKSNFDLAEDAKLQLSKDTYDDDLDNLLAQIGDQYADLFLAAKNLSDAILLSDILRVNTEITKAPLSASMIKRYDEHHQDLTLLKALVRQQLPEKYKEIFFDQSKNGYAGYIDGGASQEEFYKFIKPILEKMDGTEELLVKLNREDLLRKQRTFDNGSIPHQIHLGELHAILRRQEDFYPFLKDNREKIEKILTFRIPYYVGPLARGNSRFAWMTRKSEETITPWNFEEVVDKGASAQSFIERMTNFDKNLPNEKVLPKHSLLYEYFTVYNELTKVKYVTEGMRKPAFLSGEQKKAIVDLLFKTNRKVTVKQLKEDYFKKIECFDSVEISGVEDRFNASLGTYHDLLKIIKDKDFLDNEENEDILEDIVLTLTLFEDREMIEERLKTYAHLFDDKVMKQLKRRRYTGWGRLSRKLINGIRDKQSGKTILDFLKSDGFANRNFMQLIHDDSLTFKEDIQKAQVSGQGDSLHEHIANLAGSPAIKKGILQTVKVVDELVKVMGRHKPENIVIEMARENQTTQKGQKNSRERMKRIEEGIKELGSQILKEHPVENTQLQNEKLYLYYLQNGRDMYVDQELDINRLSDYDVDHIVPQSFLKDDSIDNKVLTRSDKARGKSDNVPSEEVVKKMKNYWRQLLNAKLITQRKFDNLTKAERGGLSELDKAGFIKRQLVETRQITKHVAQILDSRMNTKYDENDKLIREVKVITLKSKLVSDFRKDFQFYKVREINNYHHAHDAYLNAVVGTALIKKYPKLESEFVYGDYKVYDVRKMIAKSEQEIGKATAKYFFYSNIMNFFKTEITLANGEIRKRPLIETNGETGEIVWDKGRDFATVRKVLSMPQVNIVKKTEVQTGGFSKESILPKRNSDKLIARKKDWDPKKYGGFDSPTVAYSVLVVAKVEKGKSKKLKSVKELLGITIMERSSFEKNPIDFLEAKGYKEVKKDLIIKLPKYSLFELENGRKRMLASAGELQKGNELALPSKYVNFLYLASHYEKLKGSPEDNEQKQLFVEQHKHYLDEIIEQISEFSKRVILADANLDKVLSAYNKHRDKPIREQAENIIHLFTLTNLGAPAAFKYFDTTIDRKRYTSTKEVLDATLIHQSITGLYETRIDLSQLGGDGGGGGGSEAAAKGGGGSGGVPWILKKPLELTIKLDLEEQQGTLLNNSILSKKGKEELKQLFEKYSALWQSWENQVGHRRIRPHKIATGTVKPTPQKQYHINPKAKPDIQIVINDLLKQGVLIQKESTMNTPVYPVPKPNGRWRMVLDYRAVNKVTPLIAVQNQHSYGILGSLFKGRYKTTIDLSNGFWAHPIVPEDYWITAFTWQGKQYCWTVLPQGFLNSPGLFTGDVVDLLQGIPNVEVYVDDVYISHDSEKEHLEYLDILFNRLKEAGYIISLKKSNIANSIVDFLGFQITNEGRGLTDTFKEKLENITAPTTLKQLQSILGLLNFARNFIPDFTELIAPLYALIPKSTKNYVPWQIEHSTTLETLITKLNGAEYLQGRKGDKTLIMKVNASYTTGYIRYYNEGEKKPISYVSIVFSKTELKFTELEKLLTTVHKGLLKALDLSMGQNIHVYSPIVSMQNIQKTPQTAKKALASRWLSWLSYLEDPRIRFFYDPQMPALKDLPAVDTGKDNKKHPSNFQHIFYTDGSAITSPTKEGHLNAGMGIVYFINKDGNLQKQQEWSISLGNHTAQFAEIAAFEFALKKCLPLGGNILVVTDSNYVAKAYNEELDVWASNGFVNNRKKPLKHISKWKSVADLKRLRPDVVVTHEPGHQKLDSSPHAYGNNLADQLATQASFKVHAGKRTADGSEFEKRTADGSEFESPKKKAKVE

SEQ ID NO: 769 - protein, 2087 aa, synthetic construct
  source 1..2087: note = Description of Artificial Sequence: Synthetic polypeptide
MPAAKRVKLDGGDKKYSIGLDIGTNSVGWAVITDEYKVPSKKFKVLGNTDRHSIKKNLIGALLFDSGETAEATRLKRTARRRYTRRKNRICYLQEIFSNEMAKVDDSFFHRLEESFLVEEDKKHERHPIFGNIVDEVAYHEKYPTIYHLRKKLVDSTDKADLRLIYLALAHMIKFRGHFLIEGDLNPDNSDVDKLFIQLVQTYNQLFEENPINASGVDAKAILSARLSKSRRLENLIAQLPGEKKNGLFGNLIALSLGLTPNFKSNFDLAEDAKLQLSKDTYDDDLDNLLAQIGDQYADLFLAAKNLSDAILLSDILRVNTEITKAPLSASMIKRYDEHHQDLTLLKALVRQQLPEKYKEIFFDQSKNGYAGYIDGGASQEEFYKFIKPILEKMDGTEELLVKLNREDLLRKQRTFDNGSIPHQIHLGELHAILRRQEDFYPFLKDNREKIEKILTFRIPYYVGPLARGNSRFAWMTRKSEETITPWNFEEVVDKGASAQSFIERMTNFDKNLPNEKVLPKHSLLYEYFTVYNELTKVKYVTEGMRKPAFLSGEQKKAIVDLLFKTNRKVTVKQLKEDYFKKIECFDSVEISGVEDRFNASLGTYHDLLKIIKDKDFLDNEENEDILEDIVLTLTLFEDREMIEERLKTYAHLFDDKVMKQLKRRRYTGWGRLSRKLINGIRDKQSGKTILDFLKSDGFANRNFMQLIHDDSLTFKEDIQKAQVSGQGDSLHEHIANLAGSPAIKKGILQTVKVVDELVKVMGRHKPENIVIEMARENQTTQKGQKNSRERMKRIEEGIKELGSQILKEHPVENTQLQNEKLYLYYLQNGRDMYVDQELDINRLSDYDVDHIVPQSFLKDDSIDNKVLTRSDKARGKSDNVPSEEVVKKMKNYWRQLLNAKLITQRKFDNLTKAERGGLSELDKAGFIKRQLVETRQITKHVAQILDSRMNTKYDENDKLIREVKVITLKSKLVSDFRKDFQFYKVREINNYHHAHDAYLNAVVGTALIKKYPKLESEFVYGDYKVYDVRKMIAKSEQEIGKATAKYFFYSNIMNFFKTEITLANGEIRKRPLIETNGETGEIVWDKGRDFATVRKVLSMPQVNIVKKTEVQTGGFSKESILPKRNSDKLIARKKDWDPKKYGGFDSPTVAYSVLVVAKVEKGKSKKLKSVKELLGITIMERSSFEKNPIDFLEAKGYKEVKKDLIIKLPKYSLFELENGRKRMLASAGELQKGNELALPSKYVNFLYLASHYEKLKGSPEDNEQKQLFVEQHKHYLDEIIEQISEFSKRVILADANLDKVLSAYNKHRDKPIREQAENIIHLFTLTNLGAPAAFKYFDTTIDRKRYTSTKEVLDATLIHQSITGLYETRIDLSQLGGDGGGGGGSSEAAAKGGVPWILKKPLELTIKLDLEEQQGTLLNNSILSKKGKEELKQLFEKYSALWQSWENQVGHRRIRPHKIATGTVKPTPQKQYHINPKAKPDIQIVINDLLKQGVLIQKESTMNTPVYPVPKPNGRWRMVLDYRAVNKVTPLIAVQNQHSYGILGSLFKGRYKTTIDLSNGFWAHPIVPEDYWITAFTWQGKQYCWTVLPQGFLNSPGLFTGDVVDLLQGIPNVEVYVDDVYISHDSEKEHLEYLDILFNRLKEAGYIISLKKSNIANSIVDFLGFQITNEGRGLTDTFKEKLENITAPTTLKQLQSILGLLNFARNFIPDFTELIAPLYALIPKSTKNYVPWQIEHSTTLETLITKLNGAEYLQGRKGDKTLIMKVNASYTTGYIRYYNEGEKKPISYVSIVFSKTELKFTELEKLLTTVHKGLLKALDLSMGQNIHVYSPIVSMQNIQKTPQTAKKALASRWLSWLSYLEDPRIRFFYDPQMPALKDLPAVDTGKDNKKHPSNFQHIFYTDGSAITSPTKEGHLNAGMGIVYFINKDGNLQKQQEWSISLGNHTAQFAEIAAFEFALKKCLPLGGNILVVTDSNYVAKAYNEELDVWASNGFVNNRKKPLKHISKWKSVADLKRLRPDVVVTHEPGHQKLDSSPHAYGNNLADQLATQASFKVHAGKRTADGSEFEKRTADGSEFESPKKKAKVE

SEQ ID NO: 770 - protein, 2087 aa, synthetic construct
  source 1..2087: note = Description of Artificial Sequence: Synthetic polypeptide
MPAAKRVKLDGGDKKYSIGLDIGTNSVGWAVITDEYKVPSKKFKVLGNTDRHSIKKNLIGALLFDSGETAEATRLKRTARRRYTRRKNRICYLQEIFSNEMAKVDDSFFHRLEESFLVEEDKKHERHPIFGNIVDEVAYHEKYPTIYHLRKKLVDSTDKADLRLIYLALAHMIKFRGHFLIEGDLNPDNSDVDKLFIQLVQTYNQLFEENPINASGVDAKAILSARLSKSRRLENLIAQLPGEKKNGLFGNLIALSLGLTPNFKSNFDLAEDAKLQLSKDTYDDDLDNLLAQIGDQYADLFLAAKNLSDAILLSDILRVNTEITKAPLSASMIKRYDEHHQDLTLLKALVRQQLPEKYKEIFFDQSKNGYAGYIDGGASQEEFYKFIKPILEKMDGTEELLVKLNREDLLRKQRTFDNGSIPHQIHLGELHAILRRQEDFYPFLKDNREKIEKILTFRIPYYVGPLARGNSRFAWMTRKSEETITPWNFEEVVDKGASAQSFIERMTNFDKNLPNEKVLPKHSLLYEYFTVYNELTKVKYVTEGMRKPAFLSGEQKKAIVDLLFKTNRKVTVKQLKEDYFKKIECFDSVEISGVEDRFNASLGTYHDLLKIIKDKDFLDNEENEDILEDIVLTLTLFEDREMIEERLKTYAHLFDDKVMKQLKRRRYTGWGRLSRKLINGIRDKQSGKTILDFLKSDGFANRNFMQLIHDDSLTFKEDIQKAQVSGQGDSLHEHIANLAGSPAIKKGILQTVKVVDELVKVMGRHKPENIVIEMARENQTTQKGQKNSRERMKRIEEGIKELGSQILKEHPVENTQLQNEKLYLYYLQNGRDMYVDQELDINRLSDYDVDHIVPQSFLKDDSIDNKVLTRSDKARGKSDNVPSEEVVKKMKNYWRQLLNAKLITQRKFDNLTKAERGGLSELDKAGFIKRQLVETRQITKHVAQILDSRMNTKYDENDKLIREVKVITLKSKLVSDFRKDFQFYKVREINNYHHAHDAYLNAVVGTALIKKYPKLESEFVYGDYKVYDVRKMIAKSEQEIGKATAKYFFYSNIMNFFKTEITLANGEIRKRPLIETNGETGEIVWDKGRDFATVRKVLSMPQVNIVKKTEVQTGGFSKESILPKRNSDKLIARKKDWDPKKYGGFDSPTVAYSVLVVAKVEKGKSKKLKSVKELLGITIMERSSFEKNPIDFLEAKGYKEVKKDLIIKLPKYSLFELENGRKRMLASAGELQKGNELALPSKYVNFLYLASHYEKLKGSPEDNEQKQLFVEQHKHYLDEIIEQISEFSKRVILADANLDKVLSAYNKHRDKPIREQAENIIHLFTLTNLGAPAAFKYFDTTIDRKRYTSTKEVLDATLIHQSITGLYETRIDLSQLGGDGGGGGEAAAKGSSGGVPWILKKPLELTIKLDLEEQQGTLLNNSILSKKGKEELKQLFEKYSALWQSWENQVGHRRIRPHKIATGTVKPTPQKQYHINPKAKPDIQIVINDLLKQGVLIQKESTMNTPVYPVPKPNGRWRMVLDYRAVNKVTPLIAVQNQHSYGILGSLFKGRYKTTIDLSNGFWAHPIVPEDYWITAFTWQGKQYCWTVLPQGFLNSPGLFTGDVVDLLQGIPNVEVYVDDVYISHDSEKEHLEYLDILFNRLKEAGYIISLKKSNIANSIVDFLGFQITNEGRGLTDTFKEKLENITAPTTLKQLQSILGLLNFARNFIPDFTELIAPLYALIPKSTKNYVPWQIEHSTTLETLITKLNGAEYLQGRKGDKTLIMKVNASYTTGYIRYYNEGEKKPISYVSIVFSKTELKFTELEKLLTTVHKGLLKALDLSMGQNIHVYSPIVSMQNIQKTPQTAKKALASRWLSWLSYLEDPRIRFFYDPQMPALKDLPAVDTGKDNKKHPSNFQHIFYTDGSAITSPTKEGHLNAGMGIVYFINKDGNLQKQQEWSISLGNHTAQFAEIAAFEFALKKCLPLGGNILVVTDSNYVAKAYNEELDVWASNGFVNNRKKPLKHISKWKSVADLKRLRPDVVVTHEPGHQKLDSSPHAYGNNLADQLATQASFKVHAGKRTADGSEFEKRTADGSEFESPKKKAKVE

SEQ ID NO: 771 - protein, 2082 aa, synthetic construct
  source 1..2082: note = Description of Artificial Sequence: Synthetic polypeptide
MPAAKRVKLDGGDKKYSIGLDIGTNSVGWAVITDEYKVPSKKFKVLGNTDRHSIKKNLIGALLFDSGETAEATRLKRTARRRYTRRKNRICYLQEIFSNEMAKVDDSFFHRLEESFLVEEDKKHERHPIFGNIVDEVAYHEKYPTIYHLRKKLVDSTDKADLRLIYLALAHMIKFRGHFLIEGDLNPDNSDVDKLFIQLVQTYNQLFEENPINASGVDAKAILSARLSKSRRLENLIAQLPGEKKNGLFGNLIALSLGLTPNFKSNFDLAEDAKLQLSKDTYDDDLDNLLAQIGDQYADLFLAAKNLSDAILLSDILRVNTEITKAPLSASMIKRYDEHHQDLTLLKALVRQQLPEKYKEIFFDQSKNGYAGYIDGGASQEEFYKFIKPILEKMDGTEELLVKLNREDLLRKQRTFDNGSIPHQIHLGELHAILRRQEDFYPFLKDNREKIEKILTFRIPYYVGPLARGNSRFAWMTRKSEETITPWNFEEVVDKGASAQSFIERMTNFDKNLPNEKVLPKHSLLYEYFTVYNELTKVKYVTEGMRKPAFLSGEQKKAIVDLLFKTNRKVTVKQLKEDYFKKIECFDSVEISGVEDRFNASLGTYHDLLKIIKDKDFLDNEENEDILEDIVLTLTLFEDREMIEERLKTYAHLFDDKVMKQLKRRRYTGWGRLSRKLINGIRDKQSGKTILDFLKSDGFANRNFMQLIHDDSLTFKEDIQKAQVSGQGDSLHEHIANLAGSPAIKKGILQTVKVVDELVKVMGRHKPENIVIEMARENQTTQKGQKNSRERMKRIEEGIKELGSQILKEHPVENTQLQNEKLYLYYLQNGRDMYVDQELDINRLSDYDVDHIVPQSFLKDDSIDNKVLTRSDKARGKSDNVPSEEVVKKMKNYWRQLLNAKLITQRKFDNLTKAERGGLSELDKAGFIKRQLVETRQITKHVAQILDSRMNTKYDENDKLIREVKVITLKSKLVSDFRKDFQFYKVREINNYHHAHDAYLNAVVGTALIKKYPKLESEFVYGDYKVYDVRKMIAKSEQEIGKATAKYFFYSNIMNFFKTEITLANGEIRKRPLIETNGETGEIVWDKGRDFATVRKVLSMPQVNIVKKTEVQTGGFSKESILPKRNSDKLIARKKDWDPKKYGGFDSPTVAYSVLVVAKVEKGKSKKLKSVKELLGITIMERSSFEKNPIDFLEAKGYKEVKKDLIIKLPKYSLFELENGRKRMLASAGELQKGNELALPSKYVNFLYLASHYEKLKGSPEDNEQKQLFVEQHKHYLDEIIEQISEFSKRVILADANLDKVLSAYNKHRDKPIREQAENIIHLFTLTNLGAPAAFKYFDTTIDRKRYTSTKEVLDATLIHQSITGLYETRIDLSQLGGDGGGSSGGGGGVPWILKKPLELTIKLDLEEQQGTLLNNSILSKKGKEELKQLFEKYSALWQSWENQVGHRRIRPHKIATGTVKPTPQKQYHINPKAKPDIQIVINDLLKQGVLIQKESTMNTPVYPVPKPNGRWRMVLDYRAVNKVTPLIAVQNQHSYGILGSLFKGRYKTTIDLSNGFWAHPIVPEDYWITAFTWQGKQYCWTVLPQGFLNSPGLFTGDVVDLLQGIPNVEVYVDDVYISHDSEKEHLEYLDILFNRLKEAGYIISLKKSNIANSIVDFLGFQITNEGRGLTDTFKEKLENITAPTTLKQLQSILGLLNFARNFIPDFTELIAPLYALIPKSTKNYVPWQIEHSTTLETLITKLNGAEYLQGRKGDKTLIMKVNASYTTGYIRYYNEGEKKPISYVSIVFSKTELKFTELEKLLTTVHKGLLKALDLSMGQNIHVYSPIVSMQNIQKTPQTAKKALASRWLSWLSYLEDPRIRFFYDPQMPALKDLPAVDTGKDNKKHPSNFQHIFYTDGSAITSPTKEGHLNAGMGIVYFINKDGNLQKQQEWSISLGNHTAQFAEIAAFEFALKKCLPLGGNILVVTDSNYVAKAYNEELDVWASNGFVNNRKKPLKHISKWKSVADLKRLRPDVVVTHEPGHQKLDSSPHAYGNNLADQLATQASFKVHAGKRTADGSEFEKRTADGSEFESPKKKAKVE

SEQ ID NO: 772 - protein, 2087 aa, synthetic construct
  source 1..2087: note = Description of Artificial Sequence: Synthetic polypeptide
MPAAKRVKLDGGDKKYSIGLDIGTNSVGWAVITDEYKVPSKKFKVLGNTDRHSIKKNLIGALLFDSGETAEATRLKRTARRRYTRRKNRICYLQEIFSNEMAKVDDSFFHRLEESFLVEEDKKHERHPIFGNIVDEVAYHEKYPTIYHLRKKLVDSTDKADLRLIYLALAHMIKFRGHFLIEGDLNPDNSDVDKLFIQLVQTYNQLFEENPINASGVDAKAILSARLSKSRRLENLIAQLPGEKKNGLFGNLIALSLGLTPNFKSNFDLAEDAKLQLSKDTYDDDLDNLLAQIGDQYADLFLAAKNLSDAILLSDILRVNTEITKAPLSASMIKRYDEHHQDLTLLKALVRQQLPEKYKEIFFDQSKNGYAGYIDGGASQEEFYKFIKPILEKMDGTEELLVKLNREDLLRKQRTFDNGSIPHQIHLGELHAILRRQEDFYPFLKDNREKIEKILTFRIPYYVGPLARGNSRFAWMTRKSEETITPWNFEEVVDKGASAQSFIERMTNFDKNLPNEKVLPKHSLLYEYFTVYNELTKVKYVTEGMRKPAFLSGEQKKAIVDLLFKTNRKVTVKQLKEDYFKKIECFDSVEISGVEDRFNASLGTYHDLLKIIKDKDFLDNEENEDILEDIVLTLTLFEDREMIEERLKTYAHLFDDKVMKQLKRRRYTGWGRLSRKLINGIRDKQSGKTILDFLKSDGFANRNFMQLIHDDSLTFKEDIQKAQVSGQGDSLHEHIANLAGSPAIKKGILQTVKVVDELVKVMGRHKPENIVIEMARENQTTQKGQKNSRERMKRIEEGIKELGSQILKEHPVENTQLQNEKLYLYYLQNGRDMYVDQELDINRLSDYDVDHIVPQSFLKDDSIDNKVLTRSDKARGKSDNVPSEEVVKKMKNYWRQLLNAKLITQRKFDNLTKAERGGLSELDKAGFIKRQLVETRQITKHVAQILDSRMNTKYDENDKLIREVKVITLKSKLVSDFRKDFQFYKVREINNYHHAHDAYLNAVVGTALIKKYPKLESEFVYGDYKVYDVRKMIAKSEQEIGKATAKYFFYSNIMNFFKTEITLANGEIRKRPLIETNGETGEIVWDKGRDFATVRKVLSMPQVNIVKKTEVQTGGFSKESILPKRNSDKLIARKKDWDPKKYGGFDSPTVAYSVLVVAKVEKGKSKKLKSVKELLGITIMERSSFEKNPIDFLEAKGYKEVKKDLIIKLPKYSLFELENGRKRMLASAGELQKGNELALPSKYVNFLYLASHYEKLKGSPEDNEQKQLFVEQHKHYLDEIIEQISEFSKRVILADANLDKVLSAYNKHRDKPIREQAENIIHLFTLTNLGAPAAFKYFDTTIDRKRYTSTKEVLDATLIHQSITGLYETRIDLSQLGGDGGEAAAKPAPGGSGGVPWILKKPLELTIKLDLEEQQGTLLNNSILSKKGKEELKQLFEKYSALWQSWENQVGHRRIRPHKIATGTVKPTPQKQYHINPKAKPDIQIVINDLLKQGVLIQKESTMNTPVYPVPKPNGRWRMVLDYRAVNKVTPLIAVQNQHSYGILGSLFKGRYKTTIDLSNGFWAHPIVPEDYWITAFTWQGKQYCWTVLPQGFLNSPGLFTGDVVDLLQGIPNVEVYVDDVYISHDSEKEHLEYLDILFNRLKEAGYIISLKKSNIANSIVDFLGFQITNEGRGLTDTFKEKLENITAPTTLKQLQSILGLLNFARNFIPDFTELIAPLYALIPKSTKNYVPWQIEHSTTLETLITKLNGAEYLQGRKGDKTLIMKVNASYTTGYIRYYNEGEKKPISYVSIVFSKTELKFTELEKLLTTVHKGLLKALDLSMGQNIHVYSPIVSMQNIQKTPQTAKKALASRWLSWLSYLEDPRIRFFYDPQMPALKDLPAVDTGKDNKKHPSNFQHIFYTDGSAITSPTKEGHLNAGMGIVYFINKDGNLQKQQEWSISLGNHTAQFAEIAAFEFALKKCLPLGGNILVVTDSNYVAKAYNEELDVWASNGFVNNRKKPLKHISKWKSVADLKRLRPDVVVTHEPGHQKLDSSPHAYGNNLADQLATQASFKVHAGKRTADGSEFEKRTADGSEFESPKKKAKVE

SEQ ID NO: 773 - protein, 2088 aa, synthetic construct
  source 1..2088: note = Description of Artificial Sequence: Synthetic polypeptide
MPAAKRVKLDGGDKKYSIGLDIGTNSVGWAVITDEYKVPSKKFKVLGNTDRHSIKKNLIGALLFDSGETAEATRLKRTARRRYTRRKNRICYLQEIFSNEMAKVDDSFFHRLEESFLVEEDKKHERHPIFGNIVDEVAYHEKYPTIYHLRKKLVDSTDKADLRLIYLALAHMIKFRGHFLIEGDLNPDNSDVDKLFIQLVQTYNQLFEENPINASGVDAKAILSARLSKSRRLENLIAQLPGEKKNGLFGNLIALSLGLTPNFKSNFDLAEDAKLQLSKDTYDDDLDNLLAQIGDQYADLFLAAKNLSDAILLSDILRVNTEITKAPLSASMIKRYDEHHQDLTLLKALVRQQLPEKYKEIFFDQSKNGYAGYIDGGASQEEFYKFIKPILEKMDGTEELLVKLNREDLLRKQRTFDNGSIPHQIHLGELHAILRRQEDFYPFLKDNREKIEKILTFRIPYYVGPLARGNSRFAWMTRKSEETITPWNFEEVVDKGASAQSFIERMTNFDKNLPNEKVLPKHSLLYEYFTVYNELTKVKYVTEGMRKPAFLSGEQKKAIVDLLFKTNRKVTVKQLKEDYFKKIECFDSVEISGVEDRFNASLGTYHDLLKIIKDKDFLDNEENEDILEDIVLTLTLFEDREMIEERLKTYAHLFDDKVMKQLKRRRYTGWGRLSRKLINGIRDKQSGKTILDFLKSDGFANRNFMQLIHDDSLTFKEDIQKAQVSGQGDSLHEHIANLAGSPAIKKGILQTVKVVDELVKVMGRHKPENIVIEMARENQTTQKGQKNSRERMKRIEEGIKELGSQILKEHPVENTQLQNEKLYLYYLQNGRDMYVDQELDINRLSDYDVDHIVPQSFLKDDSIDNKVLTRSDKARGKSDNVPSEEVVKKMKNYWRQLLNAKLITQRKFDNLTKAERGGLSELDKAGFIKRQLVETRQITKHVAQILDSRMNTKYDENDKLIREVKVITLKSKLVSDFRKDFQFYKVREINNYHHAHDAYLNAVVGTALIKKYPKLESEFVYGDYKVYDVRKMIAKSEQEIGKATAKYFFYSNIMNFFKTEITLANGEIRKRPLIETNGETGEIVWDKGRDFATVRKVLSMPQVNIVKKTEVQTGGFSKESILPKRNSDKLIARKKDWDPKKYGGFDSPTVAYSVLVVAKVEKGKSKKLKSVKELLGITIMERSSFEKNPIDFLEAKGYKEVKKDLIIKLPKYSLFELENGRKRMLASAGELQKGNELALPSKYVNFLYLASHYEKLKGSPEDNEQKQLFVEQHKHYLDEIIEQISEFSKRVILADANLDKVLSAYNKHRDKPIREQAENIIHLFTLTNLGAPAAFKYFDTTIDRKRYTSTKEVLDATLIHQSITGLYETRIDLSQLGGDGGGSSGSSGSSGSSGGVPWILKKPLELTIKLDLEEQQGTLLNNSILSKKGKEELKQLFEKYSALWQSWENQVGHRRIRPHKIATGTVKPTPQKQYHINPKAKPDIQIVINDLLKQGVLIQKESTMNTPVYPVPKPNGRWRMVLDYRAVNKVTPLIAVQNQHSYGILGSLFKGRYKTTIDLSNGFWAHPIVPEDYWITAFTWQGKQYCWTVLPQGFLNSPGLFTGDVVDLLQGIPNVEVYVDDVYISHDSEKEHLEYLDILFNRLKEAGYIISLKKSNIANSIVDFLGFQITNEGRGLTDTFKEKLENITAPTTLKQLQSILGLLNFARNFIPDFTELIAPLYALIPKSTKNYVPWQIEHSTTLETLITKLNGAEYLQGRKGDKTLIMKVNASYTTGYIRYYNEGEKKPISYVSIVFSKTELKFTELEKLLTTVHKGLLKALDLSMGQNIHVYSPIVSMQNIQKTPQTAKKALASRWLSWLSYLEDPRIRFFYDPQMPALKDLPAVDTGKDNKKHPSNFQHIFYTDGSAITSPTKEGHLNAGMGIVYFINKDGNLQKQQEWSISLGNHTAQFAEIAAFEFALKKCLPLGGNILVVTDSNYVAKAYNEELDVWASNGFVNNRKKPLKHISKWKSVADLKRLRPDVVVTHEPGHQKLDSSPHAYGNNLADQLATQASFKVHAGKRTADGSEFEKRTADGSEFESPKKKAKVE

SEQ ID NO: 774 - protein, 2085 aa, synthetic construct
  source 1..2085: note = Description of Artificial Sequence: Synthetic polypeptide
MPAAKRVKLDGGDKKYSIGLDIGTNSVGWAVITDEYKVPSKKFKVLGNTDRHSIKKNLIGALLFDSGETAEATRLKRTARRRYTRRKNRICYLQEIFSNEMAKVDDSFFHRLEESFLVEEDKKHERHPIFGNIVDEVAYHEKYPTIYHLRKKLVDSTDKADLRLIYLALAHMIKFRGHFLIEGDLNPDNSDVDKLFIQLVQTYNQLFEENPINASGVDAKAILSARLSKSRRLENLIAQLPGEKKNGLFGNLIALSLGLTPNFKSNFDLAEDAKLQLSKDTYDDDLDNLLAQIGDQYADLFLAAKNLSDAILLSDILRVNTEITKAPLSASMIKRYDEHHQDLTLLKALVRQQLPEKYKEIFFDQSKNGYAGYIDGGASQEEFYKFIKPILEKMDGTEELLVKLNREDLLRKQRTFDNGSIPHQIHLGELHAILRRQEDFYPFLKDNREKIEKILTFRIPYYVGPLARGNSRFAWMTRKSEETITPWNFEEVVDKGASAQSFIERMTNFDKNLPNEKVLPKHSLLYEYFTVYNELTKVKYVTEGMRKPAFLSGEQKKAIVDLLFKTNRKVTVKQLKEDYFKKIECFDSVEISGVEDRFNASLGTYHDLLKIIKDKDFLDNEENEDILEDIVLTLTLFEDREMIEERLKTYAHLFDDKVMKQLKRRRYTGWGRLSRKLINGIRDKQSGKTILDFLKSDGFANRNFMQLIHDDSLTFKEDIQKAQVSGQGDSLHEHIANLAGSPAIKKGILQTVKVVDELVKVMGRHKPENIVIEMARENQTTQKGQKNSRERMKRIEEGIKELGSQILKEHPVENTQLQNEKLYLYYLQNGRDMYVDQELDINRLSDYDVDHIVPQSFLKDDSIDNKVLTRSDKARGKSDNVPSEEVVKKMKNYWRQLLNAKLITQRKFDNLTKAERGGLSELDKAGFIKRQLVETRQITKHVAQILDSRMNTKYDENDKLIREVKVITLKSKLVSDFRKDFQFYKVREINNYHHAHDAYLNAVVGTALIKKYPKLESEFVYGDYKVYDVRKMIAKSEQEIGKATAKYFFYSNIMNFFKTEITLANGEIRKRPLIETNGETGEIVWDKGRDFATVRKVLSMPQVNIVKKTEVQTGGFSKESILPKRNSDKLIARKKDWDPKKYGGFDSPTVAYSVLVVAKVEKGKSKKLKSVKELLGITIMERSSFEKNPIDFLEAKGYKEVKKDLIIKLPKYSLFELENGRKRMLASAGELQKGNELALPSKYVNFLYLASHYEKLKGSPEDNEQKQLFVEQHKHYLDEIIEQISEFSKRVILADANLDKVLSAYNKHRDKPIREQAENIIHLFTLTNLGAPAAFKYFDTTIDRKRYTSTKEVLDATLIHQSITGLYETRIDLSQLGGDGGGGGGGSGSSGGVPWILKKPLELTIKLDLEEQQGTLLNNSILSKKGKEELKQLFEKYSALWQSWENQVGHRRIRPHKIATGTVKPTPQKQYHINPKAKPDIQIVINDLLKQGVLIQKESTMNTPVYPVPKPNGRWRMVLDYRAVNKVTPLIAVQNQHSYGILGSLFKGRYKTTIDLSNGFWAHPIVPEDYWITAFTWQGKQYCWTVLPQGFLNSPGLFTGDVVDLLQGIPNVEVYVDDVYISHDSEKEHLEYLDILFNRLKEAGYIISLKKSNIANSIVDFLGFQITNEGRGLTDTFKEKLENITAPTTLKQLQSILGLLNFARNFIPDFTELIAPLYALIPKSTKNYVPWQIEHSTTLETLITKLNGAEYLQGRKGDKTLIMKVNASYTTGYIRYYNEGEKKPISYVSIVFSKTELKFTELEKLLTTVHKGLLKALDLSMGQNIHVYSPIVSMQNIQKTPQTAKKALASRWLSWLSYLEDPRIRFFYDPQMPALKDLPAVDTGKDNKKHPSNFQHIFYTDGSAITSPTKEGHLNAGMGIVYFINKDGNLQKQQEWSISLGNHTAQFAEIAAFEFALKKCLPLGGNILVVTDSNYVAKAYNEELDVWASNGFVNNRKKPLKHISKWKSVADLKRLRPDVVVTHEPGHQKLDSSPHAYGNNLADQLATQASFKVHAGKRTADGSEFEKRTADGSEFESPKKKAKVE

SEQ ID NO: 775 - protein, 2085 aa, synthetic construct
  source 1..2085: note = Description of Artificial Sequence: Synthetic polypeptide
MPAAKRVKLDGGDKKYSIGLDIGTNSVGWAVITDEYKVPSKKFKVLGNTDRHSIKKNLIGALLFDSGETAEATRLKRTARRRYTRRKNRICYLQEIFSNEMAKVDDSFFHRLEESFLVEEDKKHERHPIFGNIVDEVAYHEKYPTIYHLRKKLVDSTDKADLRLIYLALAHMIKFRGHFLIEGDLNPDNSDVDKLFIQLVQTYNQLFEENPINASGVDAKAILSARLSKSRRLENLIAQLPGEKKNGLFGNLIALSLGLTPNFKSNFDLAEDAKLQLSKDTYDDDLDNLLAQIGDQYADLFLAAKNLSDAILLSDILRVNTEITKAPLSASMIKRYDEHHQDLTLLKALVRQQLPEKYKEIFFDQSKNGYAGYIDGGASQEEFYKFIKPILEKMDGTEELLVKLNREDLLRKQRTFDNGSIPHQIHLGELHAILRRQEDFYPFLKDNREKIEKILTFRIPYYVGPLARGNSRFAWMTRKSEETITPWNFEEVVDKGASAQSFIERMTNFDKNLPNEKVLPKHSLLYEYFTVYNELTKVKYVTEGMRKPAFLSGEQKKAIVDLLFKTNRKVTVKQLKEDYFKKIECFDSVEISGVEDRFNASLGTYHDLLKIIKDKDFLDNEENEDILEDIVLTLTLFEDREMIEERLKTYAHLFDDKVMKQLKRRRYTGWGRLSRKLINGIRDKQSGKTILDFLKSDGFANRNFMQLIHDDSLTFKEDIQKAQVSGQGDSLHEHIANLAGSPAIKKGILQTVKVVDELVKVMGRHKPENIVIEMARENQTTQKGQKNSRERMKRIEEGIKELGSQILKEHPVENTQLQNEKLYLYYLQNGRDMYVDQELDINRLSDYDVDHIVPQSFLKDDSIDNKVLTRSDKARGKSDNVPSEEVVKKMKNYWRQLLNAKLITQRKFDNLTKAERGGLSELDKAGFIKRQLVETRQITKHVAQILDSRMNTKYDENDKLIREVKVITLKSKLVSDFRKDFQFYKVREINNYHHAHDAYLNAVVGTALIKKYPKLESEFVYGDYKVYDVRKMIAKSEQEIGKATAKYFFYSNIMNFFKTEITLANGEIRKRPLIETNGETGEIVWDKGRDFATVRKVLSMPQVNIVKKTEVQTGGFSKESILPKRNSDKLIARKKDWDPKKYGGFDSPTVAYSVLVVAKVEKGKSKKLKSVKELLGITIMERSSFEKNPIDFLEAKGYKEVKKDLIIKLPKYSLFELENGRKRMLASAGELQKGNELALPSKYVNFLYLASHYEKLKGSPEDNEQKQLFVEQHKHYLDEIIEQISEFSKRVILADANLDKVLSAYNKHRDKPIREQAENIIHLFTLTNLGAPAAFKYFDTTIDRKRYTSTKEVLDATLIHQSITGLYETRIDLSQLGGDGGGSSGGSPAPGGVPWILKKPLELTIKLDLEEQQGTLLNNSILSKKGKEELKQLFEKYSALWQSWENQVGHRRIRPHKIATGTVKPTPQKQYHINPKAKPDIQIVINDLLKQGVLIQKESTMNTPVYPVPKPNGRWRMVLDYRAVNKVTPLIAVQNQHSYGILGSLFKGRYKTTIDLSNGFWAHPIVPEDYWITAFTWQGKQYCWTVLPQGFLNSPGLFTGDVVDLLQGIPNVEVYVDDVYISHDSEKEHLEYLDILFNRLKEAGYIISLKKSNIANSIVDFLGFQITNEGRGLTDTFKEKLENITAPTTLKQLQSILGLLNFARNFIPDFTELIAPLYALIPKSTKNYVPWQIEHSTTLETLITKLNGAEYLQGRKGDKTLIMKVNASYTTGYIRYYNEGEKKPISYVSIVFSKTELKFTELEKLLTTVHKGLLKALDLSMGQNIHVYSPIVSMQNIQKTPQTAKKALASRWLSWLSYLEDPRIRFFYDPQMPALKDLPAVDTGKDNKKHPSNFQHIFYTDGSAITSPTKEGHLNAGMGIVYFINKDGNLQKQQEWSISLGNHTAQFAEIAAFEFALKKCLPLGGNILVVTDSNYVAKAYNEELDVWASNGFVNNRKKPLKHISKWKSVADLKRLRPDVVVTHEPGHQKLDSSPHAYGNNLADQLATQASFKVHAGKRTADGSEFEKRTADGSEFESPKKKAKVE

SEQ ID NO: 776 - protein, 2084 aa, synthetic construct
  source 1..2084: note = Description of Artificial Sequence: Synthetic polypeptide
MPAAKRVKLDGGDKKYSIGLDIGTNSVGWAVITDEYKVPSKKFKVLGNTDRHSIKKNLIGALLFDSGETAEATRLKRTARRRYTRRKNRICYLQEIFSNEMAKVDDSFFHRLEESFLVEEDKKHERHPIFGNIVDEVAYHEKYPTIYHLRKKLVDSTDKADLRLIYLALAHMIKFRGHFLIEGDLNPDNSDVDKLFIQLVQTYNQLFEENPINASGVDAKAILSARLSKSRRLENLIAQLPGEKKNGLFGNLIALSLGLTPNFKSNFDLAEDAKLQLSKDTYDDDLDNLLAQIGDQYADLFLAAKNLSDAILLSDILRVNTEITKAPLSASMIKRYDEHHQDLTLLKALVRQQLPEKYKEIFFDQSKNGYAGYIDGGASQEEFYKFIKPILEKMDGTEELLVKLNREDLLRKQRTFDNGSIPHQIHLGELHAILRRQEDFYPFLKDNREKIEKILTFRIPYYVGPLARGNSRFAWMTRKSEETITPWNFEEVVDKGASAQSFIERMTNFDKNLPNEKVLPKHSLLYEYFTVYNELTKVKYVTEGMRKPAFLSGEQKKAIVDLLFKTNRKVTVKQLKEDYFKKIECFDSVEISGVEDRFNASLGTYHDLLKIIKDKDFLDNEENEDILEDIVLTLTLFEDREMIEERLKTYAHLFDDKVMKQLKRRRYTGWGRLSRKLINGIRDKQSGKTILDFLKSDGFANRNFMQLIHDDSLTFKEDIQKAQVSGQGDSLHEHIANLAGSPAIKKGILQTVKVVDELVKVMGRHKPENIVIEMARENQTTQKGQKNSRERMKRIEEGIKELGSQILKEHPVENTQLQNEKLYLYYLQNGRDMYVDQELDINRLSDYDVDHIVPQSFLKDDSIDNKVLTRSDKARGKSDNVPSEEVVKKMKNYWRQLLNAKLITQRKFDNLTKAERGGLSELDKAGFIKRQLVETRQITKHVAQILDSRMNTKYDENDKLIREVKVITLKSKLVSDFRKDFQFYKVREINNYHHAHDAYLNAVVGTALIKKYPKLESEFVYGDYKVYDVRKMIAKSEQEIGKATAKYFFYSNIMNFFKTEITLANGEIRKRPLIETNGETGEIVWDKGRDFATVRKVLSMPQVNIVKKTEVQTGGFSKESILPKRNSDKLIARKKDWDPKKYGGFDSPTVAYSVLVVAKVEKGKSKKLKSVKELLGITIMERSSFEKNPIDFLEAKGYKEVKKDLIIKLPKYSLFELENGRKRMLASAGELQKGNELALPSKYVNFLYLASHYEKLKGSPEDNEQKQLFVEQHKHYLDEIIEQISEFSKRVILADANLDKVLSAYNKHRDKPIREQAENIIHLFTLTNLGAPAAFKYFDTTIDRKRYTSTKEVLDATLIHQSITGLYETRIDLSQLGGDGGGGSEAAAKGGVPWILKKPLELTIKLDLEEQQGTLLNNSILSKKGKEELKQLFEKYSALWQSWENQVGHRRIRPHKIATGTVKPTPQKQYHINPKAKPDIQIVINDLLKQGVLIQKESTMNTPVYPVPKPNGRWRMVLDYRAVNKVTPLIAVQNQHSYGILGSLFKGRYKTTIDLSNGFWAHPIVPEDYWITAFTWQGKQYCWTVLPQGFLNSPGLFTGDVVDLLQGIPNVEVYVDDVYISHDSEKEHLEYLDILFNRLKEAGYIISLKKSNIANSIVDFLGFQITNEGRGLTDTFKEKLENITAPTTLKQLQSILGLLNFARNFIPDFTELIAPLYALIPKSTKNYVPWQIEHSTTLETLITKLNGAEYLQGRKGDKTLIMKVNASYTTGYIRYYNEGEKKPISYVSIVFSKTELKFTELEKLLTTVHKGLLKALDLSMGQNIHVYSPIVSMQNIQKTPQTAKKALASRWLSWLSYLEDPRIRFFYDPQMPALKDLPAVDTGKDNKKHPSNFQHIFYTDGSAITSPTKEGHLNAGMGIVYFINKDGNLQKQQEWSISLGNHTAQFAEIAAFEFALKKCLPLGGNILVVTDSNYVAKAYNEELDVWASNGFVNNRKKPLKHISKWKSVADLKRLRPDVVVTHEPGHQKLDSSPHAYGNNLADQLATQASFKVHAGKRTADGSEFEKRTADGSEFESPKKKAKVE

SEQ ID NO: 777 - protein, 2085 aa, synthetic construct
  source 1..2085: note = Description of Artificial Sequence: Synthetic polypeptide
MPAAKRVKLDGGDKKYSIGLDIGTNSVGWAVITDEYKVPSKKFKVLGNTDRHSIKKNLIGALLFDSGETAEATRLKRTARRRYTRRKNRICYLQEIFSNEMAKVDDSFFHRLEESFLVEEDKKHERHPIFGNIVDEVAYHEKYPTIYHLRKKLVDSTDKADLRLIYLALAHMIKFRGHFLIEGDLNPDNSDVDKLFIQLVQTYNQLFEENPINASGVDAKAILSARLSKSRRLENLIAQLPGEKKNGLFGNLIALSLGLTPNFKSNFDLAEDAKLQLSKDTYDDDLDNLLAQIGDQYADLFLAAKNLSDAILLSDILRVNTEITKAPLSASMIKRYDEHHQDLTLLKALVRQQLPEKYKEIFFDQSKNGYAGYIDGGASQEEFYKFIKPILEKMDGTEELLVKLNREDLLRKQRTFDNGSIPHQIHLGELHAILRRQEDFYPFLKDNREKIEKILTFRIPYYVGPLARGNSRFAWMTRKSEETITPWNFEEVVDKGASAQSFIERMTNFDKNLPNEKVLPKHSLLYEYFTVYNELTKVKYVTEGMRKPAFLSGEQKKAIVDLLFKTNRKVTVKQLKEDYFKKIECFDSVEISGVEDRFNASLGTYHDLLKIIKDKDFLDNEENEDILEDIVLTLTLFEDREMIEERLKTYAHLFDDKVMKQLKRRRYTGWGRLSRKLINGIRDKQSGKTILDFLKSDGFANRNFMQLIHDDSLTFKEDIQKAQVSGQGDSLHEHIANLAGSPAIKKGILQTVKVVDELVKVMGRHKPENIVIEMARENQTTQKGQKNSRERMKRIEEGIKELGSQILKEHPVENTQLQNEKLYLYYLQNGRDMYVDQELDINRLSDYDVDHIVPQSFLKDDSIDNKVLTRSDKARGKSDNVPSEEVVKKMKNYWRQLLNAKLITQRKFDNLTKAERGGLSELDKAGFIKRQLVETRQITKHVAQILDSRMNTKYDENDKLIREVKVITLKSKLVSDFRKDFQFYKVREINNYHHAHDAYLNAVVGTALIKKYPKLESEFVYGDYKVYDVRKMIAKSEQEIGKATAKYFFYSNIMNFFKTEITLANGEIRKRPLIETNGETGEIVWDKGRDFATVRKVLSMPQVNIVKKTEVQTGGFSKESILPKRNSDKLIARKKDWDPKKYGGFDSPTVAYSVLVVAKVEKGKSKKLKSVKELLGITIMERSSFEKNPIDFLEAKGYKEVKKDLIIKLPKYSLFELENGRKRMLASAGELQKGNELALPSKYVNFLYLASHYEKLKGSPEDNEQKQLFVEQHKHYLDEIIEQISEFSKRVILADANLDKVLSAYNKHRDKPIREQAENIIHLFTLTNLGAPAAFKYFDTTIDRKRYTSTKEVLDATLIHQSITGLYETRIDLSQLGGDGGGGGGSSPAPGGVPWILKKPLELTIKLDLEEQQGTLLNNSILSKKGKEELKQLFEKYSALWQSWENQVGHRRIRPHKIATGTVKPTPQKQYHINPKAKPDIQIVINDLLKQGVLIQKESTMNTPVYPVPKPNGRWRMVLDYRAVNKVTPLIAVQNQHSYGILGSLFKGRYKTTIDLSNGFWAHPIVPEDYWITAFTWQGKQYCWTVLPQGFLNSPGLFTGDVVDLLQGIPNVEVYVDDVYISHDSEKEHLEYLDILFNRLKEAGYIISLKKSNIANSIVDFLGFQITNEGRGLTDTFKEKLENITAPTTLKQLQSILGLLNFARNFIPDFTELIAPLYALIPKSTKNYVPWQIEHSTTLETLITKLNGAEYLQGRKGDKTLIMKVNASYTTGYIRYYNEGEKKPISYVSIVFSKTELKFTELEKLLTTVHKGLLKALDLSMGQNIHVYSPIVSMQNIQKTPQTAKKALASRWLSWLSYLEDPRIRFFYDPQMPALKDLPAVDTGKDNKKHPSNFQHIFYTDGSAITSPTKEGHLNAGMGIVYFINKDGNLQKQQEWSISLGNHTAQFAEIAAFEFALKKCLPLGGNILVVTDSNYVAKAYNEELDVWASNGFVNNRKKPLKHISKWKSVADLKRLRPDVVVTHEPGHQKLDSSPHAYGNNLADQLATQASFKVHAGKRTADGSEFEKRTADGSEFESPKKKAKVE

SEQ ID NO: 778 - protein, 2091 aa, synthetic construct
  source 1..2091: note = Description of Artificial Sequence: Synthetic polypeptide
MPAAKRVKLDGGDKKYSIGLDIGTNSVGWAVITDEYKVPSKKFKVLGNTDRHSIKKNLIGALLFDSGETAEATRLKRTARRRYTRRKNRICYLQEIFSNEMAKVDDSFFHRLEESFLVEEDKKHERHPIFGNIVDEVAYHEKYPTIYHLRKKLVDSTDKADLRLIYLALAHMIKFRGHFLIEGDLNPDNSDVDKLFIQLVQTYNQLFEENPINASGVDAKAILSARLSKSRRLENLIAQLPGEKKNGLFGNLIALSLGLTPNFKSNFDLAEDAKLQLSKDTYDDDLDNLLAQIGDQYADLFLAAKNLSDAILLSDILRVNTEITKAPLSASMIKRYDEHHQDLTLLKALVRQQLPEKYKEIFFDQSKNGYAGYIDGGASQEEFYKFIKPILEKMDGTEELLVKLNREDLLRKQRTFDNGSIPHQIHLGELHAILRRQEDFYPFLKDNREKIEKILTFRIPYYVGPLARGNSRFAWMTRKSEETITPWNFEEVVDKGASAQSFIERMTNFDKNLPNEKVLPKHSLLYEYFTVYNELTKVKYVTEGMRKPAFLSGEQKKAIVDLLFKTNRKVTVKQLKEDYFKKIECFDSVEISGVEDRFNASLGTYHDLLKIIKDKDFLDNEENEDILEDIVLTLTLFEDREMIEERLKTYAHLFDDKVMKQLKRRRYTGWGRLSRKLINGIRDKQSGKTILDFLKSDGFANRNFMQLIHDDSLTFKEDIQKAQVSGQGDSLHEHIANLAGSPAIKKGILQTVKVVDELVKVMGRHKPENIVIEMARENQTTQKGQKNSRERMKRIEEGIKELGSQILKEHPVENTQLQNEKLYLYYLQNGRDMYVDQELDINRLSDYDVDHIVPQSFLKDDSIDNKVLTRSDKARGKSDNVPSEEVVKKMKNYWRQLLNAKLITQRKFDNLTKAERGGLSELDKAGFIKRQLVETRQITKHVAQILDSRMNTKYDENDKLIREVKVITLKSKLVSDFRKDFQFYKVREINNYHHAHDAYLNAVVGTALIKKYPKLESEFVYGDYKVYDVRKMIAKSEQEIGKATAKYFFYSNIMNFFKTEITLANGEIRKRPLIETNGETGEIVWDKGRDFATVRKVLSMPQVNIVKKTEVQTGGFSKESILPKRNSDKLIARKKDWDPKKYGGFDSPTVAYSVLVVAKVEKGKSKKLKSVKELLGITIMERSSFEKNPIDFLEAKGYKEVKKDLIIKLPKYSLFELENGRKRMLASAGELQKGNELALPSKYVNFLYLASHYEKLKGSPEDNEQKQLFVEQHKHYLDEIIEQISEFSKRVILADANLDKVLSAYNKHRDKPIREQAENIIHLFTLTNLGAPAAFKYFDTTIDRKRYTSTKEVLDATLIHQSITGLYETRIDLSQLGGDGGEAAAKGGGGSEAAAKGGVPWILKKPLELTIKLDLEEQQGTLLNNSILSKKGKEELKQLFEKYSALWQSWENQVGHRRIRPHKIATGTVKPTPQKQYHINPKAKPDIQIVINDLLKQGVLIQKESTMNTPVYPVPKPNGRWRMVLDYRAVNKVTPLIAVQNQHSYGILGSLFKGRYKTTIDLSNGFWAHPIVPEDYWITAFTWQGKQYCWTVLPQGFLNSPGLFTGDVVDLLQGIPNVEVYVDDVYISHDSEKEHLEYLDILFNRLKEAGYIISLKKSNIANSIVDFLGFQITNEGRGLTDTFKEKLENITAPTTLKQLQSILGLLNFARNFIPDFTELIAPLYALIPKSTKNYVPWQIEHSTTLETLITKLNGAEYLQGRKGDKTLIMKVNASYTTGYIRYYNEGEKKPISYVSIVFSKTELKFTELEKLLTTVHKGLLKALDLSMGQNIHVYSPIVSMQNIQKTPQTAKKALASRWLSWLSYLEDPRIRFFYDPQMPALKDLPAVDTGKDNKKHPSNFQHIFYTDGSAITSPTKEGHLNAGMGIVYFINKDGNLQKQQEWSISLGNHTAQFAEIAAFEFALKKCLPLGGNILVVTDSNYVAKAYNEELDVWASNGFVNNRKKPLKHISKWKSVADLKRLRPDVVVTHEPGHQKLDSSPHAYGNNLADQLATQASFKVHAGKRTADGSEFEKRTADGSEFESPKKKAKVE

SEQ ID NO: 779 - protein, 2087 aa, synthetic construct
  source 1..2087: note = Description of Artificial Sequence: Synthetic polypeptide
MPAAKRVKLDGGDKKYSIGLDIGTNSVGWAVITDEYKVPSKKFKVLGNTDRHSIKKNLIGALLFDSGETAEATRLKRTARRRYTRRKNRICYLQEIFSNEMAKVDDSFFHRLEESFLVEEDKKHERHPIFGNIVDEVAYHEKYPTIYHLRKKLVDSTDKADLRLIYLALAHMIKFRGHFLIEGDLNPDNSDVDKLFIQLVQTYNQLFEENPINASGVDAKAILSARLSKSRRLENLIAQLPGEKKNGLFGNLIALSLGLTPNFKSNFDLAEDAKLQLSKDTYDDDLDNLLAQIGDQYADLFLAAKNLSDAILLSDILRVNTEITKAPLSASMIKRYDEHHQDLTLLKALVRQQLPEKYKEIFFDQSKNGYAGYIDGGASQEEFYKFIKPILEKMDGTEELLVKLNREDLLRKQRTFDNGSIPHQIHLGELHAILRRQEDFYPFLKDNREKIEKILTFRIPYYVGPLARGNSRFAWMTRKSEETITPWNFEEVVDKGASAQSFIERMTNFDKNLPNEKVLPKHSLLYEYFTVYNELTKVKYVTEGMRKPAFLSGEQKKAIVDLLFKTNRKVTVKQLKEDYFKKIECFDSVEISGVEDRFNASLGTYHDLLKIIKDKDFLDNEENEDILEDIVLTLTLFEDREMIEERLKTYAHLFDDKVMKQLKRRRYTGWGRLSRKLINGIRDKQSGKTILDFLKSDGFANRNFMQLIHDDSLTFKEDIQKAQVSGQGDSLHEHIANLAGSPAIKKGILQTVKVVDELVKVMGRHKPENIVIEMARENQTTQKGQKNSRERMKRIEEGIKELGSQILKEHPVENTQLQNEKLYLYYLQNGRDMYVDQELDINRLSDYDVDHIVPQSFLKDDSIDNKVLTRSDKARGKSDNVPSEEVVKKMKNYWRQLLNAKLITQRKFDNLTKAERGGLSELDKAGFIKRQLVETRQITKHVAQILDSRMNTKYDENDKLIREVKVITLKSKLVSDFRKDFQFYKVREINNYHHAHDAYLNAVVGTALIKKYPKLESEFVYGDYKVYDVRKMIAKSEQEIGKATAKYFFYSNIMNFFKTEITLANGEIRKRPLIETNGETGEIVWDKGRDFATVRKVLSMPQVNIVKKTEVQTGGFSKESILPKRNSDKLIARKKDWDPKKYGGFDSPTVAYSVLVVAKVEKGKSKKLKSVKELLGITIMERSSFEKNPIDFLEAKGYKEVKKDLIIKLPKYSLFELENGRKRMLASAGELQKGNELALPSKYVNFLYLASHYEKLKGSPEDNEQKQLFVEQHKHYLDEIIEQISEFSKRVILADANLDKVLSAYNKHRDKPIREQAENIIHLFTLTNLGAPAAFKYFDTTIDRKRYTSTKEVLDATLIHQSITGLYETRIDLSQLGGDGGEAAAKGGSGSSGGVPWILKKPLELTIKLDLEEQQGTLLNNSILSKKGKEELKQLFEKYSALWQSWENQVGHRRIRPHKIATGTVKPTPQKQYHINPKAKPDIQIVINDLLKQGVLIQKESTMNTPVYPVPKPNGRWRMVLDYRAVNKVTPLIAVQNQHSYGILGSLFKGRYKTTIDLSNGFWAHPIVPEDYWITAFTWQGKQYCWTVLPQGFLNSPGLFTGDVVDLLQGIPNVEVYVDDVYISHDSEKEHLEYLDILFNRLKEAGYIISLKKSNIANSIVDFLGFQITNEGRGLTDTFKEKLENITAPTTLKQLQSILGLLNFARNFIPDFTELIAPLYALIPKSTKNYVPWQIEHSTTLETLITKLNGAEYLQGRKGDKTLIMKVNASYTTGYIRYYNEGEKKPISYVSIVFSKTELKFTELEKLLTTVHKGLLKALDLSMGQNIHVYSPIVSMQNIQKTPQTAKKALASRWLSWLSYLEDPRIRFFYDPQMPALKDLPAVDTGKDNKKHPSNFQHIFYTDGSAITSPTKEGHLNAGMGIVYFINKDGNLQKQQEWSISLGNHTAQFAEIAAFEFALKKCLPLGGNILVVTDSNYVAKAYNEELDVWASNGFVNNRKKPLKHISKWKSVADLKRLRPDVVVTHEPGHQKLDSSPHAYGNNLADQLATQASFKVHAGKRTADGSEFEKRTADGSEFESPKKKAKVE

SEQ ID NO: 780 - protein, 2085 aa, synthetic construct
  source 1..2085: note = Description of Artificial Sequence: Synthetic polypeptide
MPAAKRVKLDGGDKKYSIGLDIGTNSVGWAVITDEYKVPSKKFKVLGNTDRHSIKKNLIGALLFDSGETAEATRLKRTARRRYTRRKNRICYLQEIFSNEMAKVDDSFFHRLEESFLVEEDKKHERHPIFGNIVDEVAYHEKYPTIYHLRKKLVDSTDKADLRLIYLALAHMIKFRGHFLIEGDLNPDNSDVDKLFIQLVQTYNQLFEENPINASGVDAKAILSARLSKSRRLENLIAQLPGEKKNGLFGNLIALSLGLTPNFKSNFDLAEDAKLQLSKDTYDDDLDNLLAQIGDQYADLFLAAKNLSDAILLSDILRVNTEITKAPLSASMIKRYDEHHQDLTLLKALVRQQLPEKYKEIFFDQSKNGYAGYIDGGASQEEFYKFIKPILEKMDGTEELLVKLNREDLLRKQRTFDNGSIPHQIHLGELHAILRRQEDFYPFLKDNREKIEKILTFRIPYYVGPLARGNSRFAWMTRKSEETITPWNFEEVVDKGASAQSFIERMTNFDKNLPNEKVLPKHSLLYEYFTVYNELTKVKYVTEGMRKPAFLSGEQKKAIVDLLFKTNRKVTVKQLKEDYFKKIECFDSVEISGVEDRFNASLGTYHDLLKIIKDKDFLDNEENEDILEDIVLTLTLFEDREMIEERLKTYAHLFDDKVMKQLKRRRYTGWGRLSRKLINGIRDKQSGKTILDFLKSDGFANRNFMQLIHDDSLTFKEDIQKAQVSGQGDSLHEHIANLAGSPAIKKGILQTVKVVDELVKVMGRHKPENIVIEMARENQTTQKGQKNSRERMKRIEEGIKELGSQILKEHPVENTQLQNEKLYLYYLQNGRDMYVDQELDINRLSDYDVDHIVPQSFLKDDSIDNKVLTRSDKARGKSDNVPSEEVVKKMKNYWRQLLNAKLITQRKFDNLTKAERGGLSELDKAGFIKRQLVETRQITKHVAQILDSRMNTKYDENDKLIREVKVITLKSKLVSDFRKDFQFYKVREINNYHHAHDAYLNAVVGTALIKKYPKLESEFVYGDYKVYDVRKMIAKSEQEIGKATAKYFFYSNIMNFFKTEITLANGEIRKRPLIETNGETGEIVWDKGRDFATVRKVLSMPQVNIVKKTEVQTGGFSKESILPKRNSDKLIARKKDWDPKKYGGFDSPTVAYSVLVVAKVEKGKSKKLKSVKELLGITIMERSSFEKNPIDFLEAKGYKEVKKDLIIKLPKYSLFELENGRKRMLASAGELQKGNELALPSKYVNFLYLASHYEKLKGSPEDNEQKQLFVEQHKHYLDEIIEQISEFSKRVILADANLDKVLSAYNKHRDKPIREQAENIIHLFTLTNLGAPAAFKYFDTTIDRKRYTSTKEVLDATLIHQSITGLYETRIDLSQLGGDGGGGSGGGPAPGGVPWILKKPLELTIKLDLEEQQGTLLNNSILSKKGKEELKQLFEKYSALWQSWENQVGHRRIRPHKIATGTVKPTPQKQYHINPKAKPDIQIVINDLLKQGVLIQKESTMNTPVYPVPKPNGRWRMVLDYRAVNKVTPLIAVQNQHSYGILGSLFKGRYKTTIDLSNGFWAHPIVPEDYWITAFTWQGKQYCWTVLPQGFLNSPGLFTGDVVDLLQGIPNVEVYVDDVYISHDSEKEHLEYLDILFNRLKEAGYIISLKKSNIANSIVDFLGFQITNEGRGLTDTFKEKLENITAPTTLKQLQSILGLLNFARNFIPDFTELIAPLYALIPKSTKNYVPWQIEHSTTLETLITKLNGAEYLQGRKGDKTLIMKVNASYTTGYIRYYNEGEKKPISYVSIVFSKTELKFTELEKLLTTVHKGLLKALDLSMGQNIHVYSPIVSMQNIQKTPQTAKKALASRWLSWLSYLEDPRIRFFYDPQMPALKDLPAVDTGKDNKKHPSNFQHIFYTDGSAITSPTKEGHLNAGMGIVYFINKDGNLQKQQEWSISLGNHTAQFAEIAAFEFALKKCLPLGGNILVVTDSNYVAKAYNEELDVWASNGFVNNRKKPLKHISKWKSVADLKRLRPDVVVTHEPGHQKLDSSPHAYGNNLADQLATQASFKVHAGKRTADGSEFEKRTADGSEFESPKKKAKVE

SEQ ID NO: 781 - protein, 2086 aa, synthetic construct
  source 1..2086: note = Description of Artificial Sequence: Synthetic polypeptide
MPAAKRVKLDGGDKKYSIGLDIGTNSVGWAVITDEYKVPSKKFKVLGNTDRHSIKKNLIGALLFDSGETAEATRLKRTARRRYTRRKNRICYLQEIFSNEMAKVDDSFFHRLEESFLVEEDKKHERHPIFGNIVDEVAYHEKYPTIYHLRKKLVDSTDKADLRLIYLALAHMIKFRGHFLIEGDLNPDNSDVDKLFIQLVQTYNQLFEENPINASGVDAKAILSARLSKSRRLENLIAQLPGEKKNGLFGNLIALSLGLTPNFKSNFDLAEDAKLQLSKDTYDDDLDNLLAQIGDQYADLFLAAKNLSDAILLSDILRVNTEITKAPLSASMIKRYDEHHQDLTLLKALVRQQLPEKYKEIFFDQSKNGYAGYIDGGASQEEFYKFIKPILEKMDGTEELLVKLNREDLLRKQRTFDNGSIPHQIHLGELHAILRRQEDFYPFLKDNREKIEKILTFRIPYYVGPLARGNSRFAWMTRKSEETITPWNFEEVVDKGASAQSFIERMTNFDKNLPNEKVLPKHSLLYEYFTVYNELTKVKYVTEGMRKPAFLSGEQKKAIVDLLFKTNRKVTVKQLKEDYFKKIECFDSVEISGVEDRFNASLGTYHDLLKIIKDKDFLDNEENEDILEDIVLTLTLFEDREMIEERLKTYAHLFDDKVMKQLKRRRYTGWGRLSRKLINGIRDKQSGKTILDFLKSDGFANRNFMQLIHDDSLTFKEDIQKAQVSGQGDSLHEHIANLAGSPAIKKGILQTVKVVDELVKVMGRHKPENIVIEMARENQTTQKGQKNSRERMKRIEEGIKELGSQILKEHPVENTQLQNEKLYLYYLQNGRDMYVDQELDINRLSDYDVDHIVPQSFLKDDSIDNKVLTRSDKARGKSDNVPSEEVVKKMKNYWRQLLNAKLITQRKFDNLTKAERGGLSELDKAGFIKRQLVETRQITKHVAQILDSRMNTKYDENDKLIREVKVITLKSKLVSDFRKDFQFYKVREINNYHHAHDAYLNAVVGTALIKKYPKLESEFVYGDYKVYDVRKMIAKSEQEIGKATAKYFFYSNIMNFFKTEITLANGEIRKRPLIETNGETGEIVWDKGRDFATVRKVLSMPQVNIVKKTEVQTGGFSKESILPKRNSDKLIARKKDWDPKKYGGFDSPTVAYSVLVVAKVEKGKSKKLKSVKELLGITIMERSSFEKNPIDFLEAKGYKEVKKDLIIKLPKYSLFELENGRKRMLASAGELQKGNELALPSKYVNFLYLASHYEKLKGSPEDNEQKQLFVEQHKHYLDEIIEQISEFSKRVILADANLDKVLSAYNKHRDKPIREQAENIIHLFTLTNLGAPAAFKYFDTTIDRKRYTSTKEVLDATLIHQSITGLYETRIDLSQLGGDGGGGGGSGGGGSGGVPWILKKPLELTIKLDLEEQQGTLLNNSILSKKGKEELKQLFEKYSALWQSWENQVGHRRIRPHKIATGTVKPTPQKQYHINPKAKPDIQIVINDLLKQGVLIQKESTMNTPVYPVPKPNGRWRMVLDYRAVNKVTPLIAVQNQHSYGILGSLFKGRYKTTIDLSNGFWAHPIVPEDYWITAFTWQGKQYCWTVLPQGFLNSPGLFTGDVVDLLQGIPNVEVYVDDVYISHDSEKEHLEYLDILFNRLKEAGYIISLKKSNIANSIVDFLGFQITNEGRGLTDTFKEKLENITAPTTLKQLQSILGLLNFARNFIPDFTELIAPLYALIPKSTKNYVPWQIEHSTTLETLITKLNGAEYLQGRKGDKTLIMKVNASYTTGYIRYYNEGEKKPISYVSIVFSKTELKFTELEKLLTTVHKGLLKALDLSMGQNIHVYSPIVSMQNIQKTPQTAKKALASRWLSWLSYLEDPRIRFFYDPQMPALKDLPAVDTGKDNKKHPSNFQHIFYTDGSAITSPTKEGHLNAGMGIVYFINKDGNLQKQQEWSISLGNHTAQFAEIAAFEFALKKCLPLGGNILVVTDSNYVAKAYNEELDVWASNGFVNNRKKPLKHISKWKSVADLKRLRPDVVVTHEPGHQKLDSSPHAYGNNLADQLATQASFKVHAGKRTADGSEFEKRTADGSEFESPKKKAKVE

SEQ ID NO: 782 - protein, 2085 aa, synthetic construct
  source 1..2085: note = Description of Artificial Sequence: Synthetic polypeptide
MPAAKRVKLDGGDKKYSIGLDIGTNSVGWAVITDEYKVPSKKFKVLGNTDRHSIKKNLIGALLFDSGETAEATRLKRTARRRYTRRKNRICYLQEIFSNEMAKVDDSFFHRLEESFLVEEDKKHERHPIFGNIVDEVAYHEKYPTIYHLRKKLVDSTDKADLRLIYLALAHMIKFRGHFLIEGDLNPDNSDVDKLFIQLVQTYNQLFEENPINASGVDAKAILSARLSKSRRLENLIAQLPGEKKNGLFGNLIALSLGLTPNFKSNFDLAEDAKLQLSKDTYDDDLDNLLAQIGDQYADLFLAAKNLSDAILLSDILRVNTEITKAPLSASMIKRYDEHHQDLTLLKALVRQQLPEKYKEIFFDQSKNGYAGYIDGGASQEEFYKFIKPILEKMDGTEELLVKLNREDLLRKQRTFDNGSIPHQIHLGELHAILRRQEDFYPFLKDNREKIEKILTFRIPYYVGPLARGNSRFAWMTRKSEETITPWNFEEVVDKGASAQSFIERMTNFDKNLPNEKVLPKHSLLYEYFTVYNELTKVKYVTEGMRKPAFLSGEQKKAIVDLLFKTNRKVTVKQLKEDYFKKIECFDSVEISGVEDRFNASLGTYHDLLKIIKDKDFLDNEENEDILEDIVLTLTLFEDREMIEERLKTYAHLFDDKVMKQLKRRRYTGWGRLSRKLINGIRDKQSGKTILDFLKSDGFANRNFMQLIHDDSLTFKEDIQKAQVSGQGDSLHEHIANLAGSPAIKKGILQTVKVVDELVKVMGRHKPENIVIEMARENQTTQKGQKNSRERMKRIEEGIKELGSQILKEHPVENTQLQNEKLYLYYLQNGRDMYVDQELDINRLSDYDVDHIVPQSFLKDDSIDNKVLTRSDKARGKSDNVPSEEVVKKMKNYWRQLLNAKLITQRKFDNLTKAERGGLSELDKAGFIKRQLVETRQITKHVAQILDSRMNTKYDENDKLIREVKVITLKSKLVSDFRKDFQFYKVREINNYHHAHDAYLNAVVGTALIKKYPKLESEFVYGDYKVYDVRKMIAKSEQEIGKATAKYFFYSNIMNFFKTEITLANGEIRKRPLIETNGETGEIVWDKGRDFATVRKVLSMPQVNIVKKTEVQTGGFSKESILPKRNSDKLIARKKDWDPKKYGGFDSPTVAYSVLVVAKVEKGKSKKLKSVKELLGITIMERSSFEKNPIDFLEAKGYKEVKKDLIIKLPKYSLFELENGRKRMLASAGELQKGNELALPSKYVNFLYLASHYEKLKGSPEDNEQKQLFVEQHKHYLDEIIEQISEFSKRVILADANLDKVLSAYNKHRDKPIREQAENIIHLFTLTNLGAPAAFKYFDTTIDRKRYTSTKEVLDATLIHQSITGLYETRIDLSQLGGDGGPAPAPAPAPGGVPWILKKPLELTIKLDLEEQQGTLLNNSILSKKGKEELKQLFEKYSALWQSWENQVGHRRIRPHKIATGTVKPTPQKQYHINPKAKPDIQIVINDLLKQGVLIQKESTMNTPVYPVPKPNGRWRMVLDYRAVNKVTPLIAVQNQHSYGILGSLFKGRYKTTIDLSNGFWAHPIVPEDYWITAFTWQGKQYCWTVLPQGFLNSPGLFTGDVVDLLQGIPNVEVYVDDVYISHDSEKEHLEYLDILFNRLKEAGYIISLKKSNIANSIVDFLGFQITNEGRGLTDTFKEKLENITAPTTLKQLQSILGLLNFARNFIPDFTELIAPLYALIPKSTKNYVPWQIEHSTTLETLITKLNGAEYLQGRKGDKTLIMKVNASYTTGYIRYYNEGEKKPISYVSIVFSKTELKFTELEKLLTTVHKGLLKALDLSMGQNIHVYSPIVSMQNIQKTPQTAKKALASRWLSWLSYLEDPRIRFFYDPQMPALKDLPAVDTGKDNKKHPSNFQHIFYTDGSAITSPTKEGHLNAGMGIVYFINKDGNLQKQQEWSISLGNHTAQFAEIAAFEFALKKCLPLGGNILVVTDSNYVAKAYNEELDVWASNGFVNNRKKPLKHISKWKSVADLKRLRPDVVVTHEPGHQKLDSSPHAYGNNLADQLATQASFKVHAGKRTADGSEFEKRTADGSEFESPKKKAKVE

SEQ ID NO: 783 - protein, 2091 aa, synthetic construct
  source 1..2091: note = Description of Artificial Sequence: Synthetic polypeptide
MPAAKRVKLDGGDKKYSIGLDIGTNSVGWAVITDEYKVPSKKFKVLGNTDRHSIKKNLIGALLFDSGETAEATRLKRTARRRYTRRKNRICYLQEIFSNEMAKVDDSFFHRLEESFLVEEDKKHERHPIFGNIVDEVAYHEKYPTIYHLRKKLVDSTDKADLRLIYLALAHMIKFRGHFLIEGDLNPDNSDVDKLFIQLVQTYNQLFEENPINASGVDAKAILSARLSKSRRLENLIAQLPGEKKNGLFGNLIALSLGLTPNFKSNFDLAEDAKLQLSKDTYDDDLDNLLAQIGDQYADLFLAAKNLSDAILLSDILRVNTEITKAPLSASMIKRYDEHHQDLTLLKALVRQQLPEKYKEIFFDQSKNGYAGYIDGGASQEEFYKFIKPILEKMDGTEELLVKLNREDLLRKQRTFDNGSIPHQIHLGELHAILRRQEDFYPFLKDNREKIEKILTFRIPYYVGPLARGNSRFAWMTRKSEETITPWNFEEVVDKGASAQSFIERMTNFDKNLPNEKVLPKHSLLYEYFTVYNELTKVKYVTEGMRKPAFLSGEQKKAIVDLLFKTNRKVTVKQLKEDYFKKIECFDSVEISGVEDRFNASLGTYHDLLKIIKDKDFLDNEENEDILEDIVLTLTLFEDREMIEERLKTYAHLFDDKVMKQLKRRRYTGWGRLSRKLINGIRDKQSGKTILDFLKSDGFANRNFMQLIHDDSLTFKEDIQKAQVSGQGDSLHEHIANLAGSPAIKKGILQTVKVVDELVKVMGRHKPENIVIEMARENQTTQKGQKNSRERMKRIEEGIKELGSQILKEHPVENTQLQNEKLYLYYLQNGRDMYVDQELDINRLSDYDVDHIVPQSFLKDDSIDNKVLTRSDKARGKSDNVPSEEVVKKMKNYWRQLLNAKLITQRKFDNLTKAERGGLSELDKAGFIKRQLVETRQITKHVAQILDSRMNTKYDENDKLIREVKVITLKSKLVSDFRKDFQFYKVREINNYHHAHDAYLNAVVGTALIKKYPKLESEFVYGDYKVYDVRKMIAKSEQEIGKATAKYFFYSNIMNFFKTEITLANGEIRKRPLIETNGETGEIVWDKGRDFATVRKVLSMPQVNIVKKTEVQTGGFSKESILPKRNSDKLIARKKDWDPKKYGGFDSPTVAYSVLVVAKVEKGKSKKLKSVKELLGITIMERSSFEKNPIDFLEAKGYKEVKKDLIIKLPKYSLFELENGRKRMLASAGELQKGNELALPSKYVNFLYLASHYEKLKGSPEDNEQKQLFVEQHKHYLDEIIEQISEFSKRVILADANLDKVLSAYNKHRDKPIREQAENIIHLFTLTNLGAPAAFKYFDTTIDRKRYTSTKEVLDATLIHQSITGLYETRIDLSQLGGDGGGGSGGSGGSGGSGGSGGVPWILKKPLELTIKLDLEEQQGTLLNNSILSKKGKEELKQLFEKYSALWQSWENQVGHRRIRPHKIATGTVKPTPQKQYHINPKAKPDIQIVINDLLKQGVLIQKESTMNTPVYPVPKPNGRWRMVLDYRAVNKVTPLIAVQNQHSYGILGSLFKGRYKTTIDLSNGFWAHPIVPEDYWITAFTWQGKQYCWTVLPQGFLNSPGLFTGDVVDLLQGIPNVEVYVDDVYISHDSEKEHLEYLDILFNRLKEAGYIISLKKSNIANSIVDFLGFQITNEGRGLTDTFKEKLENITAPTTLKQLQSILGLLNFARNFIPDFTELIAPLYALIPKSTKNYVPWQIEHSTTLETLITKLNGAEYLQGRKGDKTLIMKVNASYTTGYIRYYNEGEKKPISYVSIVFSKTELKFTELEKLLTTVHKGLLKALDLSMGQNIHVYSPIVSMQNIQKTPQTAKKALASRWLSWLSYLEDPRIRFFYDPQMPALKDLPAVDTGKDNKKHPSNFQHIFYTDGSAITSPTKEGHLNAGMGIVYFINKDGNLQKQQEWSISLGNHTAQFAEIAAFEFALKKCLPLGGNILVVTDSNYVAKAYNEELDVWASNGFVNNRKKPLKHISKWKSVADLKRLRPDVVVTHEPGHQKLDSSPHAYGNNLADQLATQASFKVHAGKRTADGSEFEKRTADGSEFESPKKKAKVE

SEQ ID NO: 784 - protein, 2084 aa, synthetic construct
  source 1..2084: note = Description of Artificial Sequence: Synthetic polypeptide
MPAAKRVKLDGGDKKYSIGLDIGTNSVGWAVITDEYKVPSKKFKVLGNTDRHSIKKNLIGALLFDSGETAEATRLKRTARRRYTRRKNRICYLQEIFSNEMAKVDDSFFHRLEESFLVEEDKKHERHPIFGNIVDEVAYHEKYPTIYHLRKKLVDSTDKADLRLIYLALAHMIKFRGHFLIEGDLNPDNSDVDKLFIQLVQTYNQLFEENPINASGVDAKAILSARLSKSRRLENLIAQLPGEKKNGLFGNLIALSLGLTPNFKSNFDLAEDAKLQLSKDTYDDDLDNLLAQIGDQYADLFLAAKNLSDAILLSDILRVNTEITKAPLSASMIKRYDEHHQDLTLLKALVRQQLPEKYKEIFFDQSKNGYAGYIDGGASQEEFYKFIKPILEKMDGTEELLVKLNREDLLRKQRTFDNGSIPHQIHLGELHAILRRQEDFYPFLKDNREKIEKILTFRIPYYVGPLARGNSRFAWMTRKSEETITPWNFEEVVDKGASAQSFIERMTNFDKNLPNEKVLPKHSLLYEYFTVYNELTKVKYVTEGMRKPAFLSGEQKKAIVDLLFKTNRKVTVKQLKEDYFKKIECFDSVEISGVEDRFNASLGTYHDLLKIIKDKDFLDNEENEDILEDIVLTLTLFEDREMIEERLKTYAHLFDDKVMKQLKRRRYTGWGRLSRKLINGIRDKQSGKTILDFLKSDGFANRNFMQLIHDDSLTFKEDIQKAQVSGQGDSLHEHIANLAGSPAIKKGILQTVKVVDELVKVMGRHKPENIVIEMARENQTTQKGQKNSRERMKRIEEGIKELGSQILKEHPVENTQLQNEKLYLYYLQNGRDMYVDQELDINRLSDYDVDHIVPQSFLKDDSIDNKVLTRSDKARGKSDNVPSEEVVKKMKNYWRQLLNAKLITQRKFDNLTKAERGGLSELDKAGFIKRQLVETRQITKHVAQILDSRMNTKYDENDKLIREVKVITLKSKLVSDFRKDFQFYKVREINNYHHAHDAYLNAVVGTALIKKYPKLESEFVYGDYKVYDVRKMIAKSEQEIGKATAKYFFYSNIMNFFKTEITLANGEIRKRPLIETNGETGEIVWDKGRDFATVRKVLSMPQVNIVKKTEVQTGGFSKESILPKRNSDKLIARKKDWDPKKYGGFDSPTVAYSVLVVAKVEKGKSKKLKSVKELLGITIMERSSFEKNPIDFLEAKGYKEVKKDLIIKLPKYSLFELENGRKRMLASAGELQKGNELALPSKYVNFLYLASHYEKLKGSPEDNEQKQLFVEQHKHYLDEIIEQISEFSKRVILADANLDKVLSAYNKHRDKPIREQAENIIHLFTLTNLGAPAAFKYFDTTIDRKRYTSTKEVLDATLIHQSITGLYETRIDLSQLGGDGGEAAAKGGGGGVPWILKKPLELTIKLDLEEQQGTLLNNSILSKKGKEELKQLFEKYSALWQSWENQVGHRRIRPHKIATGTVKPTPQKQYHINPKAKPDIQIVINDLLKQGVLIQKESTMNTPVYPVPKPNGRWRMVLDYRAVNKVTPLIAVQNQHSYGILGSLFKGRYKTTIDLSNGFWAHPIVPEDYWITAFTWQGKQYCWTVLPQGFLNSPGLFTGDVVDLLQGIPNVEVYVDDVYISHDSEKEHLEYLDILFNRLKEAGYIISLKKSNIANSIVDFLGFQITNEGRGLTDTFKEKLENITAPTTLKQLQSILGLLNFARNFIPDFTELIAPLYALIPKSTKNYVPWQIEHSTTLETLITKLNGAEYLQGRKGDKTLIMKVNASYTTGYIRYYNEGEKKPISYVSIVFSKTELKFTELEKLLTTVHKGLLKALDLSMGQNIHVYSPIVSMQNIQKTPQTAKKALASRWLSWLSYLEDPRIRFFYDPQMPALKDLPAVDTGKDNKKHPSNFQHIFYTDGSAITSPTKEGHLNAGMGIVYFINKDGNLQKQQEWSISLGNHTAQFAEIAAFEFALKKCLPLGGNILVVTDSNYVAKAYNEELDVWASNGFVNNRKKPLKHISKWKSVADLKRLRPDVVVTHEPGHQKLDSSPHAYGNNLADQLATQASFKVHAGKRTADGSEFEKRTADGSEFESPKKKAKVE

SEQ ID NO: 785 - protein, 2087 aa, synthetic construct
  source 1..2087: note = Description of Artificial Sequence: Synthetic polypeptide
MPAAKRVKLDGGDKKYSIGLDIGTNSVGWAVITDEYKVPSKKFKVLGNTDRHSIKKNLIGALLFDSGETAEATRLKRTARRRYTRRKNRICYLQEIFSNEMAKVDDSFFHRLEESFLVEEDKKHERHPIFGNIVDEVAYHEKYPTIYHLRKKLVDSTDKADLRLIYLALAHMIKFRGHFLIEGDLNPDNSDVDKLFIQLVQTYNQLFEENPINASGVDAKAILSARLSKSRRLENLIAQLPGEKKNGLFGNLIALSLGLTPNFKSNFDLAEDAKLQLSKDTYDDDLDNLLAQIGDQYADLFLAAKNLSDAILLSDILRVNTEITKAPLSASMIKRYDEHHQDLTLLKALVRQQLPEKYKEIFFDQSKNGYAGYIDGGASQEEFYKFIKPILEKMDGTEELLVKLNREDLLRKQRTFDNGSIPHQIHLGELHAILRRQEDFYPFLKDNREKIEKILTFRIPYYVGPLARGNSRFAWMTRKSEETITPWNFEEVVDKGASAQSFIERMTNFDKNLPNEKVLPKHSLLYEYFTVYNELTKVKYVTEGMRKPAFLSGEQKKAIVDLLFKTNRKVTVKQLKEDYFKKIECFDSVEISGVEDRFNASLGTYHDLLKIIKDKDFLDNEENEDILEDIVLTLTLFEDREMIEERLKTYAHLFDDKVMKQLKRRRYTGWGRLSRKLINGIRDKQSGKTILDFLKSDGFANRNFMQLIHDDSLTFKEDIQKAQVSGQGDSLHEHIANLAGSPAIKKGILQTVKVVDELVKVMGRHKPENIVIEMARENQTTQKGQKNSRERMKRIEEGIKELGSQILKEHPVENTQLQNEKLYLYYLQNGRDMYVDQELDINRLSDYDVDHIVPQSFLKDDSIDNKVLTRSDKARGKSDNVPSEEVVKKMKNYWRQLLNAKLITQRKFDNLTKAERGGLSELDKAGFIKRQLVETRQITKHVAQILDSRMNTKYDENDKLIREVKVITLKSKLVSDFRKDFQFYKVREINNYHHAHDAYLNAVVGTALIKKYPKLESEFVYGDYKVYDVRKMIAKSEQEIGKATAKYFFYSNIMNFFKTEITLANGEIRKRPLIETNGETGEIVWDKGRDFATVRKVLSMPQVNIVKKTEVQTGGFSKESILPKRNSDKLIARKKDWDPKKYGGFDSPTVAYSVLVVAKVEKGKSKKLKSVKELLGITIMERSSFEKNPIDFLEAKGYKEVKKDLIIKLPKYSLFELENGRKRMLASAGELQKGNELALPSKYVNFLYLASHYEKLKGSPEDNEQKQLFVEQHKHYLDEIIEQISEFSKRVILADANLDKVLSAYNKHRDKPIREQAENIIHLFTLTNLGAPAAFKYFDTTIDRKRYTSTKEVLDATLIHQSITGLYETRIDLSQLGGDGGPAPAPAPAPAPGGVPWILKKPLELTIKLDLEEQQGTLLNNSILSKKGKEELKQLFEKYSALWQSWENQVGHRRIRPHKIATGTVKPTPQKQYHINPKAKPDIQIVINDLLKQGVLIQKESTMNTPVYPVPKPNGRWRMVLDYRAVNKVTPLIAVQNQHSYGILGSLFKGRYKTTIDLSNGFWAHPIVPEDYWITAFTWQGKQYCWTVLPQGFLNSPGLFTGDVVDLLQGIPNVEVYVDDVYISHDSEKEHLEYLDILFNRLKEAGYIISLKKSNIANSIVDFLGFQITNEGRGLTDTFKEKLENITAPTTLKQLQSILGLLNFARNFIPDFTELIAPLYALIPKSTKNYVPWQIEHSTTLETLITKLNGAEYLQGRKGDKTLIMKVNASYTTGYIRYYNEGEKKPISYVSIVFSKTELKFTELEKLLTTVHKGLLKALDLSMGQNIHVYSPIVSMQNIQKTPQTAKKALASRWLSWLSYLEDPRIRFFYDPQMPALKDLPAVDTGKDNKKHPSNFQHIFYTDGSAITSPTKEGHLNAGMGIVYFINKDGNLQKQQEWSISLGNHTAQFAEIAAFEFALKKCLPLGGNILVVTDSNYVAKAYNEELDVWASNGFVNNRKKPLKHISKWKSVADLKRLRPDVVVTHEPGHQKLDSSPHAYGNNLADQLATQASFKVHAGKRTADGSEFEKRTADGSEFESPKKKAKVE

SEQ ID NO: 786 - protein, 2085 aa, synthetic construct
  source 1..2085: note = Description of Artificial Sequence: Synthetic polypeptide
MPAAKRVKLDGGDKKYSIGLDIGTNSVGWAVITDEYKVPSKKFKVLGNTDRHSIKKNLIGALLFDSGETAEATRLKRTARRRYTRRKNRICYLQEIFSNEMAKVDDSFFHRLEESFLVEEDKKHERHPIFGNIVDEVAYHEKYPTIYHLRKKLVDSTDKADLRLIYLALAHMIKFRGHFLIEGDLNPDNSDVDKLFIQLVQTYNQLFEENPINASGVDAKAILSARLSKSRRLENLIAQLPGEKKNGLFGNLIALSLGLTPNFKSNFDLAEDAKLQLSKDTYDDDLDNLLAQIGDQYADLFLAAKNLSDAILLSDILRVNTEITKAPLSASMIKRYDEHHQDLTLLKALVRQQLPEKYKEIFFDQSKNGYAGYIDGGASQEEFYKFIKPILEKMDGTEELLVKLNREDLLRKQRTFDNGSIPHQIHLGELHAILRRQEDFYPFLKDNREKIEKILTFRIPYYVGPLARGNSRFAWMTRKSEETITPWNFEEVVDKGASAQSFIERMTNFDKNLPNEKVLPKHSLLYEYFTVYNELTKVKYVTEGMRKPAFLSGEQKKAIVDLLFKTNRKVTVKQLKEDYFKKIECFDSVEISGVEDRFNASLGTYHDLLKIIKDKDFLDNEENEDILEDIVLTLTLFEDREMIEERLKTYAHLFDDKVMKQLKRRRYTGWGRLSRKLINGIRDKQSGKTILDFLKSDGFANRNFMQLIHDDSLTFKEDIQKAQVSGQGDSLHEHIANLAGSPAIKKGILQTVKVVDELVKVMGRHKPENIVIEMARENQTTQKGQKNSRERMKRIEEGIKELGSQILKEHPVENTQLQNEKLYLYYLQNGRDMYVDQELDINRLSDYDVDHIVPQSFLKDDSIDNKVLTRSDKARGKSDNVPSEEVVKKMKNYWRQLLNAKLITQRKFDNLTKAERGGLSELDKAGFIKRQLVETRQITKHVAQILDSRMNTKYDENDKLIREVKVITLKSKLVSDFRKDFQFYKVREINNYHHAHDAYLNAVVGTALIKKYPKLESEFVYGDYKVYDVRKMIAKSEQEIGKATAKYFFYSNIMNFFKTEITLANGEIRKRPLIETNGETGEIVWDKGRDFATVRKVLSMPQVNIVKKTEVQTGGFSKESILPKRNSDKLIARKKDWDPKKYGGFDSPTVAYSVLVVAKVEKGKSKKLKSVKELLGITIMERSSFEKNPIDFLEAKGYKEVKKDLIIKLPKYSLFELENGRKRMLASAGELQKGNELALPSKYVNFLYLASHYEKLKGSPEDNEQKQLFVEQHKHYLDEIIEQISEFSKRVILADANLDKVLSAYNKHRDKPIREQAENIIHLFTLTNLGAPAAFKYFDTTIDRKRYTSTKEVLDATLIHQSITGLYETRIDLSQLGGDGGGGSGGSGGSGGVPWILKKPLELTIKLDLEEQQGTLLNNSILSKKGKEELKQLFEKYSALWQSWENQVGHRRIRPHKIATGTVKPTPQKQYHINPKAKPDIQIVINDLLKQGVLIQKESTMNTPVYPVPKPNGRWRMVLDYRAVNKVTPLIAVQNQHSYGILGSLFKGRYKTTIDLSNGFWAHPIVPEDYWITAFTWQGKQYCWTVLPQGFLNSPGLFTGDVVDLLQGIPNVEVYVDDVYISHDSEKEHLEYLDILFNRLKEAGYIISLKKSNIANSIVDFLGFQITNEGRGLTDTFKEKLENITAPTTLKQLQSILGLLNFARNFIPDFTELIAPLYALIPKSTKNYVPWQIEHSTTLETLITKLNGAEYLQGRKGDKTLIMKVNASYTTGYIRYYNEGEKKPISYVSIVFSKTELKFTELEKLLTTVHKGLLKALDLSMGQNIHVYSPIVSMQNIQKTPQTAKKALASRWLSWLSYLEDPRIRFFYDPQMPALKDLPAVDTGKDNKKHPSNFQHIFYTDGSAITSPTKEGHLNAGMGIVYFINKDGNLQKQQEWSISLGNHTAQFAEIAAFEFALKKCLPLGGNILVVTDSNYVAKAYNEELDVWASNGFVNNRKKPLKHISKWKSVADLKRLRPDVVVTHEPGHQKLDSSPHAYGNNLADQLATQASFKVHAGKRTADGSEFEKRTADGSEFESPKKKAKVE

SEQ ID NO: 787 - protein, 2085 aa, synthetic construct
  source 1..2085: note = Description of Artificial Sequence: Synthetic polypeptide
MPAAKRVKLDGGDKKYSIGLDIGTNSVGWAVITDEYKVPSKKFKVLGNTDRHSIKKNLIGALLFDSGETAEATRLKRTARRRYTRRKNRICYLQEIFSNEMAKVDDSFFHRLEESFLVEEDKKHERHPIFGNIVDEVAYHEKYPTIYHLRKKLVDSTDKADLRLIYLALAHMIKFRGHFLIEGDLNPDNSDVDKLFIQLVQTYNQLFEENPINASGVDAKAILSARLSKSRRLENLIAQLPGEKKNGLFGNLIALSLGLTPNFKSNFDLAEDAKLQLSKDTYDDDLDNLLAQIGDQYADLFLAAKNLSDAILLSDILRVNTEITKAPLSASMIKRYDEHHQDLTLLKALVRQQLPEKYKEIFFDQSKNGYAGYIDGGASQEEFYKFIKPILEKMDGTEELLVKLNREDLLRKQRTFDNGSIPHQIHLGELHAILRRQEDFYPFLKDNREKIEKILTFRIPYYVGPLARGNSRFAWMTRKSEETITPWNFEEVVDKGASAQSFIERMTNFDKNLPNEKVLPKHSLLYEYFTVYNELTKVKYVTEGMRKPAFLSGEQKKAIVDLLFKTNRKVTVKQLKEDYFKKIECFDSVEISGVEDRFNASLGTYHDLLKIIKDKDFLDNEENEDILEDIVLTLTLFEDREMIEERLKTYAHLFDDKVMKQLKRRRYTGWGRLSRKLINGIRDKQSGKTILDFLKSDGFANRNFMQLIHDDSLTFKEDIQKAQVSGQGDSLHEHIANLAGSPAIKKGILQTVKVVDELVKVMGRHKPENIVIEMARENQTTQKGQKNSRERMKRIEEGIKELGSQILKEHPVENTQLQNEKLYLYYLQNGRDMYVDQELDINRLSDYDVDHIVPQSFLKDDSIDNKVLTRSDKARGKSDNVPSEEVVKKMKNYWRQLLNAKLITQRKFDNLTKAERGGLSELDKAGFIKRQLVETRQITKHVAQILDSRMNTKYDENDKLIREVKVITLKSKLVSDFRKDFQFYKVREINNYHHAHDAYLNAVVGTALIKKYPKLESEFVYGDYKVYDVRKMIAKSEQEIGKATAKYFFYSNIMNFFKTEITLANGEIRKRPLIETNGETGEIVWDKGRDFATVRKVLSMPQVNIVKKTEVQTGGFSKESILPKRNSDKLIARKKDWDPKKYGGFDSPTVAYSVLVVAKVEKGKSKKLKSVKELLGITIMERSSFEKNPIDFLEAKGYKEVKKDLIIKLPKYSLFELENGRKRMLASAGELQKGNELALPSKYVNFLYLASHYEKLKGSPEDNEQKQLFVEQHKHYLDEIIEQISEFSKRVILADANLDKVLSAYNKHRDKPIREQAENIIHLFTLTNLGAPAAFKYFDTTIDRKRYTSTKEVLDATLIHQSITGLYETRIDLSQLGGDGGGSSGGSGGGGGVPWILKKPLELTIKLDLEEQQGTLLNNSILSKKGKEELKQLFEKYSALWQSWENQVGHRRIRPHKIATGTVKPTPQKQYHINPKAKPDIQIVINDLLKQGVLIQKESTMNTPVYPVPKPNGRWRMVLDYRAVNKVTPLIAVQNQHSYGILGSLFKGRYKTTIDLSNGFWAHPIVPEDYWITAFTWQGKQYCWTVLPQGFLNSPGLFTGDVVDLLQGIPNVEVYVDDVYISHDSEKEHLEYLDILFNRLKEAGYIISLKKSNIANSIVDFLGFQITNEGRGLTDTFKEKLENITAPTTLKQLQSILGLLNFARNFIPDFTELIAPLYALIPKSTKNYVPWQIEHSTTLETLITKLNGAEYLQGRKGDKTLIMKVNASYTTGYIRYYNEGEKKPISYVSIVFSKTELKFTELEKLLTTVHKGLLKALDLSMGQNIHVYSPIVSMQNIQKTPQTAKKALASRWLSWLSYLEDPRIRFFYDPQMPALKDLPAVDTGKDNKKHPSNFQHIFYTDGSAITSPTKEGHLNAGMGIVYFINKDGNLQKQQEWSISLGNHTAQFAEIAAFEFALKKCLPLGGNILVVTDSNYVAKAYNEELDVWASNGFVNNRKKPLKHISKWKSVADLKRLRPDVVVTHEPGHQKLDSSPHAYGNNLADQLATQASFKVHAGKRTADGSEFEKRTADGSEFESPKKKAKVE

SEQ ID NO: 788 - protein, 2082 aa, synthetic construct
  source 1..2082: note = Description of Artificial Sequence: Synthetic polypeptide
MPAAKRVKLDGGDKKYSIGLDIGTNSVGWAVITDEYKVPSKKFKVLGNTDRHSIKKNLIGALLFDSGETAEATRLKRTARRRYTRRKNRICYLQEIFSNEMAKVDDSFFHRLEESFLVEEDKKHERHPIFGNIVDEVAYHEKYPTIYHLRKKLVDSTDKADLRLIYLALAHMIKFRGHFLIEGDLNPDNSDVDKLFIQLVQTYNQLFEENPINASGVDAKAILSARLSKSRRLENLIAQLPGEKKNGLFGNLIALSLGLTPNFKSNFDLAEDAKLQLSKDTYDDDLDNLLAQIGDQYADLFLAAKNLSDAILLSDILRVNTEITKAPLSASMIKRYDEHHQDLTLLKALVRQQLPEKYKEIFFDQSKNGYAGYIDGGASQEEFYKFIKPILEKMDGTEELLVKLNREDLLRKQRTFDNGSIPHQIHLGELHAILRRQEDFYPFLKDNREKIEKILTFRIPYYVGPLARGNSRFAWMTRKSEETITPWNFEEVVDKGASAQSFIERMTNFDKNLPNEKVLPKHSLLYEYFTVYNELTKVKYVTEGMRKPAFLSGEQKKAIVDLLFKTNRKVTVKQLKEDYFKKIECFDSVEISGVEDRFNASLGTYHDLLKIIKDKDFLDNEENEDILEDIVLTLTLFEDREMIEERLKTYAHLFDDKVMKQLKRRRYTGWGRLSRKLINGIRDKQSGKTILDFLKSDGFANRNFMQLIHDDSLTFKEDIQKAQVSGQGDSLHEHIANLAGSPAIKKGILQTVKVVDELVKVMGRHKPENIVIEMARENQTTQKGQKNSRERMKRIEEGIKELGSQILKEHPVENTQLQNEKLYLYYLQNGRDMYVDQELDINRLSDYDVDHIVPQSFLKDDSIDNKVLTRSDKARGKSDNVPSEEVVKKMKNYWRQLLNAKLITQRKFDNLTKAERGGLSELDKAGFIKRQLVETRQITKHVAQILDSRMNTKYDENDKLIREVKVITLKSKLVSDFRKDFQFYKVREINNYHHAHDAYLNAVVGTALIKKYPKLESEFVYGDYKVYDVRKMIAKSEQEIGKATAKYFFYSNIMNFFKTEITLANGEIRKRPLIETNGETGEIVWDKGRDFATVRKVLSMPQVNIVKKTEVQTGGFSKESILPKRNSDKLIARKKDWDPKKYGGFDSPTVAYSVLVVAKVEKGKSKKLKSVKELLGITIMERSSFEKNPIDFLEAKGYKEVKKDLIIKLPKYSLFELENGRKRMLASAGELQKGNELALPSKYVNFLYLASHYEKLKGSPEDNEQKQLFVEQHKHYLDEIIEQISEFSKRVILADANLDKVLSAYNKHRDKPIREQAENIIHLFTLTNLGAPAAFKYFDTTIDRKRYTSTKEVLDATLIHQSITGLYETRIDLSQLGGDGGGGSGGSGGVPWILKKPLELTIKLDLEEQQGTLLNNSILSKKGKEELKQLFEKYSALWQSWENQVGHRRIRPHKIATGTVKPTPQKQYHINPKAKPDIQIVINDLLKQGVLIQKESTMNTPVYPVPKPNGRWRMVLDYRAVNKVTPLIAVQNQHSYGILGSLFKGRYKTTIDLSNGFWAHPIVPEDYWITAFTWQGKQYCWTVLPQGFLNSPGLFTGDVVDLLQGIPNVEVYVDDVYISHDSEKEHLEYLDILFNRLKEAGYIISLKKSNIANSIVDFLGFQITNEGRGLTDTFKEKLENITAPTTLKQLQSILGLLNFARNFIPDFTELIAPLYALIPKSTKNYVPWQIEHSTTLETLITKLNGAEYLQGRKGDKTLIMKVNASYTTGYIRYYNEGEKKPISYVSIVFSKTELKFTELEKLLTTVHKGLLKALDLSMGQNIHVYSPIVSMQNIQKTPQTAKKALASRWLSWLSYLEDPRIRFFYDPQMPALKDLPAVDTGKDNKKHPSNFQHIFYTDGSAITSPTKEGHLNAGMGIVYFINKDGNLQKQQEWSISLGNHTAQFAEIAAFEFALKKCLPLGGNILVVTDSNYVAKAYNEELDVWASNGFVNNRKKPLKHISKWKSVADLKRLRPDVVVTHEPGHQKLDSSPHAYGNNLADQLATQASFKVHAGKRTADGSEFEKRTADGSEFESPKKKAKVE

SEQ ID NO: 789 - protein, 2073 aa, synthetic construct
  source 1..2073: note = Description of Artificial Sequence: Synthetic polypeptide
MPAAKRVKLDGGDKKYSIGLDIGTNSVGWAVITDEYKVPSKKFKVLGNTDRHSIKKNLIGALLFDSGETAEATRLKRTARRRYTRRKNRICYLQEIFSNEMAKVDDSFFHRLEESFLVEEDKKHERHPIFGNIVDEVAYHEKYPTIYHLRKKLVDSTDKADLRLIYLALAHMIKFRGHFLIEGDLNPDNSDVDKLFIQLVQTYNQLFEENPINASGVDAKAILSARLSKSRRLENLIAQLPGEKKNGLFGNLIALSLGLTPNFKSNFDLAEDAKLQLSKDTYDDDLDNLLAQIGDQYADLFLAAKNLSDAILLSDILRVNTEITKAPLSASMIKRYDEHHQDLTLLKALVRQQLPEKYKEIFFDQSKNGYAGYIDGGASQEEFYKFIKPILEKMDGTEELLVKLNREDLLRKQRTFDNGSIPHQIHLGELHAILRRQEDFYPFLKDNREKIEKILTFRIPYYVGPLARGNSRFAWMTRKSEETITPWNFEEVVDKGASAQSFIERMTNFDKNLPNEKVLPKHSLLYEYFTVYNELTKVKYVTEGMRKPAFLSGEQKKAIVDLLFKTNRKVTVKQLKEDYFKKIECFDSVEISGVEDRFNASLGTYHDLLKIIKDKDFLDNEENEDILEDIVLTLTLFEDREMIEERLKTYAHLFDDKVMKQLKRRRYTGWGRLSRKLINGIRDKQSGKTILDFLKSDGFANRNFMQLIHDDSLTFKEDIQKAQVSGQGDSLHEHIANLAGSPAIKKGILQTVKVVDELVKVMGRHKPENIVIEMARENQTTQKGQKNSRERMKRIEEGIKELGSQILKEHPVENTQLQNEKLYLYYLQNGRDMYVDQELDINRLSDYDVDHIVPQSFLKDDSIDNKVLTRSDKARGKSDNVPSEEVVKKMKNYWRQLLNAKLITQRKFDNLTKAERGGLSELDKAGFIKRQLVETRQITKHVAQILDSRMNTKYDENDKLIREVKVITLKSKLVSDFRKDFQFYKVREINNYHHAHDAYLNAVVGTALIKKYPKLESEFVYGDYKVYDVRKMIAKSEQEIGKATAKYFFYSNIMNFFKTEITLANGEIRKRPLIETNGETGEIVWDKGRDFATVRKVLSMPQVNIVKKTEVQTGGFSKESILPKRNSDKLIARKKDWDPKKYGGFDSPTVAYSVLVVAKVEKGKSKKLKSVKELLGITIMERSSFEKNPIDFLEAKGYKEVKKDLIIKLPKYSLFELENGRKRMLASAGELQKGNELALPSKYVNFLYLASHYEKLKGSPEDNEQKQLFVEQHKHYLDEIIEQISEFSKRVILADANLDKVLSAYNKHRDKPIREQAENIIHLFTLTNLGAPAAFKYFDTTIDRKRYTSTKEVLDATLIHQSITGLYETRIDLSQLGGDGGPAPGGGGSSGGSCQTKNTLNIDEYLLQFPDQLWASLPTDIGRMLVPPITIKIKDNASLPSIRQYPLPKDKTEGLRPLISSLENQGILIKCHSPCNTPIFPIKKAGRDEYRMIHDLRAINNIVAPLTAVVASPTTVLSNLAPSLHWFTVIDLSNAFFSVPIHKDSQYLFAFTFEGHQYTWTVLPQGFIHSPTLFNQALYQSLHKIKFKISSEICIYMDDVLIASKDRDTNLKDTAVMLQHLASEGHKVSKKKLQLCQQEVVYLGQLLTPEGRKILPDRKVTVSQFQQPTTIRQIRAFLGKVGYCRHFIPEFSIHSKFLEKQLKPDTAEPFQLDDQQVEAFNKLKHAITTAPVLVVPDPAKPFQLYTSHSEHASIAVLTQKHAGRTRPIAFLSSKFDAIESGLPPCLKACASIHRSLTQADSFILGAPLIIYTTHAICTLLQRDRSQLVTASRFSKWEADLLRPELTFVACSAVSPAHLYMQSCENNIPPHDCVLLTHTISRPRPDLSDLPIPDPDMTLFSDGSYTTGRGGAAVVMHRPVTDDFIIIHQQPGGASAQTAELLALAAACHLATDKTVNIYTDSRYAYGVVHDFGHLWMHRGFVTSAGTPIKNHKEIEYLLKQIMKPKQVSVIKIEAHTKGVSMEVRGNAAADEAAKNAVFLVQRAGKRTADGSEFEKRTADGSEFESPKKKAKVE

SEQ ID NO: 790 - protein, 2094 aa, synthetic construct
  source 1..2094: note = Description of Artificial Sequence: Synthetic polypeptide
MPAAKRVKLDGGDKKYSIGLDIGTNSVGWAVITDEYKVPSKKFKVLGNTDRHSIKKNLIGALLFDSGETAEATRLKRTARRRYTRRKNRICYLQEIFSNEMAKVDDSFFHRLEESFLVEEDKKHERHPIFGNIVDEVAYHEKYPTIYHLRKKLVDSTDKADLRLIYLALAHMIKFRGHFLIEGDLNPDNSDVDKLFIQLVQTYNQLFEENPINASGVDAKAILSARLSKSRRLENLIAQLPGEKKNGLFGNLIALSLGLTPNFKSNFDLAEDAKLQLSKDTYDDDLDNLLAQIGDQYADLFLAAKNLSDAILLSDILRVNTEITKAPLSASMIKRYDEHHQDLTLLKALVRQQLPEKYKEIFFDQSKNGYAGYIDGGASQEEFYKFIKPILEKMDGTEELLVKLNREDLLRKQRTFDNGSIPHQIHLGELHAILRRQEDFYPFLKDNREKIEKILTFRIPYYVGPLARGNSRFAWMTRKSEETITPWNFEEVVDKGASAQSFIERMTNFDKNLPNEKVLPKHSLLYEYFTVYNELTKVKYVTEGMRKPAFLSGEQKKAIVDLLFKTNRKVTVKQLKEDYFKKIECFDSVEISGVEDRFNASLGTYHDLLKIIKDKDFLDNEENEDILEDIVLTLTLFEDREMIEERLKTYAHLFDDKVMKQLKRRRYTGWGRLSRKLINGIRDKQSGKTILDFLKSDGFANRNFMQLIHDDSLTFKEDIQKAQVSGQGDSLHEHIANLAGSPAIKKGILQTVKVVDELVKVMGRHKPENIVIEMARENQTTQKGQKNSRERMKRIEEGIKELGSQILKEHPVENTQLQNEKLYLYYLQNGRDMYVDQELDINRLSDYDVDHIVPQSFLKDDSIDNKVLTRSDKARGKSDNVPSEEVVKKMKNYWRQLLNAKLITQRKFDNLTKAERGGLSELDKAGFIKRQLVETRQITKHVAQILDSRMNTKYDENDKLIREVKVITLKSKLVSDFRKDFQFYKVREINNYHHAHDAYLNAVVGTALIKKYPKLESEFVYGDYKVYDVRKMIAKSEQEIGKATAKYFFYSNIMNFFKTEITLANGEIRKRPLIETNGETGEIVWDKGRDFATVRKVLSMPQVNIVKKTEVQTGGFSKESILPKRNSDKLIARKKDWDPKKYGGFDSPTVAYSVLVVAKVEKGKSKKLKSVKELLGITIMERSSFEKNPIDFLEAKGYKEVKKDLIIKLPKYSLFELENGRKRMLASAGELQKGNELALPSKYVNFLYLASHYEKLKGSPEDNEQKQLFVEQHKHYLDEIIEQISEFSKRVILADANLDKVLSAYNKHRDKPIREQAENIIHLFTLTNLGAPAAFKYFDTTIDRKRYTSTKEVLDATLIHQSITGLYETRIDLSQLGGDGGGGGEAAAKPAPGGVLNLEEEYRLHEKPVPSSIDPSWLQLFPTVWAERAGMGLANQVPPVVVELRSGASPVAVRQYPMSKEAREGIRPHIQRFLDLGVLVPCQSPWNTPLLPVKKPGTNDYRPVQDLREINKRVQDIHPTVPNPYNLLSSLPPSHTWYSVLDLKDAFFCLKLHPNSQPLFAFEWRDPEKGNTGQLTWTRLPQGFKNSPTLFDEALHRDLAPFRALNPQVVLLQYVDDLLVAAPTYRDCKEGTQKLLQELSKLGYRVSAKKAQLCQKEVTYLGYLLKEGKRWLTPARKATVMKIPPPTTPRQVREFLGTAGFCRLWIPGFASLAAPLYPLTKESIPFIWTEEHQKAFDRIKEALLSAPALALPDLTKPFTLYVDERAGVARGVLTQTLGPWRRPVAYLSKKLDPVASGWPTCLKAVAAVALLLKDADKLTLGQNVTVIASHSLESIVRQPPDRWMTNARMTHYQSLLLNERVSFAPPAVLNPATLLPVESEATPVHRCSEILAEETGTRRDLKDQPLPGVPAWYTDGSSFIAEGKRRAGAAIVDGKRTVWASSLPEGTSAQKAELVALTQALRLAEGKDINIYTDSRYAFATAHIHGAIYKQRGLLTSAGKDIKNKEEILALLEAIHLPKRVAIIHCPGHQKGNDPVATGNRRADEAAKQAALSTRVLAETTKPAGKRTADGSEFEKRTADGSEFESPKKKAKVE

SEQ ID NO: 791 - protein, 2094 aa, synthetic construct
  source 1..2094: note = Description of Artificial Sequence: Synthetic polypeptide
MPAAKRVKLDGGDKKYSIGLDIGTNSVGWAVITDEYKVPSKKFKVLGNTDRHSIKKNLIGALLFDSGETAEATRLKRTARRRYTRRKNRICYLQEIFSNEMAKVDDSFFHRLEESFLVEEDKKHERHPIFGNIVDEVAYHEKYPTIYHLRKKLVDSTDKADLRLIYLALAHMIKFRGHFLIEGDLNPDNSDVDKLFIQLVQTYNQLFEENPINASGVDAKAILSARLSKSRRLENLIAQLPGEKKNGLFGNLIALSLGLTPNFKSNFDLAEDAKLQLSKDTYDDDLDNLLAQIGDQYADLFLAAKNLSDAILLSDILRVNTEITKAPLSASMIKRYDEHHQDLTLLKALVRQQLPEKYKEIFFDQSKNGYAGYIDGGASQEEFYKFIKPILEKMDGTEELLVKLNREDLLRKQRTFDNGSIPHQIHLGELHAILRRQEDFYPFLKDNREKIEKILTFRIPYYVGPLARGNSRFAWMTRKSEETITPWNFEEVVDKGASAQSFIERMTNFDKNLPNEKVLPKHSLLYEYFTVYNELTKVKYVTEGMRKPAFLSGEQKKAIVDLLFKTNRKVTVKQLKEDYFKKIECFDSVEISGVEDRFNASLGTYHDLLKIIKDKDFLDNEENEDILEDIVLTLTLFEDREMIEERLKTYAHLFDDKVMKQLKRRRYTGWGRLSRKLINGIRDKQSGKTILDFLKSDGFANRNFMQLIHDDSLTFKEDIQKAQVSGQGDSLHEHIANLAGSPAIKKGILQTVKVVDELVKVMGRHKPENIVIEMARENQTTQKGQKNSRERMKRIEEGIKELGSQILKEHPVENTQLQNEKLYLYYLQNGRDMYVDQELDINRLSDYDVDHIVPQSFLKDDSIDNKVLTRSDKARGKSDNVPSEEVVKKMKNYWRQLLNAKLITQRKFDNLTKAERGGLSELDKAGFIKRQLVETRQITKHVAQILDSRMNTKYDENDKLIREVKVITLKSKLVSDFRKDFQFYKVREINNYHHAHDAYLNAVVGTALIKKYPKLESEFVYGDYKVYDVRKMIAKSEQEIGKATAKYFFYSNIMNFFKTEITLANGEIRKRPLIETNGETGEIVWDKGRDFATVRKVLSMPQVNIVKKTEVQTGGFSKESILPKRNSDKLIARKKDWDPKKYGGFDSPTVAYSVLVVAKVEKGKSKKLKSVKELLGITIMERSSFEKNPIDFLEAKGYKEVKKDLIIKLPKYSLFELENGRKRMLASAGELQKGNELALPSKYVNFLYLASHYEKLKGSPEDNEQKQLFVEQHKHYLDEIIEQISEFSKRVILADANLDKVLSAYNKHRDKPIREQAENIIHLFTLTNLGAPAAFKYFDTTIDRKRYTSTKEVLDATLIHQSITGLYETRIDLSQLGGDGGGSSGGGEAAAKGGVLNLEEEYRLHEKPVPSSIDPSWLQLFPTVWAERAGMGLANQVPPVVVELRSGASPVAVRQYPMSKEAREGIRPHIQRFLDLGVLVPCQSPWNTPLLPVKKPGTNDYRPVQDLREINKRVQDIHPTVPNPYNLLSSLPPSHTWYSVLDLKDAFFCLKLHPNSQPLFAFEWRDPEKGNTGQLTWTRLPQGFKNSPTLFDEALHRDLAPFRALNPQVVLLQYVDDLLVAAPTYRDCKEGTQKLLQELSKLGYRVSAKKAQLCQKEVTYLGYLLKEGKRWLTPARKATVMKIPPPTTPRQVREFLGTAGFCRLWIPGFASLAAPLYPLTKESIPFIWTEEHQKAFDRIKEALLSAPALALPDLTKPFTLYVDERAGVARGVLTQTLGPWRRPVAYLSKKLDPVASGWPTCLKAVAAVALLLKDADKLTLGQNVTVIASHSLESIVRQPPDRWMTNARMTHYQSLLLNERVSFAPPAVLNPATLLPVESEATPVHRCSEILAEETGTRRDLKDQPLPGVPAWYTDGSSFIAEGKRRAGAAIVDGKRTVWASSLPEGTSAQKAELVALTQALRLAEGKDINIYTDSRYAFATAHIHGAIYKQRGLLTSAGKDIKNKEEILALLEAIHLPKRVAIIHCPGHQKGNDPVATGNRRADEAAKQAALSTRVLAETTKPAGKRTADGSEFEKRTADGSEFESPKKKAKVE

SEQ ID NO: 792 - protein, 2092 aa, synthetic construct
  source 1..2092: note = Description of Artificial Sequence: Synthetic polypeptide
MPAAKRVKLDGGDKKYSIGLDIGTNSVGWAVITDEYKVPSKKFKVLGNTDRHSIKKNLIGALLFDSGETAEATRLKRTARRRYTRRKNRICYLQEIFSNEMAKVDDSFFHRLEESFLVEEDKKHERHPIFGNIVDEVAYHEKYPTIYHLRKKLVDSTDKADLRLIYLALAHMIKFRGHFLIEGDLNPDNSDVDKLFIQLVQTYNQLFEENPINASGVDAKAILSARLSKSRRLENLIAQLPGEKKNGLFGNLIALSLGLTPNFKSNFDLAEDAKLQLSKDTYDDDLDNLLAQIGDQYADLFLAAKNLSDAILLSDILRVNTEITKAPLSASMIKRYDEHHQDLTLLKALVRQQLPEKYKEIFFDQSKNGYAGYIDGGASQEEFYKFIKPILEKMDGTEELLVKLNREDLLRKQRTFDNGSIPHQIHLGELHAILRRQEDFYPFLKDNREKIEKILTFRIPYYVGPLARGNSRFAWMTRKSEETITPWNFEEVVDKGASAQSFIERMTNFDKNLPNEKVLPKHSLLYEYFTVYNELTKVKYVTEGMRKPAFLSGEQKKAIVDLLFKTNRKVTVKQLKEDYFKKIECFDSVEISGVEDRFNASLGTYHDLLKIIKDKDFLDNEENEDILEDIVLTLTLFEDREMIEERLKTYAHLFDDKVMKQLKRRRYTGWGRLSRKLINGIRDKQSGKTILDFLKSDGFANRNFMQLIHDDSLTFKEDIQKAQVSGQGDSLHEHIANLAGSPAIKKGILQTVKVVDELVKVMGRHKPENIVIEMARENQTTQKGQKNSRERMKRIEEGIKELGSQILKEHPVENTQLQNEKLYLYYLQNGRDMYVDQELDINRLSDYDVDHIVPQSFLKDDSIDNKVLTRSDKARGKSDNVPSEEVVKKMKNYWRQLLNAKLITQRKFDNLTKAERGGLSELDKAGFIKRQLVETRQITKHVAQILDSRMNTKYDENDKLIREVKVITLKSKLVSDFRKDFQFYKVREINNYHHAHDAYLNAVVGTALIKKYPKLESEFVYGDYKVYDVRKMIAKSEQEIGKATAKYFFYSNIMNFFKTEITLANGEIRKRPLIETNGETGEIVWDKGRDFATVRKVLSMPQVNIVKKTEVQTGGFSKESILPKRNSDKLIARKKDWDPKKYGGFDSPTVAYSVLVVAKVEKGKSKKLKSVKELLGITIMERSSFEKNPIDFLEAKGYKEVKKDLIIKLPKYSLFELENGRKRMLASAGELQKGNELALPSKYVNFLYLASHYEKLKGSPEDNEQKQLFVEQHKHYLDEIIEQISEFSKRVILADANLDKVLSAYNKHRDKPIREQAENIIHLFTLTNLGAPAAFKYFDTTIDRKRYTSTKEVLDATLIHQSITGLYETRIDLSQLGGDGGGGSGGGGSSGGVLNLEEEYRLHEKPVPSSIDPSWLQLFPTVWAERAGMGLANQVPPVVVELRSGASPVAVRQYPMSKEAREGIRPHIQRFLDLGVLVPCQSPWNTPLLPVKKPGTNDYRPVQDLREINKRVQDIHPTVPNPYNLLSSLPPSHTWYSVLDLKDAFFCLKLHPNSQPLFAFEWRDPEKGNTGQLTWTRLPQGFKNSPTLFDEALHRDLAPFRALNPQVVLLQYVDDLLVAAPTYRDCKEGTQKLLQELSKLGYRVSAKKAQLCQKEVTYLGYLLKEGKRWLTPARKATVMKIPPPTTPRQVREFLGTAGFCRLWIPGFASLAAPLYPLTKESIPFIWTEEHQKAFDRIKEALLSAPALALPDLTKPFTLYVDERAGVARGVLTQTLGPWRRPVAYLSKKLDPVASGWPTCLKAVAAVALLLKDADKLTLGQNVTVIASHSLESIVRQPPDRWMTNARMTHYQSLLLNERVSFAPPAVLNPATLLPVESEATPVHRCSEILAEETGTRRDLKDQPLPGVPAWYTDGSSFIAEGKRRAGAAIVDGKRTVWASSLPEGTSAQKAELVALTQALRLAEGKDINIYTDSRYAFATAHIHGAIYKQRGLLTSAGKDIKNKEEILALLEAIHLPKRVAIIHCPGHQKGNDPVATGNRRADEAAKQAALSTRVLAETTKPAGKRTADGSEFEKRTADGSEFESPKKKAKVE

SEQ ID NO: 793 - protein, 2094 aa, synthetic construct
  source 1..2094: note = Description of Artificial Sequence: Synthetic polypeptide
MPAAKRVKLDGGDKKYSIGLDIGTNSVGWAVITDEYKVPSKKFKVLGNTDRHSIKKNLIGALLFDSGETAEATRLKRTARRRYTRRKNRICYLQEIFSNEMAKVDDSFFHRLEESFLVEEDKKHERHPIFGNIVDEVAYHEKYPTIYHLRKKLVDSTDKADLRLIYLALAHMIKFRGHFLIEGDLNPDNSDVDKLFIQLVQTYNQLFEENPINASGVDAKAILSARLSKSRRLENLIAQLPGEKKNGLFGNLIALSLGLTPNFKSNFDLAEDAKLQLSKDTYDDDLDNLLAQIGDQYADLFLAAKNLSDAILLSDILRVNTEITKAPLSASMIKRYDEHHQDLTLLKALVRQQLPEKYKEIFFDQSKNGYAGYIDGGASQEEFYKFIKPILEKMDGTEELLVKLNREDLLRKQRTFDNGSIPHQIHLGELHAILRRQEDFYPFLKDNREKIEKILTFRIPYYVGPLARGNSRFAWMTRKSEETITPWNFEEVVDKGASAQSFIERMTNFDKNLPNEKVLPKHSLLYEYFTVYNELTKVKYVTEGMRKPAFLSGEQKKAIVDLLFKTNRKVTVKQLKEDYFKKIECFDSVEISGVEDRFNASLGTYHDLLKIIKDKDFLDNEENEDILEDIVLTLTLFEDREMIEERLKTYAHLFDDKVMKQLKRRRYTGWGRLSRKLINGIRDKQSGKTILDFLKSDGFANRNFMQLIHDDSLTFKEDIQKAQVSGQGDSLHEHIANLAGSPAIKKGILQTVKVVDELVKVMGRHKPENIVIEMARENQTTQKGQKNSRERMKRIEEGIKELGSQILKEHPVENTQLQNEKLYLYYLQNGRDMYVDQELDINRLSDYDVDHIVPQSFLKDDSIDNKVLTRSDKARGKSDNVPSEEVVKKMKNYWRQLLNAKLITQRKFDNLTKAERGGLSELDKAGFIKRQLVETRQITKHVAQILDSRMNTKYDENDKLIREVKVITLKSKLVSDFRKDFQFYKVREINNYHHAHDAYLNAVVGTALIKKYPKLESEFVYGDYKVYDVRKMIAKSEQEIGKATAKYFFYSNIMNFFKTEITLANGEIRKRPLIETNGETGEIVWDKGRDFATVRKVLSMPQVNIVKKTEVQTGGFSKESILPKRNSDKLIARKKDWDPKKYGGFDSPTVAYSVLVVAKVEKGKSKKLKSVKELLGITIMERSSFEKNPIDFLEAKGYKEVKKDLIIKLPKYSLFELENGRKRMLASAGELQKGNELALPSKYVNFLYLASHYEKLKGSPEDNEQKQLFVEQHKHYLDEIIEQISEFSKRVILADANLDKVLSAYNKHRDKPIREQAENIIHLFTLTNLGAPAAFKYFDTTIDRKRYTSTKEVLDATLIHQSITGLYETRIDLSQLGGDGGPAPGSSEAAAKGGVLNLEEEYRLHEKPVPSSIDPSWLQLFPTVWAERAGMGLANQVPPVVVELRSGASPVAVRQYPMSKEAREGIRPHIQRFLDLGVLVPCQSPWNTPLLPVKKPGTNDYRPVQDLREINKRVQDIHPTVPNPYNLLSSLPPSHTWYSVLDLKDAFFCLKLHPNSQPLFAFEWRDPEKGNTGQLTWTRLPQGFKNSPTLFDEALHRDLAPFRALNPQVVLLQYVDDLLVAAPTYRDCKEGTQKLLQELSKLGYRVSAKKAQLCQKEVTYLGYLLKEGKRWLTPARKATVMKIPPPTTPRQVREFLGTAGFCRLWIPGFASLAAPLYPLTKESIPFIWTEEHQKAFDRIKEALLSAPALALPDLTKPFTLYVDERAGVARGVLTQTLGPWRRPVAYLSKKLDPVASGWPTCLKAVAAVALLLKDADKLTLGQNVTVIASHSLESIVRQPPDRWMTNARMTHYQSLLLNERVSFAPPAVLNPATLLPVESEATPVHRCSEILAEETGTRRDLKDQPLPGVPAWYTDGSSFIAEGKRRAGAAIVDGKRTVWASSLPEGTSAQKAELVALTQALRLAEGKDINIYTDSRYAFATAHIHGAIYKQRGLLTSAGKDIKNKEEILALLEAIHLPKRVAIIHCPGHQKGNDPVATGNRRADEAAKQAALSTRVLAETTKPAGKRTADGSEFEKRTADGSEFESPKKKAKVE

SEQ ID NO: 794 - protein, 2092 aa, synthetic construct
  source 1..2092: note = Description of Artificial Sequence: Synthetic polypeptide
MPAAKRVKLDGGDKKYSIGLDIGTNSVGWAVITDEYKVPSKKFKVLGNTDRHSIKKNLIGALLFDSGETAEATRLKRTARRRYTRRKNRICYLQEIFSNEMAKVDDSFFHRLEESFLVEEDKKHERHPIFGNIVDEVAYHEKYPTIYHLRKKLVDSTDKADLRLIYLALAHMIKFRGHFLIEGDLNPDNSDVDKLFIQLVQTYNQLFEENPINASGVDAKAILSARLSKSRRLENLIAQLPGEKKNGLFGNLIALSLGLTPNFKSNFDLAEDAKLQLSKDTYDDDLDNLLAQIGDQYADLFLAAKNLSDAILLSDILRVNTEITKAPLSASMIKRYDEHHQDLTLLKALVRQQLPEKYKEIFFDQSKNGYAGYIDGGASQEEFYKFIKPILEKMDGTEELLVKLNREDLLRKQRTFDNGSIPHQIHLGELHAILRRQEDFYPFLKDNREKIEKILTFRIPYYVGPLARGNSRFAWMTRKSEETITPWNFEEVVDKGASAQSFIERMTNFDKNLPNEKVLPKHSLLYEYFTVYNELTKVKYVTEGMRKPAFLSGEQKKAIVDLLFKTNRKVTVKQLKEDYFKKIECFDSVEISGVEDRFNASLGTYHDLLKIIKDKDFLDNEENEDILEDIVLTLTLFEDREMIEERLKTYAHLFDDKVMKQLKRRRYTGWGRLSRKLINGIRDKQSGKTILDFLKSDGFANRNFMQLIHDDSLTFKEDIQKAQVSGQGDSLHEHIANLAGSPAIKKGILQTVKVVDELVKVMGRHKPENIVIEMARENQTTQKGQKNSRERMKRIEEGIKELGSQILKEHPVENTQLQNEKLYLYYLQNGRDMYVDQELDINRLSDYDVDHIVPQSFLKDDSIDNKVLTRSDKARGKSDNVPSEEVVKKMKNYWRQLLNAKLITQRKFDNLTKAERGGLSELDKAGFIKRQLVETRQITKHVAQILDSRMNTKYDENDKLIREVKVITLKSKLVSDFRKDFQFYKVREINNYHHAHDAYLNAVVGTALIKKYPKLESEFVYGDYKVYDVRKMIAKSEQEIGKATAKYFFYSNIMNFFKTEITLANGEIRKRPLIETNGETGEIVWDKGRDFATVRKVLSMPQVNIVKKTEVQTGGFSKESILPKRNSDKLIARKKDWDPKKYGGFDSPTVAYSVLVVAKVEKGKSKKLKSVKELLGITIMERSSFEKNPIDFLEAKGYKEVKKDLIIKLPKYSLFELENGRKRMLASAGELQKGNELALPSKYVNFLYLASHYEKLKGSPEDNEQKQLFVEQHKHYLDEIIEQISEFSKRVILADANLDKVLSAYNKHRDKPIREQAENIIHLFTLTNLGAPAAFKYFDTTIDRKRYTSTKEVLDATLIHQSITGLYETRIDLSQLGGDGGGGSGSSPAPGGVLNLEEEYRLHEKPVPSSIDPSWLQLFPTVWAERAGMGLANQVPPVVVELRSGASPVAVRQYPMSKEAREGIRPHIQRFLDLGVLVPCQSPWNTPLLPVKKPGTNDYRPVQDLREINKRVQDIHPTVPNPYNLLSSLPPSHTWYSVLDLKDAFFCLKLHPNSQPLFAFEWRDPEKGNTGQLTWTRLPQGFKNSPTLFDEALHRDLAPFRALNPQVVLLQYVDDLLVAAPTYRDCKEGTQKLLQELSKLGYRVSAKKAQLCQKEVTYLGYLLKEGKRWLTPARKATVMKIPPPTTPRQVREFLGTAGFCRLWIPGFASLAAPLYPLTKESIPFIWTEEHQKAFDRIKEALLSAPALALPDLTKPFTLYVDERAGVARGVLTQTLGPWRRPVAYLSKKLDPVASGWPTCLKAVAAVALLLKDADKLTLGQNVTVIASHSLESIVRQPPDRWMTNARMTHYQSLLLNERVSFAPPAVLNPATLLPVESEATPVHRCSEILAEETGTRRDLKDQPLPGVPAWYTDGSSFIAEGKRRAGAAIVDGKRTVWASSLPEGTSAQKAELVALTQALRLAEGKDINIYTDSRYAFATAHIHGAIYKQRGLLTSAGKDIKNKEEILALLEAIHLPKRVAIIHCPGHQKGNDPVATGNRRADEAAKQAALSTRVLAETTKPAGKRTADGSEFEKRTADGSEFESPKKKAKVE

SEQ ID NO: 795 - protein, 2096 aa, synthetic construct
  source 1..2096: note = Description of Artificial Sequence: Synthetic polypeptide
MPAAKRVKLDGGDKKYSIGLDIGTNSVGWAVITDEYKVPSKKFKVLGNTDRHSIKKNLIGALLFDSGETAEATRLKRTARRRYTRRKNRICYLQEIFSNEMAKVDDSFFHRLEESFLVEEDKKHERHPIFGNIVDEVAYHEKYPTIYHLRKKLVDSTDKADLRLIYLALAHMIKFRGHFLIEGDLNPDNSDVDKLFIQLVQTYNQLFEENPINASGVDAKAILSARLSKSRRLENLIAQLPGEKKNGLFGNLIALSLGLTPNFKSNFDLAEDAKLQLSKDTYDDDLDNLLAQIGDQYADLFLAAKNLSDAILLSDILRVNTEITKAPLSASMIKRYDEHHQDLTLLKALVRQQLPEKYKEIFFDQSKNGYAGYIDGGASQEEFYKFIKPILEKMDGTEELLVKLNREDLLRKQRTFDNGSIPHQIHLGELHAILRRQEDFYPFLKDNREKIEKILTFRIPYYVGPLARGNSRFAWMTRKSEETITPWNFEEVVDKGASAQSFIERMTNFDKNLPNEKVLPKHSLLYEYFTVYNELTKVKYVTEGMRKPAFLSGEQKKAIVDLLFKTNRKVTVKQLKEDYFKKIECFDSVEISGVEDRFNASLGTYHDLLKIIKDKDFLDNEENEDILEDIVLTLTLFEDREMIEERLKTYAHLFDDKVMKQLKRRRYTGWGRLSRKLINGIRDKQSGKTILDFLKSDGFANRNFMQLIHDDSLTFKEDIQKAQVSGQGDSLHEHIANLAGSPAIKKGILQTVKVVDELVKVMGRHKPENIVIEMARENQTTQKGQKNSRERMKRIEEGIKELGSQILKEHPVENTQLQNEKLYLYYLQNGRDMYVDQELDINRLSDYDVDHIVPQSFLKDDSIDNKVLTRSDKARGKSDNVPSEEVVKKMKNYWRQLLNAKLITQRKFDNLTKAERGGLSELDKAGFIKRQLVETRQITKHVAQILDSRMNTKYDENDKLIREVKVITLKSKLVSDFRKDFQFYKVREINNYHHAHDAYLNAVVGTALIKKYPKLESEFVYGDYKVYDVRKMIAKSEQEIGKATAKYFFYSNIMNFFKTEITLANGEIRKRPLIETNGETGEIVWDKGRDFATVRKVLSMPQVNIVKKTEVQTGGFSKESILPKRNSDKLIARKKDWDPKKYGGFDSPTVAYSVLVVAKVEKGKSKKLKSVKELLGITIMERSSFEKNPIDFLEAKGYKEVKKDLIIKLPKYSLFELENGRKRMLASAGELQKGNELALPSKYVNFLYLASHYEKLKGSPEDNEQKQLFVEQHKHYLDEIIEQISEFSKRVILADANLDKVLSAYNKHRDKPIREQAENIIHLFTLTNLGAPAAFKYFDTTIDRKRYTSTKEVLDATLIHQSITGLYETRIDLSQLGGDGGPAPAPAPAPAPAPGGVLNLEEEYRLHEKPVPSSIDPSWLQLFPTVWAERAGMGLANQVPPVVVELRSGASPVAVRQYPMSKEAREGIRPHIQRFLDLGVLVPCQSPWNTPLLPVKKPGTNDYRPVQDLREINKRVQDIHPTVPNPYNLLSSLPPSHTWYSVLDLKDAFFCLKLHPNSQPLFAFEWRDPEKGNTGQLTWTRLPQGFKNSPTLFDEALHRDLAPFRALNPQVVLLQYVDDLLVAAPTYRDCKEGTQKLLQELSKLGYRVSAKKAQLCQKEVTYLGYLLKEGKRWLTPARKATVMKIPPPTTPRQVREFLGTAGFCRLWIPGFASLAAPLYPLTKESIPFIWTEEHQKAFDRIKEALLSAPALALPDLTKPFTLYVDERAGVARGVLTQTLGPWRRPVAYLSKKLDPVASGWPTCLKAVAAVALLLKDADKLTLGQNVTVIASHSLESIVRQPPDRWMTNARMTHYQSLLLNERVSFAPPAVLNPATLLPVESEATPVHRCSEILAEETGTRRDLKDQPLPGVPAWYTDGSSFIAEGKRRAGAAIVDGKRTVWASSLPEGTSAQKAELVALTQALRLAEGKDINIYTDSRYAFATAHIHGAIYKQRGLLTSAGKDIKNKEEILALLEAIHLPKRVAIIHCPGHQKGNDPVATGNRRADEAAKQAALSTRVLAETTKPAGKRTADGSEFEKRTADGSEFESPKKKAKVE

SEQ ID NO: 796 - protein, 2094 aa, synthetic construct
  source 1..2094: note = Description of Artificial Sequence: Synthetic polypeptide
MPAAKRVKLDGGDKKYSIGLDIGTNSVGWAVITDEYKVPSKKFKVLGNTDRHSIKKNLIGALLFDSGETAEATRLKRTARRRYTRRKNRICYLQEIFSNEMAKVDDSFFHRLEESFLVEEDKKHERHPIFGNIVDEVAYHEKYPTIYHLRKKLVDSTDKADLRLIYLALAHMIKFRGHFLIEGDLNPDNSDVDKLFIQLVQTYNQLFEENPINASGVDAKAILSARLSKSRRLENLIAQLPGEKKNGLFGNLIALSLGLTPNFKSNFDLAEDAKLQLSKDTYDDDLDNLLAQIGDQYADLFLAAKNLSDAILLSDILRVNTEITKAPLSASMIKRYDEHHQDLTLLKALVRQQLPEKYKEIFFDQSKNGYAGYIDGGASQEEFYKFIKPILEKMDGTEELLVKLNREDLLRKQRTFDNGSIPHQIHLGELHAILRRQEDFYPFLKDNREKIEKILTFRIPYYVGPLARGNSRFAWMTRKSEETITPWNFEEVVDKGASAQSFIERMTNFDKNLPNEKVLPKHSLLYEYFTVYNELTKVKYVTEGMRKPAFLSGEQKKAIVDLLFKTNRKVTVKQLKEDYFKKIECFDSVEISGVEDRFNASLGTYHDLLKIIKDKDFLDNEENEDILEDIVLTLTLFEDREMIEERLKTYAHLFDDKVMKQLKRRRYTGWGRLSRKLINGIRDKQSGKTILDFLKSDGFANRNFMQLIHDDSLTFKEDIQKAQVSGQGDSLHEHIANLAGSPAIKKGILQTVKVVDELVKVMGRHKPENIVIEMARENQTTQKGQKNSRERMKRIEEGIKELGSQILKEHPVENTQLQNEKLYLYYLQNGRDMYVDQELDINRLSDYDVDHIVPQSFLKDDSIDNKVLTRSDKARGKSDNVPSEEVVKKMKNYWRQLLNAKLITQRKFDNLTKAERGGLSELDKAGFIKRQLVETRQITKHVAQILDSRMNTKYDENDKLIREVKVITLKSKLVSDFRKDFQFYKVREINNYHHAHDAYLNAVVGTALIKKYPKLESEFVYGDYKVYDVRKMIAKSEQEIGKATAKYFFYSNIMNFFKTEITLANGEIRKRPLIETNGETGEIVWDKGRDFATVRKVLSMPQVNIVKKTEVQTGGFSKESILPKRNSDKLIARKKDWDPKKYGGFDSPTVAYSVLVVAKVEKGKSKKLKSVKELLGITIMERSSFEKNPIDFLEAKGYKEVKKDLIIKLPKYSLFELENGRKRMLASAGELQKGNELALPSKYVNFLYLASHYEKLKGSPEDNEQKQLFVEQHKHYLDEIIEQISEFSKRVILADANLDKVLSAYNKHRDKPIREQAENIIHLFTLTNLGAPAAFKYFDTTIDRKRYTSTKEVLDATLIHQSITGLYETRIDLSQLGGDGGGGSGGGEAAAKGGVLNLEEEYRLHEKPVPSSIDPSWLQLFPTVWAERAGMGLANQVPPVVVELRSGASPVAVRQYPMSKEAREGIRPHIQRFLDLGVLVPCQSPWNTPLLPVKKPGTNDYRPVQDLREINKRVQDIHPTVPNPYNLLSSLPPSHTWYSVLDLKDAFFCLKLHPNSQPLFAFEWRDPEKGNTGQLTWTRLPQGFKNSPTLFDEALHRDLAPFRALNPQVVLLQYVDDLLVAAPTYRDCKEGTQKLLQELSKLGYRVSAKKAQLCQKEVTYLGYLLKEGKRWLTPARKATVMKIPPPTTPRQVREFLGTAGFCRLWIPGFASLAAPLYPLTKESIPFIWTEEHQKAFDRIKEALLSAPALALPDLTKPFTLYVDERAGVARGVLTQTLGPWRRPVAYLSKKLDPVASGWPTCLKAVAAVALLLKDADKLTLGQNVTVIASHSLESIVRQPPDRWMTNARMTHYQSLLLNERVSFAPPAVLNPATLLPVESEATPVHRCSEILAEETGTRRDLKDQPLPGVPAWYTDGSSFIAEGKRRAGAAIVDGKRTVWASSLPEGTSAQKAELVALTQALRLAEGKDINIYTDSRYAFATAHIHGAIYKQRGLLTSAGKDIKNKEEILALLEAIHLPKRVAIIHCPGHQKGNDPVATGNRRADEAAKQAALSTRVLAETTKPAGKRTADGSEFEKRTADGSEFESPKKKAKVE

SEQ ID NO: 797 - protein, 2092 aa, synthetic construct
  source 1..2092: note = Description of Artificial Sequence: Synthetic polypeptide
MPAAKRVKLDGGDKKYSIGLDIGTNSVGWAVITDEYKVPSKKFKVLGNTDRHSIKKNLIGALLFDSGETAEATRLKRTARRRYTRRKNRICYLQEIFSNEMAKVDDSFFHRLEESFLVEEDKKHERHPIFGNIVDEVAYHEKYPTIYHLRKKLVDSTDKADLRLIYLALAHMIKFRGHFLIEGDLNPDNSDVDKLFIQLVQTYNQLFEENPINASGVDAKAILSARLSKSRRLENLIAQLPGEKKNGLFGNLIALSLGLTPNFKSNFDLAEDAKLQLSKDTYDDDLDNLLAQIGDQYADLFLAAKNLSDAILLSDILRVNTEITKAPLSASMIKRYDEHHQDLTLLKALVRQQLPEKYKEIFFDQSKNGYAGYIDGGASQEEFYKFIKPILEKMDGTEELLVKLNREDLLRKQRTFDNGSIPHQIHLGELHAILRRQEDFYPFLKDNREKIEKILTFRIPYYVGPLARGNSRFAWMTRKSEETITPWNFEEVVDKGASAQSFIERMTNFDKNLPNEKVLPKHSLLYEYFTVYNELTKVKYVTEGMRKPAFLSGEQKKAIVDLLFKTNRKVTVKQLKEDYFKKIECFDSVEISGVEDRFNASLGTYHDLLKIIKDKDFLDNEENEDILEDIVLTLTLFEDREMIEERLKTYAHLFDDKVMKQLKRRRYTGWGRLSRKLINGIRDKQSGKTILDFLKSDGFANRNFMQLIHDDSLTFKEDIQKAQVSGQGDSLHEHIANLAGSPAIKKGILQTVKVVDELVKVMGRHKPENIVIEMARENQTTQKGQKNSRERMKRIEEGIKELGSQILKEHPVENTQLQNEKLYLYYLQNGRDMYVDQELDINRLSDYDVDHIVPQSFLKDDSIDNKVLTRSDKARGKSDNVPSEEVVKKMKNYWRQLLNAKLITQRKFDNLTKAERGGLSELDKAGFIKRQLVETRQITKHVAQILDSRMNTKYDENDKLIREVKVITLKSKLVSDFRKDFQFYKVREINNYHHAHDAYLNAVVGTALIKKYPKLESEFVYGDYKVYDVRKMIAKSEQEIGKATAKYFFYSNIMNFFKTEITLANGEIRKRPLIETNGETGEIVWDKGRDFATVRKVLSMPQVNIVKKTEVQTGGFSKESILPKRNSDKLIARKKDWDPKKYGGFDSPTVAYSVLVVAKVEKGKSKKLKSVKELLGITIMERSSFEKNPIDFLEAKGYKEVKKDLIIKLPKYSLFELENGRKRMLASAGELQKGNELALPSKYVNFLYLASHYEKLKGSPEDNEQKQLFVEQHKHYLDEIIEQISEFSKRVILADANLDKVLSAYNKHRDKPIREQAENIIHLFTLTNLGAPAAFKYFDTTIDRKRYTSTKEVLDATLIHQSITGLYETRIDLSQLGGDGGGGGPAPGSSGGVLNLEEEYRLHEKPVPSSIDPSWLQLFPTVWAERAGMGLANQVPPVVVELRSGASPVAVRQYPMSKEAREGIRPHIQRFLDLGVLVPCQSPWNTPLLPVKKPGTNDYRPVQDLREINKRVQDIHPTVPNPYNLLSSLPPSHTWYSVLDLKDAFFCLKLHPNSQPLFAFEWRDPEKGNTGQLTWTRLPQGFKNSPTLFDEALHRDLAPFRALNPQVVLLQYVDDLLVAAPTYRDCKEGTQKLLQELSKLGYRVSAKKAQLCQKEVTYLGYLLKEGKRWLTPARKATVMKIPPPTTPRQVREFLGTAGFCRLWIPGFASLAAPLYPLTKESIPFIWTEEHQKAFDRIKEALLSAPALALPDLTKPFTLYVDERAGVARGVLTQTLGPWRRPVAYLSKKLDPVASGWPTCLKAVAAVALLLKDADKLTLGQNVTVIASHSLESIVRQPPDRWMTNARMTHYQSLLLNERVSFAPPAVLNPATLLPVESEATPVHRCSEILAEETGTRRDLKDQPLPGVPAWYTDGSSFIAEGKRRAGAAIVDGKRTVWASSLPEGTSAQKAELVALTQALRLAEGKDINIYTDSRYAFATAHIHGAIYKQRGLLTSAGKDIKNKEEILALLEAIHLPKRVAIIHCPGHQKGNDPVATGNRRADEAAKQAALSTRVLAETTKPAGKRTADGSEFEKRTADGSEFESPKKKAKVE

SEQ ID NO: 798 - protein, 2094 aa, synthetic construct
  source 1..2094: note = Description of Artificial Sequence: Synthetic polypeptide
MPAAKRVKLDGGDKKYSIGLDIGTNSVGWAVITDEYKVPSKKFKVLGNTDRHSIKKNLIGALLFDSGETAEATRLKRTARRRYTRRKNRICYLQEIFSNEMAKVDDSFFHRLEESFLVEEDKKHERHPIFGNIVDEVAYHEKYPTIYHLRKKLVDSTDKADLRLIYLALAHMIKFRGHFLIEGDLNPDNSDVDKLFIQLVQTYNQLFEENPINASGVDAKAILSARLSKSRRLENLIAQLPGEKKNGLFGNLIALSLGLTPNFKSNFDLAEDAKLQLSKDTYDDDLDNLLAQIGDQYADLFLAAKNLSDAILLSDILRVNTEITKAPLSASMIKRYDEHHQDLTLLKALVRQQLPEKYKEIFFDQSKNGYAGYIDGGASQEEFYKFIKPILEKMDGTEELLVKLNREDLLRKQRTFDNGSIPHQIHLGELHAILRRQEDFYPFLKDNREKIEKILTFRIPYYVGPLARGNSRFAWMTRKSEETITPWNFEEVVDKGASAQSFIERMTNFDKNLPNEKVLPKHSLLYEYFTVYNELTKVKYVTEGMRKPAFLSGEQKKAIVDLLFKTNRKVTVKQLKEDYFKKIECFDSVEISGVEDRFNASLGTYHDLLKIIKDKDFLDNEENEDILEDIVLTLTLFEDREMIEERLKTYAHLFDDKVMKQLKRRRYTGWGRLSRKLINGIRDKQSGKTILDFLKSDGFANRNFMQLIHDDSLTFKEDIQKAQVSGQGDSLHEHIANLAGSPAIKKGILQTVKVVDELVKVMGRHKPENIVIEMARENQTTQKGQKNSRERMKRIEEGIKELGSQILKEHPVENTQLQNEKLYLYYLQNGRDMYVDQELDINRLSDYDVDHIVPQSFLKDDSIDNKVLTRSDKARGKSDNVPSEEVVKKMKNYWRQLLNAKLITQRKFDNLTKAERGGLSELDKAGFIKRQLVETRQITKHVAQILDSRMNTKYDENDKLIREVKVITLKSKLVSDFRKDFQFYKVREINNYHHAHDAYLNAVVGTALIKKYPKLESEFVYGDYKVYDVRKMIAKSEQEIGKATAKYFFYSNIMNFFKTEITLANGEIRKRPLIETNGETGEIVWDKGRDFATVRKVLSMPQVNIVKKTEVQTGGFSKESILPKRNSDKLIARKKDWDPKKYGGFDSPTVAYSVLVVAKVEKGKSKKLKSVKELLGITIMERSSFEKNPIDFLEAKGYKEVKKDLIIKLPKYSLFELENGRKRMLASAGELQKGNELALPSKYVNFLYLASHYEKLKGSPEDNEQKQLFVEQHKHYLDEIIEQISEFSKRVILADANLDKVLSAYNKHRDKPIREQAENIIHLFTLTNLGAPAAFKYFDTTIDRKRYTSTKEVLDATLIHQSITGLYETRIDLSQLGGDGGGGGGGSEAAAKGGVLNLEEEYRLHEKPVPSSIDPSWLQLFPTVWAERAGMGLANQVPPVVVELRSGASPVAVRQYPMSKEAREGIRPHIQRFLDLGVLVPCQSPWNTPLLPVKKPGTNDYRPVQDLREINKRVQDIHPTVPNPYNLLSSLPPSHTWYSVLDLKDAFFCLKLHPNSQPLFAFEWRDPEKGNTGQLTWTRLPQGFKNSPTLFDEALHRDLAPFRALNPQVVLLQYVDDLLVAAPTYRDCKEGTQKLLQELSKLGYRVSAKKAQLCQKEVTYLGYLLKEGKRWLTPARKATVMKIPPPTTPRQVREFLGTAGFCRLWIPGFASLAAPLYPLTKESIPFIWTEEHQKAFDRIKEALLSAPALALPDLTKPFTLYVDERAGVARGVLTQTLGPWRRPVAYLSKKLDPVASGWPTCLKAVAAVALLLKDADKLTLGQNVTVIASHSLESIVRQPPDRWMTNARMTHYQSLLLNERVSFAPPAVLNPATLLPVESEATPVHRCSEILAEETGTRRDLKDQPLPGVPAWYTDGSSFIAEGKRRAGAAIVDGKRTVWASSLPEGTSAQKAELVALTQALRLAEGKDINIYTDSRYAFATAHIHGAIYKQRGLLTSAGKDIKNKEEILALLEAIHLPKRVAIIHCPGHQKGNDPVATGNRRADEAAKQAALSTRVLAETTKPAGKRTADGSEFEKRTADGSEFESPKKKAKVE

SEQ ID NO: 799 - protein, 2108 aa, synthetic construct
  source 1..2108: note = Description of Artificial Sequence: Synthetic polypeptide
MPAAKRVKLDGGDKKYSIGLDIGTNSVGWAVITDEYKVPSKKFKVLGNTDRHSIKKNLIGALLFDSGETAEATRLKRTARRRYTRRKNRICYLQEIFSNEMAKVDDSFFHRLEESFLVEEDKKHERHPIFGNIVDEVAYHEKYPTIYHLRKKLVDSTDKADLRLIYLALAHMIKFRGHFLIEGDLNPDNSDVDKLFIQLVQTYNQLFEENPINASGVDAKAILSARLSKSRRLENLIAQLPGEKKNGLFGNLIALSLGLTPNFKSNFDLAEDAKLQLSKDTYDDDLDNLLAQIGDQYADLFLAAKNLSDAILLSDILRVNTEITKAPLSASMIKRYDEHHQDLTLLKALVRQQLPEKYKEIFFDQSKNGYAGYIDGGASQEEFYKFIKPILEKMDGTEELLVKLNREDLLRKQRTFDNGSIPHQIHLGELHAILRRQEDFYPFLKDNREKIEKILTFRIPYYVGPLARGNSRFAWMTRKSEETITPWNFEEVVDKGASAQSFIERMTNFDKNLPNEKVLPKHSLLYEYFTVYNELTKVKYVTEGMRKPAFLSGEQKKAIVDLLFKTNRKVTVKQLKEDYFKKIECFDSVEISGVEDRFNASLGTYHDLLKIIKDKDFLDNEENEDILEDIVLTLTLFEDREMIEERLKTYAHLFDDKVMKQLKRRRYTGWGRLSRKLINGIRDKQSGKTILDFLKSDGFANRNFMQLIHDDSLTFKEDIQKAQVSGQGDSLHEHIANLAGSPAIKKGILQTVKVVDELVKVMGRHKPENIVIEMARENQTTQKGQKNSRERMKRIEEGIKELGSQILKEHPVENTQLQNEKLYLYYLQNGRDMYVDQELDINRLSDYDVDHIVPQSFLKDDSIDNKVLTRSDKARGKSDNVPSEEVVKKMKNYWRQLLNAKLITQRKFDNLTKAERGGLSELDKAGFIKRQLVETRQITKHVAQILDSRMNTKYDENDKLIREVKVITLKSKLVSDFRKDFQFYKVREINNYHHAHDAYLNAVVGTALIKKYPKLESEFVYGDYKVYDVRKMIAKSEQEIGKATAKYFFYSNIMNFFKTEITLANGEIRKRPLIETNGETGEIVWDKGRDFATVRKVLSMPQVNIVKKTEVQTGGFSKESILPKRNSDKLIARKKDWDPKKYGGFDSPTVAYSVLVVAKVEKGKSKKLKSVKELLGITIMERSSFEKNPIDFLEAKGYKEVKKDLIIKLPKYSLFELENGRKRMLASAGELQKGNELALPSKYVNFLYLASHYEKLKGSPEDNEQKQLFVEQHKHYLDEIIEQISEFSKRVILADANLDKVLSAYNKHRDKPIREQAENIIHLFTLTNLGAPAAFKYFDTTIDRKRYTSTKEVLDATLIHQSITGLYETRIDLSQLGGDGGEAAAKEAAAKEAAAKEAAAKEAAAKGGVLNLEEEYRLHEKPVPSSIDPSWLQLFPTVWAERAGMGLANQVPPVVVELRSGASPVAVRQYPMSKEAREGIRPHIQRFLDLGVLVPCQSPWNTPLLPVKKPGTNDYRPVQDLREINKRVQDIHPTVPNPYNLLSSLPPSHTWYSVLDLKDAFFCLKLHPNSQPLFAFEWRDPEKGNTGQLTWTRLPQGFKNSPTLFNEALHRDLAPFRALNPQVVLLQYVDDLLVAAPTYRDCKEGTQKLLQELSKLGYRVSAKKAQLCQKEVTYLGYLLKEGKRWLTPARKATVMKIPPPTTPRQVREFLGTAGFCRLWIPGFASLAAPLYPLTKPSIPFIWTEEHQKAFDRIKEALLSAPALALPDLTKPFTLYVDERAGVARGVLTQTLGPWRRPVAYLSKKLDPVASGWPTCLKAVAAVALLLKDADKLTLGQNVTVIASHSLESIVRQPPDRWMTNARMTHYQSLLLNERVSFAPPAVLNPATLLPVESEATPVHRCSEILAEETGTRRDLKDQPLPGVPAWYTDGSSFIAEGKRRAGAAIVDGKRTVWASSLPEGTSAQKAELVALTQALRLAEGKDINIYTDSRYAFATAHIHGAIYKQRGWLTSAGKDIKNKEEILALLEAIHLPKRVAIIHCPGHQKGNDPVATGNRRADEAAKQAALSTRVLAETTKPAGKRTADGSEFEKRTADGSEFESPKKKAKVE

SEQ ID NO: 800 - protein, 2094 aa, synthetic construct
  source 1..2094: note = Description of Artificial Sequence: Synthetic polypeptide
MPAAKRVKLDGGDKKYSIGLDIGTNSVGWAVITDEYKVPSKKFKVLGNTDRHSIKKNLIGALLFDSGETAEATRLKRTARRRYTRRKNRICYLQEIFSNEMAKVDDSFFHRLEESFLVEEDKKHERHPIFGNIVDEVAYHEKYPTIYHLRKKLVDSTDKADLRLIYLALAHMIKFRGHFLIEGDLNPDNSDVDKLFIQLVQTYNQLFEENPINASGVDAKAILSARLSKSRRLENLIAQLPGEKKNGLFGNLIALSLGLTPNFKSNFDLAEDAKLQLSKDTYDDDLDNLLAQIGDQYADLFLAAKNLSDAILLSDILRVNTEITKAPLSASMIKRYDEHHQDLTLLKALVRQQLPEKYKEIFFDQSKNGYAGYIDGGASQEEFYKFIKPILEKMDGTEELLVKLNREDLLRKQRTFDNGSIPHQIHLGELHAILRRQEDFYPFLKDNREKIEKILTFRIPYYVGPLARGNSRFAWMTRKSEETITPWNFEEVVDKGASAQSFIERMTNFDKNLPNEKVLPKHSLLYEYFTVYNELTKVKYVTEGMRKPAFLSGEQKKAIVDLLFKTNRKVTVKQLKEDYFKKIECFDSVEISGVEDRFNASLGTYHDLLKIIKDKDFLDNEENEDILEDIVLTLTLFEDREMIEERLKTYAHLFDDKVMKQLKRRRYTGWGRLSRKLINGIRDKQSGKTILDFLKSDGFANRNFMQLIHDDSLTFKEDIQKAQVSGQGDSLHEHIANLAGSPAIKKGILQTVKVVDELVKVMGRHKPENIVIEMARENQTTQKGQKNSRERMKRIEEGIKELGSQILKEHPVENTQLQNEKLYLYYLQNGRDMYVDQELDINRLSDYDVDHIVPQSFLKDDSIDNKVLTRSDKARGKSDNVPSEEVVKKMKNYWRQLLNAKLITQRKFDNLTKAERGGLSELDKAGFIKRQLVETRQITKHVAQILDSRMNTKYDENDKLIREVKVITLKSKLVSDFRKDFQFYKVREINNYHHAHDAYLNAVVGTALIKKYPKLESEFVYGDYKVYDVRKMIAKSEQEIGKATAKYFFYSNIMNFFKTEITLANGEIRKRPLIETNGETGEIVWDKGRDFATVRKVLSMPQVNIVKKTEVQTGGFSKESILPKRNSDKLIARKKDWDPKKYGGFDSPTVAYSVLVVAKVEKGKSKKLKSVKELLGITIMERSSFEKNPIDFLEAKGYKEVKKDLIIKLPKYSLFELENGRKRMLASAGELQKGNELALPSKYVNFLYLASHYEKLKGSPEDNEQKQLFVEQHKHYLDEIIEQISEFSKRVILADANLDKVLSAYNKHRDKPIREQAENIIHLFTLTNLGAPAAFKYFDTTIDRKRYTSTKEVLDATLIHQSITGLYETRIDLSQLGGDGGGGGGGSEAAAKGGVLNLEEEYRLHEKPVPSSIDPSWLQLFPTVWAERAGMGLANQVPPVVVELRSGASPVAVRQYPMSKEAREGIRPHIQRFLDLGVLVPCQSPWNTPLLPVKKPGTNDYRPVQDLREINKRVQDIHPTVPNPYNLLSSLPPSHTWYSVLDLKDAFFCLKLHPNSQPLFAFEWRDPEKGNTGQLTWTRLPQGFKNSPTLFNEALHRDLAPFRALNPQVVLLQYVDDLLVAAPTYRDCKEGTQKLLQELSKLGYRVSAKKAQLCQKEVTYLGYLLKEGKRWLTPARKATVMKIPPPTTPRQVREFLGTAGFCRLWIPGFASLAAPLYPLTKPSIPFIWTEEHQKAFDRIKEALLSAPALALPDLTKPFTLYVDERAGVARGVLTQTLGPWRRPVAYLSKKLDPVASGWPTCLKAVAAVALLLKDADKLTLGQNVTVIASHSLESIVRQPPDRWMTNARMTHYQSLLLNERVSFAPPAVLNPATLLPVESEATPVHRCSEILAEETGTRRDLKDQPLPGVPAWYTDGSSFIAEGKRRAGAAIVDGKRTVWASSLPEGTSAQKAELVALTQALRLAEGKDINIYTDSRYAFATAHIHGAIYKQRGWLTSAGKDIKNKEEILALLEAIHLPKRVAIIHCPGHQKGNDPVATGNRRADEAAKQAALSTRVLAETTKPAGKRTADGSEFEKRTADGSEFESPKKKAKVE

SEQ ID NO: 801 - protein, 2129 aa, synthetic construct
  source 1..2129: note = Description of Artificial Sequence: Synthetic polypeptide
MPAAKRVKLDGGDKKYSIGLDIGTNSVGWAVITDEYKVPSKKFKVLGNTDRHSIKKNLIGALLFDSGETAEATRLKRTARRRYTRRKNRICYLQEIFSNEMAKVDDSFFHRLEESFLVEEDKKHERHPIFGNIVDEVAYHEKYPTIYHLRKKLVDSTDKADLRLIYLALAHMIKFRGHFLIEGDLNPDNSDVDKLFIQLVQTYNQLFEENPINASGVDAKAILSARLSKSRRLENLIAQLPGEKKNGLFGNLIALSLGLTPNFKSNFDLAEDAKLQLSKDTYDDDLDNLLAQIGDQYADLFLAAKNLSDAILLSDILRVNTEITKAPLSASMIKRYDEHHQDLTLLKALVRQQLPEKYKEIFFDQSKNGYAGYIDGGASQEEFYKFIKPILEKMDGTEELLVKLNREDLLRKQRTFDNGSIPHQIHLGELHAILRRQEDFYPFLKDNREKIEKILTFRIPYYVGPLARGNSRFAWMTRKSEETITPWNFEEVVDKGASAQSFIERMTNFDKNLPNEKVLPKHSLLYEYFTVYNELTKVKYVTEGMRKPAFLSGEQKKAIVDLLFKTNRKVTVKQLKEDYFKKIECFDSVEISGVEDRFNASLGTYHDLLKIIKDKDFLDNEENEDILEDIVLTLTLFEDREMIEERLKTYAHLFDDKVMKQLKRRRYTGWGRLSRKLINGIRDKQSGKTILDFLKSDGFANRNFMQLIHDDSLTFKEDIQKAQVSGQGDSLHEHIANLAGSPAIKKGILQTVKVVDELVKVMGRHKPENIVIEMARENQTTQKGQKNSRERMKRIEEGIKELGSQILKEHPVENTQLQNEKLYLYYLQNGRDMYVDQELDINRLSDYDVDHIVPQSFLKDDSIDNKVLTRSDKARGKSDNVPSEEVVKKMKNYWRQLLNAKLITQRKFDNLTKAERGGLSELDKAGFIKRQLVETRQITKHVAQILDSRMNTKYDENDKLIREVKVITLKSKLVSDFRKDFQFYKVREINNYHHAHDAYLNAVVGTALIKKYPKLESEFVYGDYKVYDVRKMIAKSEQEIGKATAKYFFYSNIMNFFKTEITLANGEIRKRPLIETNGETGEIVWDKGRDFATVRKVLSMPQVNIVKKTEVQTGGFSKESILPKRNSDKLIARKKDWDPKKYGGFDSPTVAYSVLVVAKVEKGKSKKLKSVKELLGITIMERSSFEKNPIDFLEAKGYKEVKKDLIIKLPKYSLFELENGRKRMLASAGELQKGNELALPSKYVNFLYLASHYEKLKGSPEDNEQKQLFVEQHKHYLDEIIEQISEFSKRVILADANLDKVLSAYNKHRDKPIREQAENIIHLFTLTNLGAPAAFKYFDTTIDRKRYTSTKEVLDATLIHQSITGLYETRIDLSQLGGDGGAEAAAKEAAAKEAAAKEAAAKALEAEAAAKEAAAKEAAAKEAAAKAGGVLNLEEEYRLHEKPVPSSIDPSWLQLFPTVWAERAGMGLANQVPPVVVELRSGASPVAVRQYPMSKEAREGIRPHIQRFLDLGVLVPCQSPWNTPLLPVKKPGTNDYRPVQDLREINKRVQDIHPTVPNPYNLLSSLPPSHTWYSVLDLKDAFFCLKLHPNSQPLFAFEWRDPEKGNTGQLTWTRLPQGFKNSPTLFNEALHRDLAPFRALNPQVVLLQYVDDLLVAAPTYRDCKEGTQKLLQELSKLGYRVSAKKAQLCQKEVTYLGYLLKEGKRWLTPARKATVMKIPPPTTPRQVREFLGTAGFCRLWIPGFASLAAPLYPLTKPSIPFIWTEEHQKAFDRIKEALLSAPALALPDLTKPFTLYVDERAGVARGVLTQTLGPWRRPVAYLSKKLDPVASGWPTCLKAVAAVALLLKDADKLTLGQNVTVIASHSLESIVRQPPDRWMTNARMTHYQSLLLNERVSFAPPAVLNPATLLPVESEATPVHRCSEILAEETGTRRDLKDQPLPGVPAWYTDGSSFIAEGKRRAGAAIVDGKRTVWASSLPEGTSAQKAELVALTQALRLAEGKDINIYTDSRYAFATAHIHGAIYKQRGWLTSAGKDIKNKEEILALLEAIHLPKRVAIIHCPGHQKGNDPVATGNRRADEAAKQAALSTRVLAETTKPAGKRTADGSEFEKRTADGSEFESPKKKAKVE

SEQ ID NO: 802 - protein, 2090 aa, synthetic construct
  source 1..2090: note = Description of Artificial Sequence: Synthetic polypeptide
MPAAKRVKLDGGDKKYSIGLDIGTNSVGWAVITDEYKVPSKKFKVLGNTDRHSIKKNLIGALLFDSGETAEATRLKRTARRRYTRRKNRICYLQEIFSNEMAKVDDSFFHRLEESFLVEEDKKHERHPIFGNIVDEVAYHEKYPTIYHLRKKLVDSTDKADLRLIYLALAHMIKFRGHFLIEGDLNPDNSDVDKLFIQLVQTYNQLFEENPINASGVDAKAILSARLSKSRRLENLIAQLPGEKKNGLFGNLIALSLGLTPNFKSNFDLAEDAKLQLSKDTYDDDLDNLLAQIGDQYADLFLAAKNLSDAILLSDILRVNTEITKAPLSASMIKRYDEHHQDLTLLKALVRQQLPEKYKEIFFDQSKNGYAGYIDGGASQEEFYKFIKPILEKMDGTEELLVKLNREDLLRKQRTFDNGSIPHQIHLGELHAILRRQEDFYPFLKDNREKIEKILTFRIPYYVGPLARGNSRFAWMTRKSEETITPWNFEEVVDKGASAQSFIERMTNFDKNLPNEKVLPKHSLLYEYFTVYNELTKVKYVTEGMRKPAFLSGEQKKAIVDLLFKTNRKVTVKQLKEDYFKKIECFDSVEISGVEDRFNASLGTYHDLLKIIKDKDFLDNEENEDILEDIVLTLTLFEDREMIEERLKTYAHLFDDKVMKQLKRRRYTGWGRLSRKLINGIRDKQSGKTILDFLKSDGFANRNFMQLIHDDSLTFKEDIQKAQVSGQGDSLHEHIANLAGSPAIKKGILQTVKVVDELVKVMGRHKPENIVIEMARENQTTQKGQKNSRERMKRIEEGIKELGSQILKEHPVENTQLQNEKLYLYYLQNGRDMYVDQELDINRLSDYDVDHIVPQSFLKDDSIDNKVLTRSDKARGKSDNVPSEEVVKKMKNYWRQLLNAKLITQRKFDNLTKAERGGLSELDKAGFIKRQLVETRQITKHVAQILDSRMNTKYDENDKLIREVKVITLKSKLVSDFRKDFQFYKVREINNYHHAHDAYLNAVVGTALIKKYPKLESEFVYGDYKVYDVRKMIAKSEQEIGKATAKYFFYSNIMNFFKTEITLANGEIRKRPLIETNGETGEIVWDKGRDFATVRKVLSMPQVNIVKKTEVQTGGFSKESILPKRNSDKLIARKKDWDPKKYGGFDSPTVAYSVLVVAKVEKGKSKKLKSVKELLGITIMERSSFEKNPIDFLEAKGYKEVKKDLIIKLPKYSLFELENGRKRMLASAGELQKGNELALPSKYVNFLYLASHYEKLKGSPEDNEQKQLFVEQHKHYLDEIIEQISEFSKRVILADANLDKVLSAYNKHRDKPIREQAENIIHLFTLTNLGAPAAFKYFDTTIDRKRYTSTKEVLDATLIHQSITGLYETRIDLSQLGGDGGGGGGGGGGGVLNLEEEYRLHEKPVPSSIDPSWLQLFPTVWAERAGMGLANQVPPVVVELRSGASPVAVRQYPMSKEAREGIRPHIQRFLDLGVLVPCQSPWNTPLLPVKKPGTNDYRPVQDLREINKRVQDIHPTVPNPYNLLSSLPPSHTWYSVLDLKDAFFCLKLHPNSQPLFAFEWRDPEKGNTGQLTWTRLPQGFKNSPTLFNEALHRDLAPFRALNPQVVLLQYVDDLLVAAPTYRDCKEGTQKLLQELSKLGYRVSAKKAQLCQKEVTYLGYLLKEGKRWLTPARKATVMKIPPPTTPRQVREFLGTAGFCRLWIPGFASLAAPLYPLTKPSIPFIWTEEHQKAFDRIKEALLSAPALALPDLTKPFTLYVDERAGVARGVLTQTLGPWRRPVAYLSKKLDPVASGWPTCLKAVAAVALLLKDADKLTLGQNVTVIASHSLESIVRQPPDRWMTNARMTHYQSLLLNERVSFAPPAVLNPATLLPVESEATPVHRCSEILAEETGTRRDLKDQPLPGVPAWYTDGSSFIAEGKRRAGAAIVDGKRTVWASSLPEGTSAQKAELVALTQALRLAEGKDINIYTDSRYAFATAHIHGAIYKQRGWLTSAGKDIKNKEEILALLEAIHLPKRVAIIHCPGHQKGNDPVATGNRRADEAAKQAALSTRVLAETTKPAGKRTADGSEFEKRTADGSEFESPKKKAKVE

SEQ ID NO: 803 - protein, 2086 aa, synthetic construct
  source 1..2086: note = Description of Artificial Sequence: Synthetic polypeptide
MPAAKRVKLDGGDKKYSIGLDIGTNSVGWAVITDEYKVPSKKFKVLGNTDRHSIKKNLIGALLFDSGETAEATRLKRTARRRYTRRKNRICYLQEIFSNEMAKVDDSFFHRLEESFLVEEDKKHERHPIFGNIVDEVAYHEKYPTIYHLRKKLVDSTDKADLRLIYLALAHMIKFRGHFLIEGDLNPDNSDVDKLFIQLVQTYNQLFEENPINASGVDAKAILSARLSKSRRLENLIAQLPGEKKNGLFGNLIALSLGLTPNFKSNFDLAEDAKLQLSKDTYDDDLDNLLAQIGDQYADLFLAAKNLSDAILLSDILRVNTEITKAPLSASMIKRYDEHHQDLTLLKALVRQQLPEKYKEIFFDQSKNGYAGYIDGGASQEEFYKFIKPILEKMDGTEELLVKLNREDLLRKQRTFDNGSIPHQIHLGELHAILRRQEDFYPFLKDNREKIEKILTFRIPYYVGPLARGNSRFAWMTRKSEETITPWNFEEVVDKGASAQSFIERMTNFDKNLPNEKVLPKHSLLYEYFTVYNELTKVKYVTEGMRKPAFLSGEQKKAIVDLLFKTNRKVTVKQLKEDYFKKIECFDSVEISGVEDRFNASLGTYHDLLKIIKDKDFLDNEENEDILEDIVLTLTLFEDREMIEERLKTYAHLFDDKVMKQLKRRRYTGWGRLSRKLINGIRDKQSGKTILDFLKSDGFANRNFMQLIHDDSLTFKEDIQKAQVSGQGDSLHEHIANLAGSPAIKKGILQTVKVVDELVKVMGRHKPENIVIEMARENQTTQKGQKNSRERMKRIEEGIKELGSQILKEHPVENTQLQNEKLYLYYLQNGRDMYVDQELDINRLSDYDVDHIVPQSFLKDDSIDNKVLTRSDKARGKSDNVPSEEVVKKMKNYWRQLLNAKLITQRKFDNLTKAERGGLSELDKAGFIKRQLVETRQITKHVAQILDSRMNTKYDENDKLIREVKVITLKSKLVSDFRKDFQFYKVREINNYHHAHDAYLNAVVGTALIKKYPKLESEFVYGDYKVYDVRKMIAKSEQEIGKATAKYFFYSNIMNFFKTEITLANGEIRKRPLIETNGETGEIVWDKGRDFATVRKVLSMPQVNIVKKTEVQTGGFSKESILPKRNSDKLIARKKDWDPKKYGGFDSPTVAYSVLVVAKVEKGKSKKLKSVKELLGITIMERSSFEKNPIDFLEAKGYKEVKKDLIIKLPKYSLFELENGRKRMLASAGELQKGNELALPSKYVNFLYLASHYEKLKGSPEDNEQKQLFVEQHKHYLDEIIEQISEFSKRVILADANLDKVLSAYNKHRDKPIREQAENIIHLFTLTNLGAPAAFKYFDTTIDRKRYTSTKEVLDATLIHQSITGLYETRIDLSQLGGDGGGSSGGVLNLEEEYRLHEKPVPSSIDPSWLQLFPTVWAERAGMGLANQVPPVVVELRSGASPVAVRQYPMSKEAREGIRPHIQRFLDLGVLVPCQSPWNTPLLPVKKPGTNDYRPVQDLREINKRVQDIHPTVPNPYNLLSSLPPSHTWYSVLDLKDAFFCLKLHPNSQPLFAFEWRDPEKGNTGQLTWTRLPQGFKNSPTLFNEALHRDLAPFRALNPQVVLLQYVDDLLVAAPTYRDCKEGTQKLLQELSKLGYRVSAKKAQLCQKEVTYLGYLLKEGKRWLTPARKATVMKIPPPTTPRQVREFLGTAGFCRLWIPGFASLAAPLYPLTKPSIPFIWTEEHQKAFDRIKEALLSAPALALPDLTKPFTLYVDERAGVARGVLTQTLGPWRRPVAYLSKKLDPVASGWPTCLKAVAAVALLLKDADKLTLGQNVTVIASHSLESIVRQPPDRWMTNARMTHYQSLLLNERVSFAPPAVLNPATLLPVESEATPVHRCSEILAEETGTRRDLKDQPLPGVPAWYTDGSSFIAEGKRRAGAAIVDGKRTVWASSLPEGTSAQKAELVALTQALRLAEGKDINIYTDSRYAFATAHIHGAIYKQRGWLTSAGKDIKNKEEILALLEAIHLPKRVAIIHCPGHQKGNDPVATGNRRADEAAKQAALSTRVLAETTKPAGKRTADGSEFEKRTADGSEFESPKKKAKVE

SEQ ID NO: 804 - protein, 2092 aa, synthetic construct
  source 1..2092: note = Description of Artificial Sequence: Synthetic polypeptide
MPAAKRVKLDGGDKKYSIGLDIGTNSVGWAVITDEYKVPSKKFKVLGNTDRHSIKKNLIGALLFDSGETAEATRLKRTARRRYTRRKNRICYLQEIFSNEMAKVDDSFFHRLEESFLVEEDKKHERHPIFGNIVDEVAYHEKYPTIYHLRKKLVDSTDKADLRLIYLALAHMIKFRGHFLIEGDLNPDNSDVDKLFIQLVQTYNQLFEENPINASGVDAKAILSARLSKSRRLENLIAQLPGEKKNGLFGNLIALSLGLTPNFKSNFDLAEDAKLQLSKDTYDDDLDNLLAQIGDQYADLFLAAKNLSDAILLSDILRVNTEITKAPLSASMIKRYDEHHQDLTLLKALVRQQLPEKYKEIFFDQSKNGYAGYIDGGASQEEFYKFIKPILEKMDGTEELLVKLNREDLLRKQRTFDNGSIPHQIHLGELHAILRRQEDFYPFLKDNREKIEKILTFRIPYYVGPLARGNSRFAWMTRKSEETITPWNFEEVVDKGASAQSFIERMTNFDKNLPNEKVLPKHSLLYEYFTVYNELTKVKYVTEGMRKPAFLSGEQKKAIVDLLFKTNRKVTVKQLKEDYFKKIECFDSVEISGVEDRFNASLGTYHDLLKIIKDKDFLDNEENEDILEDIVLTLTLFEDREMIEERLKTYAHLFDDKVMKQLKRRRYTGWGRLSRKLINGIRDKQSGKTILDFLKSDGFANRNFMQLIHDDSLTFKEDIQKAQVSGQGDSLHEHIANLAGSPAIKKGILQTVKVVDELVKVMGRHKPENIVIEMARENQTTQKGQKNSRERMKRIEEGIKELGSQILKEHPVENTQLQNEKLYLYYLQNGRDMYVDQELDINRLSDYDVDHIVPQSFLKDDSIDNKVLTRSDKARGKSDNVPSEEVVKKMKNYWRQLLNAKLITQRKFDNLTKAERGGLSELDKAGFIKRQLVETRQITKHVAQILDSRMNTKYDENDKLIREVKVITLKSKLVSDFRKDFQFYKVREINNYHHAHDAYLNAVVGTALIKKYPKLESEFVYGDYKVYDVRKMIAKSEQEIGKATAKYFFYSNIMNFFKTEITLANGEIRKRPLIETNGETGEIVWDKGRDFATVRKVLSMPQVNIVKKTEVQTGGFSKESILPKRNSDKLIARKKDWDPKKYGGFDSPTVAYSVLVVAKVEKGKSKKLKSVKELLGITIMERSSFEKNPIDFLEAKGYKEVKKDLIIKLPKYSLFELENGRKRMLASAGELQKGNELALPSKYVNFLYLASHYEKLKGSPEDNEQKQLFVEQHKHYLDEIIEQISEFSKRVILADANLDKVLSAYNKHRDKPIREQAENIIHLFTLTNLGAPAAFKYFDTTIDRKRYTSTKEVLDATLIHQSITGLYETRIDLSQLGGDGGGGGGSSGGSGGVLNLEEEYRLHEKPVPSSIDPSWLQLFPTVWAERAGMGLANQVPPVVVELRSGASPVAVRQYPMSKEAREGIRPHIQRFLDLGVLVPCQSPWNTPLLPVKKPGTNDYRPVQDLREINKRVQDIHPTVPNPYNLLSSLPPSHTWYSVLDLKDAFFCLKLHPNSQPLFAFEWRDPEKGNTGQLTWTRLPQGFKNSPTLFNEALHRDLAPFRALNPQVVLLQYVDDLLVAAPTYRDCKEGTQKLLQELSKLGYRVSAKKAQLCQKEVTYLGYLLKEGKRWLTPARKATVMKIPPPTTPRQVREFLGTAGFCRLWIPGFASLAAPLYPLTKPSIPFIWTEEHQKAFDRIKEALLSAPALALPDLTKPFTLYVDERAGVARGVLTQTLGPWRRPVAYLSKKLDPVASGWPTCLKAVAAVALLLKDADKLTLGQNVTVIASHSLESIVRQPPDRWMTNARMTHYQSLLLNERVSFAPPAVLNPATLLPVESEATPVHRCSEILAEETGTRRDLKDQPLPGVPAWYTDGSSFIAEGKRRAGAAIVDGKRTVWASSLPEGTSAQKAELVALTQALRLAEGKDINIYTDSRYAFATAHIHGAIYKQRGWLTSAGKDIKNKEEILALLEAIHLPKRVAIIHCPGHQKGNDPVATGNRRADEAAKQAALSTRVLAETTKPAGKRTADGSEFEKRTADGSEFESPKKKAKVE

SEQ ID NO: 805 - protein, 2089 aa, synthetic construct
  source 1..2089: note = Description of Artificial Sequence: Synthetic polypeptide
MPAAKRVKLDGGDKKYSIGLDIGTNSVGWAVITDEYKVPSKKFKVLGNTDRHSIKKNLIGALLFDSGETAEATRLKRTARRRYTRRKNRICYLQEIFSNEMAKVDDSFFHRLEESFLVEEDKKHERHPIFGNIVDEVAYHEKYPTIYHLRKKLVDSTDKADLRLIYLALAHMIKFRGHFLIEGDLNPDNSDVDKLFIQLVQTYNQLFEENPINASGVDAKAILSARLSKSRRLENLIAQLPGEKKNGLFGNLIALSLGLTPNFKSNFDLAEDAKLQLSKDTYDDDLDNLLAQIGDQYADLFLAAKNLSDAILLSDILRVNTEITKAPLSASMIKRYDEHHQDLTLLKALVRQQLPEKYKEIFFDQSKNGYAGYIDGGASQEEFYKFIKPILEKMDGTEELLVKLNREDLLRKQRTFDNGSIPHQIHLGELHAILRRQEDFYPFLKDNREKIEKILTFRIPYYVGPLARGNSRFAWMTRKSEETITPWNFEEVVDKGASAQSFIERMTNFDKNLPNEKVLPKHSLLYEYFTVYNELTKVKYVTEGMRKPAFLSGEQKKAIVDLLFKTNRKVTVKQLKEDYFKKIECFDSVEISGVEDRFNASLGTYHDLLKIIKDKDFLDNEENEDILEDIVLTLTLFEDREMIEERLKTYAHLFDDKVMKQLKRRRYTGWGRLSRKLINGIRDKQSGKTILDFLKSDGFANRNFMQLIHDDSLTFKEDIQKAQVSGQGDSLHEHIANLAGSPAIKKGILQTVKVVDELVKVMGRHKPENIVIEMARENQTTQKGQKNSRERMKRIEEGIKELGSQILKEHPVENTQLQNEKLYLYYLQNGRDMYVDQELDINRLSDYDVDHIVPQSFLKDDSIDNKVLTRSDKARGKSDNVPSEEVVKKMKNYWRQLLNAKLITQRKFDNLTKAERGGLSELDKAGFIKRQLVETRQITKHVAQILDSRMNTKYDENDKLIREVKVITLKSKLVSDFRKDFQFYKVREINNYHHAHDAYLNAVVGTALIKKYPKLESEFVYGDYKVYDVRKMIAKSEQEIGKATAKYFFYSNIMNFFKTEITLANGEIRKRPLIETNGETGEIVWDKGRDFATVRKVLSMPQVNIVKKTEVQTGGFSKESILPKRNSDKLIARKKDWDPKKYGGFDSPTVAYSVLVVAKVEKGKSKKLKSVKELLGITIMERSSFEKNPIDFLEAKGYKEVKKDLIIKLPKYSLFELENGRKRMLASAGELQKGNELALPSKYVNFLYLASHYEKLKGSPEDNEQKQLFVEQHKHYLDEIIEQISEFSKRVILADANLDKVLSAYNKHRDKPIREQAENIIHLFTLTNLGAPAAFKYFDTTIDRKRYTSTKEVLDATLIHQSITGLYETRIDLSQLGGDGGGGGGGGGGVLNLEEEYRLHEKPVPSSIDPSWLQLFPTVWAERAGMGLANQVPPVVVELRSGASPVAVRQYPMSKEAREGIRPHIQRFLDLGVLVPCQSPWNTPLLPVKKPGTNDYRPVQDLREINKRVQDIHPTVPNPYNLLSSLPPSHTWYSVLDLKDAFFCLKLHPNSQPLFAFEWRDPEKGNTGQLTWTRLPQGFKNSPTLFNEALHRDLAPFRALNPQVVLLQYVDDLLVAAPTYRDCKEGTQKLLQELSKLGYRVSAKKAQLCQKEVTYLGYLLKEGKRWLTPARKATVMKIPPPTTPRQVREFLGTAGFCRLWIPGFASLAAPLYPLTKPSIPFIWTEEHQKAFDRIKEALLSAPALALPDLTKPFTLYVDERAGVARGVLTQTLGPWRRPVAYLSKKLDPVASGWPTCLKAVAAVALLLKDADKLTLGQNVTVIASHSLESIVRQPPDRWMTNARMTHYQSLLLNERVSFAPPAVLNPATLLPVESEATPVHRCSEILAEETGTRRDLKDQPLPGVPAWYTDGSSFIAEGKRRAGAAIVDGKRTVWASSLPEGTSAQKAELVALTQALRLAEGKDINIYTDSRYAFATAHIHGAIYKQRGWLTSAGKDIKNKEEILALLEAIHLPKRVAIIHCPGHQKGNDPVATGNRRADEAAKQAALSTRVLAETTKPAGKRTADGSEFEKRTADGSEFESPKKKAKVE

SEQ ID NO: 806 - protein, 2099 aa, synthetic construct
  source 1..2099: note = Description of Artificial Sequence: Synthetic polypeptide
MPAAKRVKLDGGDKKYSIGLDIGTNSVGWAVITDEYKVPSKKFKVLGNTDRHSIKKNLIGALLFDSGETAEATRLKRTARRRYTRRKNRICYLQEIFSNEMAKVDDSFFHRLEESFLVEEDKKHERHPIFGNIVDEVAYHEKYPTIYHLRKKLVDSTDKADLRLIYLALAHMIKFRGHFLIEGDLNPDNSDVDKLFIQLVQTYNQLFEENPINASGVDAKAILSARLSKSRRLENLIAQLPGEKKNGLFGNLIALSLGLTPNFKSNFDLAEDAKLQLSKDTYDDDLDNLLAQIGDQYADLFLAAKNLSDAILLSDILRVNTEITKAPLSASMIKRYDEHHQDLTLLKALVRQQLPEKYKEIFFDQSKNGYAGYIDGGASQEEFYKFIKPILEKMDGTEELLVKLNREDLLRKQRTFDNGSIPHQIHLGELHAILRRQEDFYPFLKDNREKIEKILTFRIPYYVGPLARGNSRFAWMTRKSEETITPWNFEEVVDKGASAQSFIERMTNFDKNLPNEKVLPKHSLLYEYFTVYNELTKVKYVTEGMRKPAFLSGEQKKAIVDLLFKTNRKVTVKQLKEDYFKKIECFDSVEISGVEDRFNASLGTYHDLLKIIKDKDFLDNEENEDILEDIVLTLTLFEDREMIEERLKTYAHLFDDKVMKQLKRRRYTGWGRLSRKLINGIRDKQSGKTILDFLKSDGFANRNFMQLIHDDSLTFKEDIQKAQVSGQGDSLHEHIANLAGSPAIKKGILQTVKVVDELVKVMGRHKPENIVIEMARENQTTQKGQKNSRERMKRIEEGIKELGSQILKEHPVENTQLQNEKLYLYYLQNGRDMYVDQELDINRLSDYDVDHIVPQSFLKDDSIDNKVLTRSDKARGKSDNVPSEEVVKKMKNYWRQLLNAKLITQRKFDNLTKAERGGLSELDKAGFIKRQLVETRQITKHVAQILDSRMNTKYDENDKLIREVKVITLKSKLVSDFRKDFQFYKVREINNYHHAHDAYLNAVVGTALIKKYPKLESEFVYGDYKVYDVRKMIAKSEQEIGKATAKYFFYSNIMNFFKTEITLANGEIRKRPLIETNGETGEIVWDKGRDFATVRKVLSMPQVNIVKKTEVQTGGFSKESILPKRNSDKLIARKKDWDPKKYGGFDSPTVAYSVLVVAKVEKGKSKKLKSVKELLGITIMERSSFEKNPIDFLEAKGYKEVKKDLIIKLPKYSLFELENGRKRMLASAGELQKGNELALPSKYVNFLYLASHYEKLKGSPEDNEQKQLFVEQHKHYLDEIIEQISEFSKRVILADANLDKVLSAYNKHRDKPIREQAENIIHLFTLTNLGAPAAFKYFDTTIDRKRYTSTKEVLDATLIHQSITGLYETRIDLSQLGGDGGSGSETPGTSESATPESGGVLNLEEEYRLHEKPVPSSIDPSWLQLFPTVWAERAGMGLANQVPPVVVELRSGASPVAVRQYPMSKEAREGIRPHIQRFLDLGVLVPCQSPWNTPLLPVKKPGTNDYRPVQDLREINKRVQDIHPTVPNPYNLLSSLPPSHTWYSVLDLKDAFFCLKLHPNSQPLFAFEWRDPEKGNTGQLTWTRLPQGFKNSPTLFNEALHRDLAPFRALNPQVVLLQYVDDLLVAAPTYRDCKEGTQKLLQELSKLGYRVSAKKAQLCQKEVTYLGYLLKEGKRWLTPARKATVMKIPPPTTPRQVREFLGTAGFCRLWIPGFASLAAPLYPLTKPSIPFIWTEEHQKAFDRIKEALLSAPALALPDLTKPFTLYVDERAGVARGVLTQTLGPWRRPVAYLSKKLDPVASGWPTCLKAVAAVALLLKDADKLTLGQNVTVIASHSLESIVRQPPDRWMTNARMTHYQSLLLNERVSFAPPAVLNPATLLPVESEATPVHRCSEILAEETGTRRDLKDQPLPGVPAWYTDGSSFIAEGKRRAGAAIVDGKRTVWASSLPEGTSAQKAELVALTQALRLAEGKDINIYTDSRYAFATAHIHGAIYKQRGWLTSAGKDIKNKEEILALLEAIHLPKRVAIIHCPGHQKGNDPVATGNRRADEAAKQAALSTRVLAETTKPAGKRTADGSEFEKRTADGSEFESPKKKAKVE

SEQ ID NO: 807 - protein, 2094 aa, synthetic construct
  source 1..2094: note = Description of Artificial Sequence: Synthetic polypeptide
MPAAKRVKLDGGDKKYSIGLDIGTNSVGWAVITDEYKVPSKKFKVLGNTDRHSIKKNLIGALLFDSGETAEATRLKRTARRRYTRRKNRICYLQEIFSNEMAKVDDSFFHRLEESFLVEEDKKHERHPIFGNIVDEVAYHEKYPTIYHLRKKLVDSTDKADLRLIYLALAHMIKFRGHFLIEGDLNPDNSDVDKLFIQLVQTYNQLFEENPINASGVDAKAILSARLSKSRRLENLIAQLPGEKKNGLFGNLIALSLGLTPNFKSNFDLAEDAKLQLSKDTYDDDLDNLLAQIGDQYADLFLAAKNLSDAILLSDILRVNTEITKAPLSASMIKRYDEHHQDLTLLKALVRQQLPEKYKEIFFDQSKNGYAGYIDGGASQEEFYKFIKPILEKMDGTEELLVKLNREDLLRKQRTFDNGSIPHQIHLGELHAILRRQEDFYPFLKDNREKIEKILTFRIPYYVGPLARGNSRFAWMTRKSEETITPWNFEEVVDKGASAQSFIERMTNFDKNLPNEKVLPKHSLLYEYFTVYNELTKVKYVTEGMRKPAFLSGEQKKAIVDLLFKTNRKVTVKQLKEDYFKKIECFDSVEISGVEDRFNASLGTYHDLLKIIKDKDFLDNEENEDILEDIVLTLTLFEDREMIEERLKTYAHLFDDKVMKQLKRRRYTGWGRLSRKLINGIRDKQSGKTILDFLKSDGFANRNFMQLIHDDSLTFKEDIQKAQVSGQGDSLHEHIANLAGSPAIKKGILQTVKVVDELVKVMGRHKPENIVIEMARENQTTQKGQKNSRERMKRIEEGIKELGSQILKEHPVENTQLQNEKLYLYYLQNGRDMYVDQELDINRLSDYDVDHIVPQSFLKDDSIDNKVLTRSDKARGKSDNVPSEEVVKKMKNYWRQLLNAKLITQRKFDNLTKAERGGLSELDKAGFIKRQLVETRQITKHVAQILDSRMNTKYDENDKLIREVKVITLKSKLVSDFRKDFQFYKVREINNYHHAHDAYLNAVVGTALIKKYPKLESEFVYGDYKVYDVRKMIAKSEQEIGKATAKYFFYSNIMNFFKTEITLANGEIRKRPLIETNGETGEIVWDKGRDFATVRKVLSMPQVNIVKKTEVQTGGFSKESILPKRNSDKLIARKKDWDPKKYGGFDSPTVAYSVLVVAKVEKGKSKKLKSVKELLGITIMERSSFEKNPIDFLEAKGYKEVKKDLIIKLPKYSLFELENGRKRMLASAGELQKGNELALPSKYVNFLYLASHYEKLKGSPEDNEQKQLFVEQHKHYLDEIIEQISEFSKRVILADANLDKVLSAYNKHRDKPIREQAENIIHLFTLTNLGAPAAFKYFDTTIDRKRYTSTKEVLDATLIHQSITGLYETRIDLSQLGGDGGGGGGSSEAAAKGGVLNLEEEYRLHEKPVPSSIDPSWLQLFPTVWAERAGMGLANQVPPVVVELRSGASPVAVRQYPMSKEAREGIRPHIQRFLDLGVLVPCQSPWNTPLLPVKKPGTNDYRPVQDLREINKRVQDIHPTVPNPYNLLSSLPPSHTWYSVLDLKDAFFCLKLHPNSQPLFAFEWRDPEKGNTGQLTWTRLPQGFKNSPTLFNEALHRDLAPFRALNPQVVLLQYVDDLLVAAPTYRDCKEGTQKLLQELSKLGYRVSAKKAQLCQKEVTYLGYLLKEGKRWLTPARKATVMKIPPPTTPRQVREFLGTAGFCRLWIPGFASLAAPLYPLTKPSIPFIWTEEHQKAFDRIKEALLSAPALALPDLTKPFTLYVDERAGVARGVLTQTLGPWRRPVAYLSKKLDPVASGWPTCLKAVAAVALLLKDADKLTLGQNVTVIASHSLESIVRQPPDRWMTNARMTHYQSLLLNERVSFAPPAVLNPATLLPVESEATPVHRCSEILAEETGTRRDLKDQPLPGVPAWYTDGSSFIAEGKRRAGAAIVDGKRTVWASSLPEGTSAQKAELVALTQALRLAEGKDINIYTDSRYAFATAHIHGAIYKQRGWLTSAGKDIKNKEEILALLEAIHLPKRVAIIHCPGHQKGNDPVATGNRRADEAAKQAALSTRVLAETTKPAGKRTADGSEFEKRTADGSEFESPKKKAKVE

SEQ ID NO: 808 - protein, 2093 aa, synthetic construct
  source 1..2093: note = Description of Artificial Sequence: Synthetic polypeptide
MPAAKRVKLDGGDKKYSIGLDIGTNSVGWAVITDEYKVPSKKFKVLGNTDRHSIKKNLIGALLFDSGETAEATRLKRTARRRYTRRKNRICYLQEIFSNEMAKVDDSFFHRLEESFLVEEDKKHERHPIFGNIVDEVAYHEKYPTIYHLRKKLVDSTDKADLRLIYLALAHMIKFRGHFLIEGDLNPDNSDVDKLFIQLVQTYNQLFEENPINASGVDAKAILSARLSKSRRLENLIAQLPGEKKNGLFGNLIALSLGLTPNFKSNFDLAEDAKLQLSKDTYDDDLDNLLAQIGDQYADLFLAAKNLSDAILLSDILRVNTEITKAPLSASMIKRYDEHHQDLTLLKALVRQQLPEKYKEIFFDQSKNGYAGYIDGGASQEEFYKFIKPILEKMDGTEELLVKLNREDLLRKQRTFDNGSIPHQIHLGELHAILRRQEDFYPFLKDNREKIEKILTFRIPYYVGPLARGNSRFAWMTRKSEETITPWNFEEVVDKGASAQSFIERMTNFDKNLPNEKVLPKHSLLYEYFTVYNELTKVKYVTEGMRKPAFLSGEQKKAIVDLLFKTNRKVTVKQLKEDYFKKIECFDSVEISGVEDRFNASLGTYHDLLKIIKDKDFLDNEENEDILEDIVLTLTLFEDREMIEERLKTYAHLFDDKVMKQLKRRRYTGWGRLSRKLINGIRDKQSGKTILDFLKSDGFANRNFMQLIHDDSLTFKEDIQKAQVSGQGDSLHEHIANLAGSPAIKKGILQTVKVVDELVKVMGRHKPENIVIEMARENQTTQKGQKNSRERMKRIEEGIKELGSQILKEHPVENTQLQNEKLYLYYLQNGRDMYVDQELDINRLSDYDVDHIVPQSFLKDDSIDNKVLTRSDKARGKSDNVPSEEVVKKMKNYWRQLLNAKLITQRKFDNLTKAERGGLSELDKAGFIKRQLVETRQITKHVAQILDSRMNTKYDENDKLIREVKVITLKSKLVSDFRKDFQFYKVREINNYHHAHDAYLNAVVGTALIKKYPKLESEFVYGDYKVYDVRKMIAKSEQEIGKATAKYFFYSNIMNFFKTEITLANGEIRKRPLIETNGETGEIVWDKGRDFATVRKVLSMPQVNIVKKTEVQTGGFSKESILPKRNSDKLIARKKDWDPKKYGGFDSPTVAYSVLVVAKVEKGKSKKLKSVKELLGITIMERSSFEKNPIDFLEAKGYKEVKKDLIIKLPKYSLFELENGRKRMLASAGELQKGNELALPSKYVNFLYLASHYEKLKGSPEDNEQKQLFVEQHKHYLDEIIEQISEFSKRVILADANLDKVLSAYNKHRDKPIREQAENIIHLFTLTNLGAPAAFKYFDTTIDRKRYTSTKEVLDATLIHQSITGLYETRIDLSQLGGDGGGGGGSGGGGSGGVLNLEEEYRLHEKPVPSSIDPSWLQLFPTVWAERAGMGLANQVPPVVVELRSGASPVAVRQYPMSKEAREGIRPHIQRFLDLGVLVPCQSPWNTPLLPVKKPGTNDYRPVQDLREINKRVQDIHPTVPNPYNLLSSLPPSHTWYSVLDLKDAFFCLKLHPNSQPLFAFEWRDPEKGNTGQLTWTRLPQGFKNSPTLFNEALHRDLAPFRALNPQVVLLQYVDDLLVAAPTYRDCKEGTQKLLQELSKLGYRVSAKKAQLCQKEVTYLGYLLKEGKRWLTPARKATVMKIPPPTTPRQVREFLGTAGFCRLWIPGFASLAAPLYPLTKPSIPFIWTEEHQKAFDRIKEALLSAPALALPDLTKPFTLYVDERAGVARGVLTQTLGPWRRPVAYLSKKLDPVASGWPTCLKAVAAVALLLKDADKLTLGQNVTVIASHSLESIVRQPPDRWMTNARMTHYQSLLLNERVSFAPPAVLNPATLLPVESEATPVHRCSEILAEETGTRRDLKDQPLPGVPAWYTDGSSFIAEGKRRAGAAIVDGKRTVWASSLPEGTSAQKAELVALTQALRLAEGKDINIYTDSRYAFATAHIHGAIYKQRGWLTSAGKDIKNKEEILALLEAIHLPKRVAIIHCPGHQKGNDPVATGNRRADEAAKQAALSTRVLAETTKPAGKRTADGSEFEKRTADGSEFESPKKKAKVE

SEQ ID NO: 809 - protein, 2094 aa, synthetic construct
  source 1..2094: note = Description of Artificial Sequence: Synthetic polypeptide
MPAAKRVKLDGGDKKYSIGLDIGTNSVGWAVITDEYKVPSKKFKVLGNTDRHSIKKNLIGALLFDSGETAEATRLKRTARRRYTRRKNRICYLQEIFSNEMAKVDDSFFHRLEESFLVEEDKKHERHPIFGNIVDEVAYHEKYPTIYHLRKKLVDSTDKADLRLIYLALAHMIKFRGHFLIEGDLNPDNSDVDKLFIQLVQTYNQLFEENPINASGVDAKAILSARLSKSRRLENLIAQLPGEKKNGLFGNLIALSLGLTPNFKSNFDLAEDAKLQLSKDTYDDDLDNLLAQIGDQYADLFLAAKNLSDAILLSDILRVNTEITKAPLSASMIKRYDEHHQDLTLLKALVRQQLPEKYKEIFFDQSKNGYAGYIDGGASQEEFYKFIKPILEKMDGTEELLVKLNREDLLRKQRTFDNGSIPHQIHLGELHAILRRQEDFYPFLKDNREKIEKILTFRIPYYVGPLARGNSRFAWMTRKSEETITPWNFEEVVDKGASAQSFIERMTNFDKNLPNEKVLPKHSLLYEYFTVYNELTKVKYVTEGMRKPAFLSGEQKKAIVDLLFKTNRKVTVKQLKEDYFKKIECFDSVEISGVEDRFNASLGTYHDLLKIIKDKDFLDNEENEDILEDIVLTLTLFEDREMIEERLKTYAHLFDDKVMKQLKRRRYTGWGRLSRKLINGIRDKQSGKTILDFLKSDGFANRNFMQLIHDDSLTFKEDIQKAQVSGQGDSLHEHIANLAGSPAIKKGILQTVKVVDELVKVMGRHKPENIVIEMARENQTTQKGQKNSRERMKRIEEGIKELGSQILKEHPVENTQLQNEKLYLYYLQNGRDMYVDQELDINRLSDYDVDHIVPQSFLKDDSIDNKVLTRSDKARGKSDNVPSEEVVKKMKNYWRQLLNAKLITQRKFDNLTKAERGGLSELDKAGFIKRQLVETRQITKHVAQILDSRMNTKYDENDKLIREVKVITLKSKLVSDFRKDFQFYKVREINNYHHAHDAYLNAVVGTALIKKYPKLESEFVYGDYKVYDVRKMIAKSEQEIGKATAKYFFYSNIMNFFKTEITLANGEIRKRPLIETNGETGEIVWDKGRDFATVRKVLSMPQVNIVKKTEVQTGGFSKESILPKRNSDKLIARKKDWDPKKYGGFDSPTVAYSVLVVAKVEKGKSKKLKSVKELLGITIMERSSFEKNPIDFLEAKGYKEVKKDLIIKLPKYSLFELENGRKRMLASAGELQKGNELALPSKYVNFLYLASHYEKLKGSPEDNEQKQLFVEQHKHYLDEIIEQISEFSKRVILADANLDKVLSAYNKHRDKPIREQAENIIHLFTLTNLGAPAAFKYFDTTIDRKRYTSTKEVLDATLIHQSITGLYETRIDLSQLGGDGGGSSGGSEAAAKGGVLNLEEEYRLHEKPVPSSIDPSWLQLFPTVWAERAGMGLANQVPPVVVELRSGASPVAVRQYPMSKEAREGIRPHIQRFLDLGVLVPCQSPWNTPLLPVKKPGTNDYRPVQDLREINKRVQDIHPTVPNPYNLLSSLPPSHTWYSVLDLKDAFFCLKLHPNSQPLFAFEWRDPEKGNTGQLTWTRLPQGFKNSPTLFNEALHRDLAPFRALNPQVVLLQYVDDLLVAAPTYRDCKEGTQKLLQELSKLGYRVSAKKAQLCQKEVTYLGYLLKEGKRWLTPARKATVMKIPPPTTPRQVREFLGTAGFCRLWIPGFASLAAPLYPLTKPSIPFIWTEEHQKAFDRIKEALLSAPALALPDLTKPFTLYVDERAGVARGVLTQTLGPWRRPVAYLSKKLDPVASGWPTCLKAVAAVALLLKDADKLTLGQNVTVIASHSLESIVRQPPDRWMTNARMTHYQSLLLNERVSFAPPAVLNPATLLPVESEATPVHRCSEILAEETGTRRDLKDQPLPGVPAWYTDGSSFIAEGKRRAGAAIVDGKRTVWASSLPEGTSAQKAELVALTQALRLAEGKDINIYTDSRYAFATAHIHGAIYKQRGWLTSAGKDIKNKEEILALLEAIHLPKRVAIIHCPGHQKGNDPVATGNRRADEAAKQAALSTRVLAETTKPAGKRTADGSEFEKRTADGSEFESPKKKAKVE

SEQ ID NO: 810 - protein, 2089 aa, synthetic construct
  source 1..2089: note = Description of Artificial Sequence: Synthetic polypeptide
MPAAKRVKLDGGDKKYSIGLDIGTNSVGWAVITDEYKVPSKKFKVLGNTDRHSIKKNLIGALLFDSGETAEATRLKRTARRRYTRRKNRICYLQEIFSNEMAKVDDSFFHRLEESFLVEEDKKHERHPIFGNIVDEVAYHEKYPTIYHLRKKLVDSTDKADLRLIYLALAHMIKFRGHFLIEGDLNPDNSDVDKLFIQLVQTYNQLFEENPINASGVDAKAILSARLSKSRRLENLIAQLPGEKKNGLFGNLIALSLGLTPNFKSNFDLAEDAKLQLSKDTYDDDLDNLLAQIGDQYADLFLAAKNLSDAILLSDILRVNTEITKAPLSASMIKRYDEHHQDLTLLKALVRQQLPEKYKEIFFDQSKNGYAGYIDGGASQEEFYKFIKPILEKMDGTEELLVKLNREDLLRKQRTFDNGSIPHQIHLGELHAILRRQEDFYPFLKDNREKIEKILTFRIPYYVGPLARGNSRFAWMTRKSEETITPWNFEEVVDKGASAQSFIERMTNFDKNLPNEKVLPKHSLLYEYFTVYNELTKVKYVTEGMRKPAFLSGEQKKAIVDLLFKTNRKVTVKQLKEDYFKKIECFDSVEISGVEDRFNASLGTYHDLLKIIKDKDFLDNEENEDILEDIVLTLTLFEDREMIEERLKTYAHLFDDKVMKQLKRRRYTGWGRLSRKLINGIRDKQSGKTILDFLKSDGFANRNFMQLIHDDSLTFKEDIQKAQVSGQGDSLHEHIANLAGSPAIKKGILQTVKVVDELVKVMGRHKPENIVIEMARENQTTQKGQKNSRERMKRIEEGIKELGSQILKEHPVENTQLQNEKLYLYYLQNGRDMYVDQELDINRLSDYDVDHIVPQSFLKDDSIDNKVLTRSDKARGKSDNVPSEEVVKKMKNYWRQLLNAKLITQRKFDNLTKAERGGLSELDKAGFIKRQLVETRQITKHVAQILDSRMNTKYDENDKLIREVKVITLKSKLVSDFRKDFQFYKVREINNYHHAHDAYLNAVVGTALIKKYPKLESEFVYGDYKVYDVRKMIAKSEQEIGKATAKYFFYSNIMNFFKTEITLANGEIRKRPLIETNGETGEIVWDKGRDFATVRKVLSMPQVNIVKKTEVQTGGFSKESILPKRNSDKLIARKKDWDPKKYGGFDSPTVAYSVLVVAKVEKGKSKKLKSVKELLGITIMERSSFEKNPIDFLEAKGYKEVKKDLIIKLPKYSLFELENGRKRMLASAGELQKGNELALPSKYVNFLYLASHYEKLKGSPEDNEQKQLFVEQHKHYLDEIIEQISEFSKRVILADANLDKVLSAYNKHRDKPIREQAENIIHLFTLTNLGAPAAFKYFDTTIDRKRYTSTKEVLDATLIHQSITGLYETRIDLSQLGGDGGPAPGGGGGVLNLEEEYRLHEKPVPSSIDPSWLQLFPTVWAERAGMGLANQVPPVVVELRSGASPVAVRQYPMSKEAREGIRPHIQRFLDLGVLVPCQSPWNTPLLPVKKPGTNDYRPVQDLREINKRVQDIHPTVPNPYNLLSSLPPSHTWYSVLDLKDAFFCLKLHPNSQPLFAFEWRDPEKGNTGQLTWTRLPQGFKNSPTLFNEALHRDLAPFRALNPQVVLLQYVDDLLVAAPTYRDCKEGTQKLLQELSKLGYRVSAKKAQLCQKEVTYLGYLLKEGKRWLTPARKATVMKIPPPTTPRQVREFLGTAGFCRLWIPGFASLAAPLYPLTKPSIPFIWTEEHQKAFDRIKEALLSAPALALPDLTKPFTLYVDERAGVARGVLTQTLGPWRRPVAYLSKKLDPVASGWPTCLKAVAAVALLLKDADKLTLGQNVTVIASHSLESIVRQPPDRWMTNARMTHYQSLLLNERVSFAPPAVLNPATLLPVESEATPVHRCSEILAEETGTRRDLKDQPLPGVPAWYTDGSSFIAEGKRRAGAAIVDGKRTVWASSLPEGTSAQKAELVALTQALRLAEGKDINIYTDSRYAFATAHIHGAIYKQRGWLTSAGKDIKNKEEILALLEAIHLPKRVAIIHCPGHQKGNDPVATGNRRADEAAKQAALSTRVLAETTKPAGKRTADGSEFEKRTADGSEFESPKKKAKVE

SEQ ID NO: 811 - protein, 2094 aa, synthetic construct
  source 1..2094: note = Description of Artificial Sequence: Synthetic polypeptide
MPAAKRVKLDGGDKKYSIGLDIGTNSVGWAVITDEYKVPSKKFKVLGNTDRHSIKKNLIGALLFDSGETAEATRLKRTARRRYTRRKNRICYLQEIFSNEMAKVDDSFFHRLEESFLVEEDKKHERHPIFGNIVDEVAYHEKYPTIYHLRKKLVDSTDKADLRLIYLALAHMIKFRGHFLIEGDLNPDNSDVDKLFIQLVQTYNQLFEENPINASGVDAKAILSARLSKSRRLENLIAQLPGEKKNGLFGNLIALSLGLTPNFKSNFDLAEDAKLQLSKDTYDDDLDNLLAQIGDQYADLFLAAKNLSDAILLSDILRVNTEITKAPLSASMIKRYDEHHQDLTLLKALVRQQLPEKYKEIFFDQSKNGYAGYIDGGASQEEFYKFIKPILEKMDGTEELLVKLNREDLLRKQRTFDNGSIPHQIHLGELHAILRRQEDFYPFLKDNREKIEKILTFRIPYYVGPLARGNSRFAWMTRKSEETITPWNFEEVVDKGASAQSFIERMTNFDKNLPNEKVLPKHSLLYEYFTVYNELTKVKYVTEGMRKPAFLSGEQKKAIVDLLFKTNRKVTVKQLKEDYFKKIECFDSVEISGVEDRFNASLGTYHDLLKIIKDKDFLDNEENEDILEDIVLTLTLFEDREMIEERLKTYAHLFDDKVMKQLKRRRYTGWGRLSRKLINGIRDKQSGKTILDFLKSDGFANRNFMQLIHDDSLTFKEDIQKAQVSGQGDSLHEHIANLAGSPAIKKGILQTVKVVDELVKVMGRHKPENIVIEMARENQTTQKGQKNSRERMKRIEEGIKELGSQILKEHPVENTQLQNEKLYLYYLQNGRDMYVDQELDINRLSDYDVDHIVPQSFLKDDSIDNKVLTRSDKARGKSDNVPSEEVVKKMKNYWRQLLNAKLITQRKFDNLTKAERGGLSELDKAGFIKRQLVETRQITKHVAQILDSRMNTKYDENDKLIREVKVITLKSKLVSDFRKDFQFYKVREINNYHHAHDAYLNAVVGTALIKKYPKLESEFVYGDYKVYDVRKMIAKSEQEIGKATAKYFFYSNIMNFFKTEITLANGEIRKRPLIETNGETGEIVWDKGRDFATVRKVLSMPQVNIVKKTEVQTGGFSKESILPKRNSDKLIARKKDWDPKKYGGFDSPTVAYSVLVVAKVEKGKSKKLKSVKELLGITIMERSSFEKNPIDFLEAKGYKEVKKDLIIKLPKYSLFELENGRKRMLASAGELQKGNELALPSKYVNFLYLASHYEKLKGSPEDNEQKQLFVEQHKHYLDEIIEQISEFSKRVILADANLDKVLSAYNKHRDKPIREQAENIIHLFTLTNLGAPAAFKYFDTTIDRKRYTSTKEVLDATLIHQSITGLYETRIDLSQLGGDGGGGGEAAAKGSSGGVLNLEEEYRLHEKPVPSSIDPSWLQLFPTVWAERAGMGLANQVPPVVVELRSGASPVAVRQYPMSKEAREGIRPHIQRFLDLGVLVPCQSPWNTPLLPVKKPGTNDYRPVQDLREINKRVQDIHPTVPNPYNLLSSLPPSHTWYSVLDLKDAFFCLKLHPNSQPLFAFEWRDPEKGNTGQLTWTRLPQGFKNSPTLFNEALHRDLAPFRALNPQVVLLQYVDDLLVAAPTYRDCKEGTQKLLQELSKLGYRVSAKKAQLCQKEVTYLGYLLKEGKRWLTPARKATVMKIPPPTTPRQVREFLGTAGFCRLWIPGFASLAAPLYPLTKPSIPFIWTEEHQKAFDRIKEALLSAPALALPDLTKPFTLYVDERAGVARGVLTQTLGPWRRPVAYLSKKLDPVASGWPTCLKAVAAVALLLKDADKLTLGQNVTVIASHSLESIVRQPPDRWMTNARMTHYQSLLLNERVSFAPPAVLNPATLLPVESEATPVHRCSEILAEETGTRRDLKDQPLPGVPAWYTDGSSFIAEGKRRAGAAIVDGKRTVWASSLPEGTSAQKAELVALTQALRLAEGKDINIYTDSRYAFATAHIHGAIYKQRGWLTSAGKDIKNKEEILALLEAIHLPKRVAIIHCPGHQKGNDPVATGNRRADEAAKQAALSTRVLAETTKPAGKRTADGSEFEKRTADGSEFESPKKKAKVE

SEQ ID NO: 812 - protein, 2094 aa, synthetic construct
  source 1..2094: note = Description of Artificial Sequence: Synthetic polypeptide
MPAAKRVKLDGGDKKYSIGLDIGTNSVGWAVITDEYKVPSKKFKVLGNTDRHSIKKNLIGALLFDSGETAEATRLKRTARRRYTRRKNRICYLQEIFSNEMAKVDDSFFHRLEESFLVEEDKKHERHPIFGNIVDEVAYHEKYPTIYHLRKKLVDSTDKADLRLIYLALAHMIKFRGHFLIEGDLNPDNSDVDKLFIQLVQTYNQLFEENPINASGVDAKAILSARLSKSRRLENLIAQLPGEKKNGLFGNLIALSLGLTPNFKSNFDLAEDAKLQLSKDTYDDDLDNLLAQIGDQYADLFLAAKNLSDAILLSDILRVNTEITKAPLSASMIKRYDEHHQDLTLLKALVRQQLPEKYKEIFFDQSKNGYAGYIDGGASQEEFYKFIKPILEKMDGTEELLVKLNREDLLRKQRTFDNGSIPHQIHLGELHAILRRQEDFYPFLKDNREKIEKILTFRIPYYVGPLARGNSRFAWMTRKSEETITPWNFEEVVDKGASAQSFIERMTNFDKNLPNEKVLPKHSLLYEYFTVYNELTKVKYVTEGMRKPAFLSGEQKKAIVDLLFKTNRKVTVKQLKEDYFKKIECFDSVEISGVEDRFNASLGTYHDLLKIIKDKDFLDNEENEDILEDIVLTLTLFEDREMIEERLKTYAHLFDDKVMKQLKRRRYTGWGRLSRKLINGIRDKQSGKTILDFLKSDGFANRNFMQLIHDDSLTFKEDIQKAQVSGQGDSLHEHIANLAGSPAIKKGILQTVKVVDELVKVMGRHKPENIVIEMARENQTTQKGQKNSRERMKRIEEGIKELGSQILKEHPVENTQLQNEKLYLYYLQNGRDMYVDQELDINRLSDYDVDHIVPQSFLKDDSIDNKVLTRSDKARGKSDNVPSEEVVKKMKNYWRQLLNAKLITQRKFDNLTKAERGGLSELDKAGFIKRQLVETRQITKHVAQILDSRMNTKYDENDKLIREVKVITLKSKLVSDFRKDFQFYKVREINNYHHAHDAYLNAVVGTALIKKYPKLESEFVYGDYKVYDVRKMIAKSEQEIGKATAKYFFYSNIMNFFKTEITLANGEIRKRPLIETNGETGEIVWDKGRDFATVRKVLSMPQVNIVKKTEVQTGGFSKESILPKRNSDKLIARKKDWDPKKYGGFDSPTVAYSVLVVAKVEKGKSKKLKSVKELLGITIMERSSFEKNPIDFLEAKGYKEVKKDLIIKLPKYSLFELENGRKRMLASAGELQKGNELALPSKYVNFLYLASHYEKLKGSPEDNEQKQLFVEQHKHYLDEIIEQISEFSKRVILADANLDKVLSAYNKHRDKPIREQAENIIHLFTLTNLGAPAAFKYFDTTIDRKRYTSTKEVLDATLIHQSITGLYETRIDLSQLGGDGGEAAAKGSSPAPGGVLNLEEEYRLHEKPVPSSIDPSWLQLFPTVWAERAGMGLANQVPPVVVELRSGASPVAVRQYPMSKEAREGIRPHIQRFLDLGVLVPCQSPWNTPLLPVKKPGTNDYRPVQDLREINKRVQDIHPTVPNPYNLLSSLPPSHTWYSVLDLKDAFFCLKLHPNSQPLFAFEWRDPEKGNTGQLTWTRLPQGFKNSPTLFNEALHRDLAPFRALNPQVVLLQYVDDLLVAAPTYRDCKEGTQKLLQELSKLGYRVSAKKAQLCQKEVTYLGYLLKEGKRWLTPARKATVMKIPPPTTPRQVREFLGTAGFCRLWIPGFASLAAPLYPLTKPSIPFIWTEEHQKAFDRIKEALLSAPALALPDLTKPFTLYVDERAGVARGVLTQTLGPWRRPVAYLSKKLDPVASGWPTCLKAVAAVALLLKDADKLTLGQNVTVIASHSLESIVRQPPDRWMTNARMTHYQSLLLNERVSFAPPAVLNPATLLPVESEATPVHRCSEILAEETGTRRDLKDQPLPGVPAWYTDGSSFIAEGKRRAGAAIVDGKRTVWASSLPEGTSAQKAELVALTQALRLAEGKDINIYTDSRYAFATAHIHGAIYKQRGWLTSAGKDIKNKEEILALLEAIHLPKRVAIIHCPGHQKGNDPVATGNRRADEAAKQAALSTRVLAETTKPAGKRTADGSEFEKRTADGSEFESPKKKAKVE

SEQ ID NO: 813 - protein, 2098 aa, synthetic construct
  source 1..2098: note = Description of Artificial Sequence: Synthetic polypeptide
MPAAKRVKLDGGDKKYSIGLDIGTNSVGWAVITDEYKVPSKKFKVLGNTDRHSIKKNLIGALLFDSGETAEATRLKRTARRRYTRRKNRICYLQEIFSNEMAKVDDSFFHRLEESFLVEEDKKHERHPIFGNIVDEVAYHEKYPTIYHLRKKLVDSTDKADLRLIYLALAHMIKFRGHFLIEGDLNPDNSDVDKLFIQLVQTYNQLFEENPINASGVDAKAILSARLSKSRRLENLIAQLPGEKKNGLFGNLIALSLGLTPNFKSNFDLAEDAKLQLSKDTYDDDLDNLLAQIGDQYADLFLAAKNLSDAILLSDILRVNTEITKAPLSASMIKRYDEHHQDLTLLKALVRQQLPEKYKEIFFDQSKNGYAGYIDGGASQEEFYKFIKPILEKMDGTEELLVKLNREDLLRKQRTFDNGSIPHQIHLGELHAILRRQEDFYPFLKDNREKIEKILTFRIPYYVGPLARGNSRFAWMTRKSEETITPWNFEEVVDKGASAQSFIERMTNFDKNLPNEKVLPKHSLLYEYFTVYNELTKVKYVTEGMRKPAFLSGEQKKAIVDLLFKTNRKVTVKQLKEDYFKKIECFDSVEISGVEDRFNASLGTYHDLLKIIKDKDFLDNEENEDILEDIVLTLTLFEDREMIEERLKTYAHLFDDKVMKQLKRRRYTGWGRLSRKLINGIRDKQSGKTILDFLKSDGFANRNFMQLIHDDSLTFKEDIQKAQVSGQGDSLHEHIANLAGSPAIKKGILQTVKVVDELVKVMGRHKPENIVIEMARENQTTQKGQKNSRERMKRIEEGIKELGSQILKEHPVENTQLQNEKLYLYYLQNGRDMYVDQELDINRLSDYDVDHIVPQSFLKDDSIDNKVLTRSDKARGKSDNVPSEEVVKKMKNYWRQLLNAKLITQRKFDNLTKAERGGLSELDKAGFIKRQLVETRQITKHVAQILDSRMNTKYDENDKLIREVKVITLKSKLVSDFRKDFQFYKVREINNYHHAHDAYLNAVVGTALIKKYPKLESEFVYGDYKVYDVRKMIAKSEQEIGKATAKYFFYSNIMNFFKTEITLANGEIRKRPLIETNGETGEIVWDKGRDFATVRKVLSMPQVNIVKKTEVQTGGFSKESILPKRNSDKLIARKKDWDPKKYGGFDSPTVAYSVLVVAKVEKGKSKKLKSVKELLGITIMERSSFEKNPIDFLEAKGYKEVKKDLIIKLPKYSLFELENGRKRMLASAGELQKGNELALPSKYVNFLYLASHYEKLKGSPEDNEQKQLFVEQHKHYLDEIIEQISEFSKRVILADANLDKVLSAYNKHRDKPIREQAENIIHLFTLTNLGAPAAFKYFDTTIDRKRYTSTKEVLDATLIHQSITGLYETRIDLSQLGGDGGGSSGSSGSSGSSGSSGGVLNLEEEYRLHEKPVPSSIDPSWLQLFPTVWAERAGMGLANQVPPVVVELRSGASPVAVRQYPMSKEAREGIRPHIQRFLDLGVLVPCQSPWNTPLLPVKKPGTNDYRPVQDLREINKRVQDIHPTVPNPYNLLSSLPPSHTWYSVLDLKDAFFCLKLHPNSQPLFAFEWRDPEKGNTGQLTWTRLPQGFKNSPTLFNEALHRDLAPFRALNPQVVLLQYVDDLLVAAPTYRDCKEGTQKLLQELSKLGYRVSAKKAQLCQKEVTYLGYLLKEGKRWLTPARKATVMKIPPPTTPRQVREFLGTAGFCRLWIPGFASLAAPLYPLTKPSIPFIWTEEHQKAFDRIKEALLSAPALALPDLTKPFTLYVDERAGVARGVLTQTLGPWRRPVAYLSKKLDPVASGWPTCLKAVAAVALLLKDADKLTLGQNVTVIASHSLESIVRQPPDRWMTNARMTHYQSLLLNERVSFAPPAVLNPATLLPVESEATPVHRCSEILAEETGTRRDLKDQPLPGVPAWYTDGSSFIAEGKRRAGAAIVDGKRTVWASSLPEGTSAQKAELVALTQALRLAEGKDINIYTDSRYAFATAHIHGAIYKQRGWLTSAGKDIKNKEEILALLEAIHLPKRVAIIHCPGHQKGNDPVATGNRRADEAAKQAALSTRVLAETTKPAGKRTADGSEFEKRTADGSEFESPKKKAKVE

SEQ ID NO: 814 - protein, 2094 aa, synthetic construct
  source 1..2094: note = Description of Artificial Sequence: Synthetic polypeptide
MPAAKRVKLDGGDKKYSIGLDIGTNSVGWAVITDEYKVPSKKFKVLGNTDRHSIKKNLIGALLFDSGETAEATRLKRTARRRYTRRKNRICYLQEIFSNEMAKVDDSFFHRLEESFLVEEDKKHERHPIFGNIVDEVAYHEKYPTIYHLRKKLVDSTDKADLRLIYLALAHMIKFRGHFLIEGDLNPDNSDVDKLFIQLVQTYNQLFEENPINASGVDAKAILSARLSKSRRLENLIAQLPGEKKNGLFGNLIALSLGLTPNFKSNFDLAEDAKLQLSKDTYDDDLDNLLAQIGDQYADLFLAAKNLSDAILLSDILRVNTEITKAPLSASMIKRYDEHHQDLTLLKALVRQQLPEKYKEIFFDQSKNGYAGYIDGGASQEEFYKFIKPILEKMDGTEELLVKLNREDLLRKQRTFDNGSIPHQIHLGELHAILRRQEDFYPFLKDNREKIEKILTFRIPYYVGPLARGNSRFAWMTRKSEETITPWNFEEVVDKGASAQSFIERMTNFDKNLPNEKVLPKHSLLYEYFTVYNELTKVKYVTEGMRKPAFLSGEQKKAIVDLLFKTNRKVTVKQLKEDYFKKIECFDSVEISGVEDRFNASLGTYHDLLKIIKDKDFLDNEENEDILEDIVLTLTLFEDREMIEERLKTYAHLFDDKVMKQLKRRRYTGWGRLSRKLINGIRDKQSGKTILDFLKSDGFANRNFMQLIHDDSLTFKEDIQKAQVSGQGDSLHEHIANLAGSPAIKKGILQTVKVVDELVKVMGRHKPENIVIEMARENQTTQKGQKNSRERMKRIEEGIKELGSQILKEHPVENTQLQNEKLYLYYLQNGRDMYVDQELDINRLSDYDVDHIVPQSFLKDDSIDNKVLTRSDKARGKSDNVPSEEVVKKMKNYWRQLLNAKLITQRKFDNLTKAERGGLSELDKAGFIKRQLVETRQITKHVAQILDSRMNTKYDENDKLIREVKVITLKSKLVSDFRKDFQFYKVREINNYHHAHDAYLNAVVGTALIKKYPKLESEFVYGDYKVYDVRKMIAKSEQEIGKATAKYFFYSNIMNFFKTEITLANGEIRKRPLIETNGETGEIVWDKGRDFATVRKVLSMPQVNIVKKTEVQTGGFSKESILPKRNSDKLIARKKDWDPKKYGGFDSPTVAYSVLVVAKVEKGKSKKLKSVKELLGITIMERSSFEKNPIDFLEAKGYKEVKKDLIIKLPKYSLFELENGRKRMLASAGELQKGNELALPSKYVNFLYLASHYEKLKGSPEDNEQKQLFVEQHKHYLDEIIEQISEFSKRVILADANLDKVLSAYNKHRDKPIREQAENIIHLFTLTNLGAPAAFKYFDTTIDRKRYTSTKEVLDATLIHQSITGLYETRIDLSQLGGDGGPAPAPAPAPAPGGVLNLEEEYRLHEKPVPSSIDPSWLQLFPTVWAERAGMGLANQVPPVVVELRSGASPVAVRQYPMSKEAREGIRPHIQRFLDLGVLVPCQSPWNTPLLPVKKPGTNDYRPVQDLREINKRVQDIHPTVPNPYNLLSSLPPSHTWYSVLDLKDAFFCLKLHPNSQPLFAFEWRDPEKGNTGQLTWTRLPQGFKNSPTLFNEALHRDLAPFRALNPQVVLLQYVDDLLVAAPTYRDCKEGTQKLLQELSKLGYRVSAKKAQLCQKEVTYLGYLLKEGKRWLTPARKATVMKIPPPTTPRQVREFLGTAGFCRLWIPGFASLAAPLYPLTKPSIPFIWTEEHQKAFDRIKEALLSAPALALPDLTKPFTLYVDERAGVARGVLTQTLGPWRRPVAYLSKKLDPVASGWPTCLKAVAAVALLLKDADKLTLGQNVTVIASHSLESIVRQPPDRWMTNARMTHYQSLLLNERVSFAPPAVLNPATLLPVESEATPVHRCSEILAEETGTRRDLKDQPLPGVPAWYTDGSSFIAEGKRRAGAAIVDGKRTVWASSLPEGTSAQKAELVALTQALRLAEGKDINIYTDSRYAFATAHIHGAIYKQRGWLTSAGKDIKNKEEILALLEAIHLPKRVAIIHCPGHQKGNDPVATGNRRADEAAKQAALSTRVLAETTKPAGKRTADGSEFEKRTADGSEFESPKKKAKVE

SEQ ID NO: 815 - protein, 2086 aa, synthetic construct
  source 1..2086: note = Description of Artificial Sequence: Synthetic polypeptide
MPAAKRVKLDGGDKKYSIGLDIGTNSVGWAVITDEYKVPSKKFKVLGNTDRHSIKKNLIGALLFDSGETAEATRLKRTARRRYTRRKNRICYLQEIFSNEMAKVDDSFFHRLEESFLVEEDKKHERHPIFGNIVDEVAYHEKYPTIYHLRKKLVDSTDKADLRLIYLALAHMIKFRGHFLIEGDLNPDNSDVDKLFIQLVQTYNQLFEENPINASGVDAKAILSARLSKSRRLENLIAQLPGEKKNGLFGNLIALSLGLTPNFKSNFDLAEDAKLQLSKDTYDDDLDNLLAQIGDQYADLFLAAKNLSDAILLSDILRVNTEITKAPLSASMIKRYDEHHQDLTLLKALVRQQLPEKYKEIFFDQSKNGYAGYIDGGASQEEFYKFIKPILEKMDGTEELLVKLNREDLLRKQRTFDNGSIPHQIHLGELHAILRRQEDFYPFLKDNREKIEKILTFRIPYYVGPLARGNSRFAWMTRKSEETITPWNFEEVVDKGASAQSFIERMTNFDKNLPNEKVLPKHSLLYEYFTVYNELTKVKYVTEGMRKPAFLSGEQKKAIVDLLFKTNRKVTVKQLKEDYFKKIECFDSVEISGVEDRFNASLGTYHDLLKIIKDKDFLDNEENEDILEDIVLTLTLFEDREMIEERLKTYAHLFDDKVMKQLKRRRYTGWGRLSRKLINGIRDKQSGKTILDFLKSDGFANRNFMQLIHDDSLTFKEDIQKAQVSGQGDSLHEHIANLAGSPAIKKGILQTVKVVDELVKVMGRHKPENIVIEMARENQTTQKGQKNSRERMKRIEEGIKELGSQILKEHPVENTQLQNEKLYLYYLQNGRDMYVDQELDINRLSDYDVDHIVPQSFLKDDSIDNKVLTRSDKARGKSDNVPSEEVVKKMKNYWRQLLNAKLITQRKFDNLTKAERGGLSELDKAGFIKRQLVETRQITKHVAQILDSRMNTKYDENDKLIREVKVITLKSKLVSDFRKDFQFYKVREINNYHHAHDAYLNAVVGTALIKKYPKLESEFVYGDYKVYDVRKMIAKSEQEIGKATAKYFFYSNIMNFFKTEITLANGEIRKRPLIETNGETGEIVWDKGRDFATVRKVLSMPQVNIVKKTEVQTGGFSKESILPKRNSDKLIARKKDWDPKKYGGFDSPTVAYSVLVVAKVEKGKSKKLKSVKELLGITIMERSSFEKNPIDFLEAKGYKEVKKDLIIKLPKYSLFELENGRKRMLASAGELQKGNELALPSKYVNFLYLASHYEKLKGSPEDNEQKQLFVEQHKHYLDEIIEQISEFSKRVILADANLDKVLSAYNKHRDKPIREQAENIIHLFTLTNLGAPAAFKYFDTTIDRKRYTSTKEVLDATLIHQSITGLYETRIDLSQLGGDGGGGGGGVLNLEEEYRLHEKPVPSSIDPSWLQLFPTVWAERAGMGLANQVPPVVVELRSGASPVAVRQYPMSKEAREGIRPHIQRFLDLGVLVPCQSPWNTPLLPVKKPGTNDYRPVQDLREINKRVQDIHPTVPNPYNLLSSLPPSHTWYSVLDLKDAFFCLKLHPNSQPLFAFEWRDPEKGNTGQLTWTRLPQGFKNSPTLFNEALHRDLAPFRALNPQVVLLQYVDDLLVAAPTYRDCKEGTQKLLQELSKLGYRVSAKKAQLCQKEVTYLGYLLKEGKRWLTPARKATVMKIPPPTTPRQVREFLGTAGFCRLWIPGFASLAAPLYPLTKPSIPFIWTEEHQKAFDRIKEALLSAPALALPDLTKPFTLYVDERAGVARGVLTQTLGPWRRPVAYLSKKLDPVASGWPTCLKAVAAVALLLKDADKLTLGQNVTVIASHSLESIVRQPPDRWMTNARMTHYQSLLLNERVSFAPPAVLNPATLLPVESEATPVHRCSEILAEETGTRRDLKDQPLPGVPAWYTDGSSFIAEGKRRAGAAIVDGKRTVWASSLPEGTSAQKAELVALTQALRLAEGKDINIYTDSRYAFATAHIHGAIYKQRGWLTSAGKDIKNKEEILALLEAIHLPKRVAIIHCPGHQKGNDPVATGNRRADEAAKQAALSTRVLAETTKPAGKRTADGSEFEKRTADGSEFESPKKKAKVE

(The sequence listing continues in the following parts.)
